United States Patent Application Publication US 2021/0260178 A1 - sequence listing, part 19

SEQ ID NO: 31355 - RNA, 1665 nt, Artificial Sequence
  mRNA product Design i-3 (A100) comprising derived and/or modified sequence from LASV(G1180-SLE-2010;Clade IV)__AIT17168__GPCmut6 (opt1)
aggagaaagcuuaccaugggccagaucgugaccuucuuccaggaggucccccacgugaucgaggaggugaugaacaucguccugaucgcccucagcauccuggccgugcugaaggggcucuacaacuucgcgaccugcggccugguggggcugcucacguuccugcugcucugcggccgcuccugcaccgccagccgguacaagggggucuacgagcugcagacccuggagcucaacauggagacccugaacaugugcaugccgcuguccugcacgaagaacaacagccaccacuacaucauggugggcaacgagaccggccucgagcugacccugaccaacacguccaucaucaaccacaaguucugcaaccucagcgacgcccacaagaagaaccuguacgaccacgcccugauguccaucaucagcaccuuccaccucuccauccccaacuucaaccaguacgaggccaugagcugcgacuucaacgggggcaagaucuccgugcaguacaaccugagccacuccuacgcgggggacgccgccaaccacugcggcaccgucgccaacggggugcugcagaccuucaugcgcauggcguggggcggcagcuacaucgcccucgacuccgggcacggcagcugggacugcaucaugacguccuaccaguaccugaucauccagaacaccaccugggaggaccacugccaguucagccggcccucccccaucggguaccugggccuccugagccagcgcacccgggacaucuacaucagccgccggcugcucggcacguucaccuggacccuguccgacagcgaggggaaggacaccccgggcggguacugccugacgcgcuggaugcucaucgaggccgagcugaagugcuucggcaacaccgccguggccaagugcaacgagaagcacgacgaggaguucugcgacaugcugcggcuguucgacuucugcaagcaggcgauccagcgccugaaggcccccgcccagauguccauccagcugaucaacaaggccgucaacgcccucaucaacgaccagcugaucaugaagaaccaccuccgggacaucauggggauccccuacugcaacuacagcaaguacugguaccucaaccacaccaccacgggcaagaccucccugcccaagugcuggcuggugagcaacggcuccuaccucaacgagacccacuucagcgacgacaucgagcagcaggcggacaacaugaucaccgagaugcugcagaaggaguacauggagcgccaggggaagacgccgcugggccugguggaccucuucgucuucuccaccagcuucuaccugaucuccaucuuccugcaccucgugaagauccccacccaccggcacaucgugggcaagagcugccccaagccccaccgccugaaccacauggggaucugcuccugcgggcuguacaagcagccgggcguccccgugaaguggaagcggugaggacuaguuauaagacugacuagcccgaugggccucccaacgggcccuccuccccuccuugcaccgagauuaauaaaaaaaaaaaaaaaaaaaaaaaaaaaaaaaaaaaaaaaaaaaaaaaaaaaaaaaaaaaaaaaaaaaaaaaaaaaaaaaaaaaaaaaaaaaaaaaaaaaa

SEQ ID NO: 31356 - RNA, 1665 nt, Artificial Sequence
  mRNA product Design i-3 (A100) comprising derived and/or modified sequence from LASV(G1442-SLE-2011;Clade IV)__AIT17180__GPCmut6 (opt1)
aggagaaagcuuaccaugggccagaucgugaccuucuuccaggaggucccccacgugaucgaggaggugaugaacaucguccugaucgcccucagcauccuggccgugcugaaggggcucuacaacguggcgaccugcggccugaucgggcuggucacguuccuccugcugugcggccgcuccugcaccaccacccucuacaaggggguguacgagcugcagacgcuggagcucaacauggagacccugaacaugugcaugccgcugagcugcaccaagaacaacucccaccacuacauccgggugggcaacgagaccggccucgagcugacgcugaccaacaccagcaucaucaaccacaaguucugcaaccucuccgacgcccacaagaagaaccuguacgaccacgcccugaugagcaucaucuccaccuuccaccucagcauccccaacuucaaccaguacgaggccauguccugcgacuucaacgggggcaagaucagcguccaguacaaccugucccacagcuacgccggggacgcggccaaccacugcggcacgguggccaacggggugcugcagaccuucaugcgcauggccuggggcggcuccuacaucgcgcucgacagcgggcggggcaacugggacugcaucaugaccuccuaccaguaccugaucauccagaacaccacgugggacgaccacugccaguucagccgccccucccccaucggguaccugggccuccugagccagcggacccgcgacgucuacaucucccggcgccugcucggcaccuucaccuggacgcugagcgacagcgaggggaaggacaccccgggcggguacugccugacccgguggaugcucaucgaggccgagcugaagugcuucggcaacaccgccguggccaagugcaacgagaagcacgacgaggaguucugcgacaugcugcgccucuucgacuucugcaagcaggccauccagcggcugaaggcgcccgcccagauguccauccagcugaucaacaaggccgugaacgcccucaucaacgaccagcugaucaugaagaaccaccuccgcgacaucauggggauccccuacugcaacuacagcaaguacugguaccugaacaacacggccaccggcaagaccucccugcccaagugcuggcugaucagcaacggcuccuaccucaacgagacccacuucagcgacgacaucgagcaggaggcggacaacaugaucacggagaugcugcagaaggaguacauggagcggcaggggaagaccccgcugggccuggucgaccucuucguguucuccaccagcuucuaccugaucuccaucuuccugcaccucgugaagauccccacccaccgccacaucgucggcaagagcugccccaagccccaccggcugaaccacauggggaucugcuccugcgggcuguacaagcagccgggcgugcccgugcgcuggaagcggugaggacuaguuauaagacugacuagcccgaugggccucccaacgggcccuccuccccuccuugcaccgagauuaauaaaaaaaaaaaaaaaaaaaaaaaaaaaaaaaaaaaaaaaaaaaaaaaaaaaaaaaaaaaaaaaaaaaaaaaaaaaaaaaaaaaaaaaaaaaaaaaaaaaa

SEQ ID NO: 31357 - RNA, 1665 nt, Artificial Sequence
  mRNA product Design i-3 (A100) comprising derived and/or modified sequence from LASV(G3010-SLE-2013;Clade IV)__AIT17344__GPCmut6 (opt1)
aggagaaagcuuaccaugggccagaucgugaccuucuuccaggaggucccccacgugaucgaggaggugaugaacaucguccugaucgcccucagcauccuggccgugcugaaggggcucuacaacuucgcgaccugcggccugguggggcuggucacguuccuccugcugugcggccgcuccugcaccaccagccucuacaaggggguguacgagcugcagacccuggagcucaacauggagacgcugaacaugugcaugccgcuguccugcaccaagaacaacagccaccacuacaucauggugggcaacgagaccggccucgagcugacccugacgaacaccuccaucaucaaccacaaguucugcaaccucagcgacgcccacaagaagaaccuguacaaccacgcccugauguccaucaucagcaccuuccaccucuccauccccaacuucaaccaguacgaggccaugagcugcgacuucaacgggggcaagaucuccguccaguacaaccugagccacuccuacgccggggacgcggccagccacugcggcaccguggccaacggggugcugcagacguucaugcggauggccuggggcggcuccuacaucgcgcucgacagcggguacggcaagugggacugcaucaugaccuccuaccaguaccugaucauccagaacaccaccugggaggaccacugccaguucagccgccccucccccaucggguaccugggccuccugagccagcggacgcgcgacaucuacaucagccggcgccugcucggcaccuucaccuggacccuguccgacagcgaggggaaggacacgccgggcggguacugccugacccgguggaugcucaucgaggccgagcugaagugcuucggcaacaccgccgucgccaagugcaacgagaagcacgacgaggaguucugcgacaugcugcgccucuucgacuucugcaagcaggccauccagcggcugaagacccccgcgcagauguccauccagcugaucaacaaggccgugaacgcccucaucaacgaccagcugaucaugaagaaccaccuccgcgacaucauggggauccccuacugcaacuacagcaaguacugguaccugaaccacacgaccaccggcaagaccucccugcccaagugcuggcuggugagcaacggcuccuaccucaacgagacgcacuucagcgacgacaucgagcagcaggccgacaacaugaucaccgagaugcugcagaaggaguacauggagcggcaggggaagaccccgcugggccuggucgaccucuucguguucuccaccagcuucuaccugaucuccaucuuccugcaccucgugaagauccccacgcaccgccacaucgucggcaagagcugccccaagccccaccggcugaaccacauggggaucugcuccugcgggcuguacaagcagccgggcgugcccgugcgcuggaagcggugaggacuaguuauaagacugacuagcccgaugggccucccaacgggcccuccuccccuccuugcaccgagauuaauaaaaaaaaaaaaaaaaaaaaaaaaaaaaaaaaaaaaaaaaaaaaaaaaaaaaaaaaaaaaaaaaaaaaaaaaaaaaaaaaaaaaaaaaaaaaaaaaaaaa

SEQ ID NO: 31358 - RNA, 1665 nt, Artificial Sequence
  mRNA product Design i-3 (A100) comprising derived and/or modified sequence from LASV(G502-SLE-2009;Clade IV)__AIT17126__GPCmut6 (opt1)
aggagaaagcuuaccaugggccagaucgugaccuucuuccaggaggucccccacgugaucgaggaggugaugaacaucguccugaucgcccucagcauccuggccgugcugaaggggcucuacaacuucgcgaccugcggccugguggggcugcucacguuccugcugcucugcggccgcuccugcaccaccgggcuguacaagggcgucuacgagcugcagacccucgagcugaacauggagacgcugaacaugugcaugccgcucagcugcaccaagaacaacucccaccacuacaucauggugggcaacgagaccgggcuggagcugacccucacgaacaccagcaucaucaaccacaaguucugcaaccuguccgacgcccacaagaagaaccuguacgaccacgcccucaugagcaucaucuccaccuuccaccugagcauccccaacuucaaccaguacgaggccauguccugcgacuucaacggcgggaagaucagcgugcaguacaaccugucccacagcuacgccggcgacgcggccgaccacugcgggaccgucgccaacggcgugcuccagacguucaugcggauggccuggggcggguccuacaucgcgcuggacagcggccgcgggcggugggacugcaucaugaccuccuaccaguaccugaucauccagaacaccaccugggaggaccacugccaguucagccgccccucccccaucggcuaccucggccugcugagccagcggacgcgcgacaucuacaucucccggcgccuccuggggaccuucaccuggacccugagcgacagcgagggcaaggacacgcccgggggcuacugccucacccgguggaugcugaucgaggccgagcugaagugcuucgggaacaccgccguggccaagugcaacgagaagcacgacgaggaguucugcgacaugcuccgccuguucgacuucugcaagcaggccauccagcggcugaaggcgccggcccagauguccauccagcucaucaacaaggccgucaacgcccugaucaacgaccagcuggugaugaagaaccaccuccgcgacaucaugggcauccccuacugcaacuacagccgguacugguaccugaaccacaccacgaccggccgcaccucccugcccaagugcuggcucgugagcaacggguccuaccugaacgagacccacuucagcgacgacaucgagcagcaggccgacaacaugaucacggagaugcugcagaaggaguacauggagcggcagggcaagaccccgcuggggcucgucgaccuguucguguucuccaccagcuucuaccugaucuccaucuuccuccaccuggugaagauccccacccaccgccacaucgucggcaagagcugccccaagccccaccggcugaaccacauggggaucugcuccugcggccucuacaagcagccgggcgugcccgugaaguggaagcgcugaggacuaguuauaagacugacuagcccgaugggccucccaacgggcccuccuccccuccuugcaccgagauuaauaaaaaaaaaaaaaaaaaaaaaaaaaaaaaaaaaaaaaaaaaaaaaaaaaaaaaaaaaaaaaaaaaaaaaaaaaaaaaaaaaaaaaaaaaaaaaaaaaaaa

SEQ ID NO: 31359 - RNA, 1665 nt, Artificial Sequence
  mRNA product Design i-3 (A100) comprising derived and/or modified sequence from LASV(G733-SLE-2010;Clade IV)__AIT17154__GPCmut6 (opt1)
aggagaaagcuuaccaugggccagaucgugaccuucuuccaggaggucccccacgugaucgaggaggugaugaacaucguccugaucgcccucagcauccuggccgugcugaaggggcucuacaacuucgcgaccugcggcaucguggggcuggucuccuuccugcuccugugcggccgcagcugcacgaccucccuguacaaggggguguacgagcuccagacccuggagcugaacauggagacccucaacaugugcaugccgcugagcugcacgaagaacaacucccaccacuacaucauggugggcaacgagaccggccuggagcucacccugaccaacacgagcaucaucaaccacaaguucugcaaccuguccgacgcccacaagaagaaccucuacgaccacgcccugaugagcaucaucuccaccuuccaccugagcauccccaacuucaaccaguacgaggccauguccugcgacuucaacgggggcaagaucagcguccaguacaaccucucccacagcuacgccggggacgcggccaaccacugcggcaccaucgccaacggggugcugcagaccuucaugcggauggccuggggcggcuccuacaucgcgcuggacagcgggcgcgaccggugggacugcaucaugacguccuaccaguaccucaucauccagaacaccaccugggaggaccacugccaguucagccgccccucccccaucggcuaccuggggcugcucagccagcggacccgcgacaucuacaucagccggcgccugcugggcacguucaccuggacccucuccgacagcgagggcaaggacacccccgggggcuacugccugacgcgguggaugcugaucgaggccgagcucaagugcuucgggaacaccgccguggccaagugcaacgagaagcacgacgaggaguucugcgacaugcugcgccuguucgacuucugcaagcaggccauccagcggcucaaggcgccggcccagauguccauccagcugaucaacaaggccgucaacgcccugaucaacgaccagcucaucaugaagaaccaccuccgcgacaucaugggcauccccuacugcaacuacagcaaguacugguaccugaaccacaccaccacggggaagaccucccugcccaagugcuggcuggugagcaacggcuccuaccugaacgagacccacuucagcgacgacaucgagcagcaggccgacaacaugaucaccgagaugcuccagaaggaguacauggagcggcagggcaagacgccgcuggggcugguggaccuguucgucuucuccaccagcuucuaccucaucuccaucuuccugcaccuggugaagauccccacccaccgccacguggucggcaagagcugccccaagccccaccggcucaaccacauggggaucugcuccugcggccuguacgggcagccgggcgugcccgugaaguggaagcgcugaggacuaguuauaagacugacuagcccgaugggccucccaacgggcccuccuccccuccuugcaccgagauuaauaaaaaaaaaaaaaaaaaaaaaaaaaaaaaaaaaaaaaaaaaaaaaaaaaaaaaaaaaaaaaaaaaaaaaaaaaaaaaaaaaaaaaaaaaaaaaaaaaaaa

SEQ ID NO: 31360 - RNA, 1665 nt, Artificial Sequence
  mRNA product Design i-3 (A100) comprising derived and/or modified sequence from MOPV/LASV reassortant(IGS-1;Clade IV)__AFY05576__GPCmut6 (opt1)
aggagaaagcuuaccaugggccagaucgugaccuucuuccaggaggucccccacgugaucgaggaggugaugaacaucguccugaucgcccucagcgugcuggccgugcugaaggggcucuacaacuucgcgaccugcggccuggucgggcuggugacguuccuccugcugugcggccgcuccugcaccaccagccucuacaaggggguguacgagcugcagacccuggagcucaacauggagacgcugaacaugugcaugccgcuguccugcaccaagaacaacagccaccacuacaucauggucggcaacgagaccggccucgagcugacccugacgaacaccuccaucaucaaccacaaguucugcaaccucagcgacgcccacaagaagaaccuguacgaccacgcccugauguccaucaucagcaccuuccaccucuccauccccaacuucaaccaguacgaggccaugagcugcgacuucaacgggggcaagaucuccgugcaguacaaccugagccacuccuacgccggggacgcggccaaccacugcggcaccguggccaacgggguccugcagacguucaugcggauggccuggggcggcagcuacaucgcgcucgacuccgggcgcggcaacugggacugcaucaugaccagcuaccaguaccugaucauccagaacaccaccugggaggaccacugccaguucucccggcccagccccaucggguaccugggccuccugucccagcgcacgcgggacaucuacaucagccgccggcugcucggcaccuucaccuggacccugagcgacuccgagggggaggacacgccgggcggguacugccugacccgcuggaugcucaucgaggccgagcugaagugcuucggcaacaccgccguggccaagugcaacgagaagcacgacgaggaguucugcgacaugcugcggcuguucgacuucugcaagcaggccauccagcgccugaaggcgcccgcccagaugagcauccagcugaucaacaaggccgugaacgcccucaucaacgaccagcugaucaugaagaaccaccuccgggacaucauggggauccccuacugcaacuacuccaaguacugguaccucaaccacaccacgaccggccgcaccagccugcccaagugcuggcuggucuccaacggcagcuaccucaacgagacccacuucuccgacgacaucgagcagcaggccgacaacaugaucacggagaugcugcagaaggaguacauggagcggcaggggaagaccccgcugggccugguggaccucuucguguucagcaccuccuucuaccugaucagcaucuuccugcaccucgucaagauccccacccaccgccacaucguggggaaguccugccccaagccccaccggcugaaccacaugggcaucugcagcugcgggcuguacaagcagccgggcgugcccgucaaguggaagcgcugaggacuaguuauaagacugacuagcccgaugggccucccaacgggcccuccuccccuccuugcaccgagauuaauaaaaaaaaaaaaaaaaaaaaaaaaaaaaaaaaaaaaaaaaaaaaaaaaaaaaaaaaaaaaaaaaaaaaaaaaaaaaaaaaaaaaaaaaaaaaaaaaaaaa

SEQ ID NO: 31361 - RNA, 1665 nt, Artificial Sequence
  mRNA product Design i-3 (A100) comprising derived and/or modified sequence from LASV(LM765-SLE-2012;Clade IV)__AIT17814__GPCmut6 (opt1)
aggagaaagcuuaccaugggccagaucgugaccuucuuccaggaggucccccacgugaucgaggaggugaugaacaucguccugaucgcccucagcauccuggccgugcugaaggggcucuacaacuucgcgaccugcggccugguggggcuggucacguuccuccugcugugcggccgcuccugcaccaccagccucuacaaggggguguacgagcugcagacccuggagcucaacauggagacgcugaacaugugcaugccgcuguccugcaccaagaacaacagccaccacuacaucauggugggcaacgagaccggccucgagcugacccugacgaacaccuccaucaucgaccacaaguucugcaaccucagcgacgcccaccggaagaaccuguacgaccacgcccugauguccaucaucagcaccuuccaccucuccauccccaacuucaaccaguacgaggccaugagcugcgacuucaacgggggcaagaucuccguccaguacaaccugagccacuccuacgccaaggacgcggccgaccacugcgggaccguggccaacggcgugcugcagacguucaugcgcauggccuggggcgggagcuacaucgcgcucgacuccggccgggggcgcugggacugcaucaugaccagcuaccaguaccugaucauccagaacaccaccugggaggaccacugccaguucucccggcccagccccaucggcuaccuggggcuccugucccagcgcacgcgggacaucuacaucagccgccggcugcucggcaccuucaccuggacccugagcgacuccgagggcaaggacacgcccgggggcuacugccugacccgcuggaugcucaucgaggccgagcugaagugcuucgggaacaccgccgucgccaagugcaacgagaagcacgacgaggaguucugcgacaugcugcggcuguucgacuucugcaagcaggccauccagcgccugaaggcgccggcccagaugagcauccagcugaucaacaaggccgugaacgcccucaucaacgaccagcugaucaugaagaaccaccuccgggacaucaugggcauccccuacugcaacuacuccaaguacugguaccucaaccacaccacgaccgggaagaccagccugcccaagugcuggcugguguccaacggcagcuaccucaacgagacccacuucuccgacgacaucgagcagcaggccgacaacaugaucacggagaugcugcagaaggaguacauggagcgccagggcaagaccccgcuggggcuggucgaccucuucguguucagcaccuccuucuaccugaucagcaucuuccugcaccucgugaagauccccacccaccggcacaucgucggcaagcccugccccaagccgcaccgccugaaccacauggggaucugcuccugcggccuguacaagcagcccggggugcccgugaaguggaagcggugaggacuaguuauaagacugacuagcccgaugggccucccaacgggcccuccuccccuccuugcaccgagauuaauaaaaaaaaaaaaaaaaaaaaaaaaaaaaaaaaaaaaaaaaaaaaaaaaaaaaaaaaaaaaaaaaaaaaaaaaaaaaaaaaaaaaaaaaaaaaaaaaaaaa

SEQ ID NO: 31362 - RNA, 1665 nt, Artificial Sequence
  mRNA product Design i-3 (A100) comprising derived and/or modified sequence from LASV(LM776-SLE-2012;Clade IV)__AIT17824__GPCmut6 (opt1)
aggagaaagcuuaccaugggccagaucgugaccuucuuccaggaggucccccacgugaucgaggaggugaugaacaucguccugaucgcccucagcauccuggccgugcugaaggggcucuacaacuucgcgaccugcggccugguggggcuggucacguuccuccugcugugcggccgcuccugcaccaccagcguguacaaggggguguacgagcuccagacccuggagcugaacauggagacgcucaacaugugcaugccgcuguccugcaccaagaacaacagccaccacuacaucauggucggcaacgagaccggccuggagcucacccugacgaacaccuccaucaucaaccacaaguucugcaaccugagcgacgcccacaagaagaaccucuacgaccacgcccugauguccaucaucagcaccuuccaccuguccauccccaacuucaaccaguacgaggccaugagcugcgacuucaacgggggcaagaucuccgugcaguacaaccucagccacuccuacgccggggacgcggccaaccacugcggcaccguggccaacgggguccugcagacguucaugcggauggccuggggcggcagcuacaucgcgcuggacuccgggcacggcaagugggacugcaucaugaccagcuaccaguaccucaucauccagaacaccaccugggaggaccacugccaguucucccgccccagccccaucggguaccugggccugcucucccagcggacgcgcgacaucuacaucagccggcgccugcugggcaccuucaccuggacccucagcgacuccgaggggaaggacacgccgggcggguacugccugacccgguggaugcugaucgaggccgagcucaagugcuucggcaacaccgccguggccaagugcaacgagaagcacgacgaggaguucugcgacaugcugcgccuguucgacuucugcaagcaggccauccagcggcucaaggcgcccgcccagaugagcauccagcugaucaacaaggccgugaacgcccugaucaacgaccagcucaucaugaagaaccaccuccgcgacaucauggggauccccuacugcaacuacuccaaguacugguaccugaaccacaccacgaccggcaagaccagccugcccaagugcuggcuggucuccaacggcagcuaccugaacgagacccacuucuccgacgacaucgagcagcaggccgacaacaugaucacggagaugcuccagaaggaguacauggagcggcaggggaagaccccgcugggccugguggaccuguucguguucagcaccuccuucuaccucaucagcaucuuccugcaccuggucaagauccccacccaccgccacaucguggggaaguccugccccaagccccaccggcucaaccacaugggcaucugcagcugcgggcuguacaagcagccgggcgugcccguccgcuggaagcggugaggacuaguuauaagacugacuagcccgaugggccucccaacgggcccuccuccccuccuugcaccgagauuaauaaaaaaaaaaaaaaaaaaaaaaaaaaaaaaaaaaaaaaaaaaaaaaaaaaaaaaaaaaaaaaaaaaaaaaaaaaaaaaaaaaaaaaaaaaaaaaaaaaaa

SEQ ID NO: 31363 - RNA, 1665 nt, Artificial Sequence
  mRNA product Design i-3 (A100) comprising derived and/or modified sequence from LASV(Mad39;Clade IV)__ANH09722__GPCmut6 (opt1)
aggagaaagcuuaccaugggccagaucgugaccuucuuccaggaggucccccacgugaucgaggaggugaugaacaucguccugaucgcccucagcauccuggccgugcugaaggggcucuacaacguggcgaccugcggccugaucgggcuggucacguuccuccugcugugcggccgcuccugcaccaccacccucuacaaggggguguacgagcugcaggcccuggagcucaacauggagacgcugaacaugugcaugccgcugagcugcaccaagaacaacucccaccacuacauccgggugggcaacgagaccggccucgagcugacccugacgaacaccagccucaucaaccacaaguucugcaaccuguccgacgcccacaagaagaaccuguacgaccacgcccucaugagcaucaucuccaccuuccaccugagcauccccaacuucaaccaguacgaggccauguccugcgacuucaacgacgggaagaucagcguccaguacaaccugucccacaccuacgcgggcgacacggccaaccacugcgggaccguggccaacggcgugcuccagaccuucaugcgcauggccuggggcgggagcuacaucgcgcuggacuccggccgcgggggcugggacugcaucaugaccagcuaccaguaccugaucauccagaacacgaccugggaggaccacugccaguucucccggcccagccccaucggguaccucggccugcugucccagcggacccgcgacaucuacaucagccggcgccuccugggcaccuucacguggacccuguccgacagcgaggggaaggacaccccgggcggguacugccucacccgguggaugcugaucgaggccgagcugaagugcuucggcaacacggccgucgccaagugcaacgagaagcacgacgaggaguucugcgacaugcuccgccuguucgacuucugcaagcaggccauccagcggcugaaggcgcccgcccagaugagcauccagcucaucaacaaggccgugaacgcccugaucaacgaccagcugaucaugaagaaccaccuccgcgacaucauggggauccccuacugcaacuacuccaaguacugguaccugaaccacaccgugaccggcaagaccagccugcccaagugcuggcucgucuccaacggcagcuaccugaacgagacgcacuucuccgacgacaucgagcagcaggccgacaacaugaucaccgagaugcugcagaaggaguacauggagcggcaggggaagaccccgcugggccucguggaccuguucguguucagcaccuccuucuaccugaucagcaucuuccuccaccuggucaagauccccacgcaccgccacgugguggggaagcccugccccaagccgcaccggcugaaccacaugggcaucugcuccugcggguucuacaagcagcccggcguccccgugcgcuggaagcggugaggacuaguuauaagacugacuagcccgaugggccucccaacgggcccuccuccccuccuugcaccgagauuaauaaaaaaaaaaaaaaaaaaaaaaaaaaaaaaaaaaaaaaaaaaaaaaaaaaaaaaaaaaaaaaaaaaaaaaaaaaaaaaaaaaaaaaaaaaaaaaaaaaaa

SEQ ID NO: 31364 - RNA, 1665 nt, Artificial Sequence
  mRNA product Design i-3 (A100) comprising derived and/or modified sequence from LASV(Z0947-SLE-2011;Clade IV)__AIT17840__GPCmut6 (opt1)
aggagaaagcuuaccaugggccagaucgugaccuucuuccaggaggucccccacgugaucgaggaggugaugaacaucguccugaucgcccucagcauccuggccgugcugaaggggcucuacaacuucgcgaccugcggccugguggggcuggucacguuccuccugcugugcggccgcuccugcaccaucagccucuacaaggggguguacgagcugcagacccuggagcucaacauggagacccugaacaugugcaugccgcuguccugcacgaagaacaacagccaccacuacaucauggugggcaacgagaccggccucgagcugacccugaccaacacguccaucaucaaccacaaguucugcaaccucagcgacgcccacaagaagaaccuguacgaccacgcccugauguccaucaucagcaccuuccaccucuccauccccaacuucaaccaguacgaggccaugagcugcgacuucaacgggggcaagaucuccguccaguacaaccugagccacuccuacgccggggacgcggccaaccacugcggcaccguggccaacggggugcugcagaccuucaugcggauggccuggggcggcagcuacaucgcgcucgacuccgggcgcgaccggugggacugcaucaugacgagcuaccaguaccugaucauccagaacaccaccugggaggaccacugccaguucucccgccccagccccaucggcuaccuggggcuccugucccagcggacccgcgacaucuacaucagccggcgccugcucggcacguucaccuggacccugagcgacuccgagggcaaggacacccccgggggcuacugccugacgcgguggaugcucaucgaggccgagcugaagugcuucgggaacaccgccgucgccaagugcaacgagaagcacgacgaggaguucugcgacaugcugcgccucuucgacuucugcaagcaggccauccagcggcugaaggcgccggcccagaugagcauccagcugaucaacaaggccgugaacgcccucaucaacgaccagcugaucaugaagaaccaccuccgcgacaucaugggcauccccuacugcaacuacuccaaguacugguaccugaaccacaccaccacggggaagaccagccugcccaagugcuggcugguguccaacggcagcuaccucaacgagacccacuucuccgacgacaucgagcagcaggccgacaacaugaucaccgagaugcugcagaaggaguacauggagcggcagggcaagacgccgcuggggcuggucgaccucuucguguucagcaccuccuucuaccugaucagcaucuuccugcaccucgugaagauccccacccaccgccacaucgucggcaagcccugccccaagccgcaccggcugaaccacauggggaucugcuccugcggccuguacaagcagcccggggugcccgugaaguggaagcgcugaggacuaguuauaagacugacuagcccgaugggccucccaacgggcccuccuccccuccuugcaccgagauuaauaaaaaaaaaaaaaaaaaaaaaaaaaaaaaaaaaaaaaaaaaaaaaaaaaaaaaaaaaaaaaaaaaaaaaaaaaaaaaaaaaaaaaaaaaaaaaaaaaaaa

SEQ ID NO: 31365 - RNA, 1665 nt, Artificial Sequence
  mRNA product Design i-3 (A100) comprising derived and/or modified sequence from LASV(Josiah;Clade IV)__NP_694870__GPCmut6 (opt4)
aggagaaagcuuaccaugggccagaucgugaccuucuuccaggaggugccccacgugaucgaggaggugaugaacaucgugcugaucgcccugagcgugcuggccgugcugaagggccuguacaacuucgccaccugcggccuggugggccuggugaccuuccugcugcugugcggcagaagcugcaccaccagccuguacaagggcguguacgagcugcagacccuggagcugaacauggagacccugaacaugugcaugccccugagcugcaccaagaacaacagccaccacuacaucauggugggcaacgagaccggccuggagcugacccugaccaacaccagcaucaucaaccacaaguucugcaaccugagcgacgcccacaagaagaaccuguacgaccacgcccugaugagcaucaucagcaccuuccaccugagcauccccaacuucaaccaguacgaggccaugagcugcgacuucaacggcggcaagaucagcgugcaguacaaccugagccacagcuacgccggcgacgccgccaaccacugcggcaccguggccaacggcgugcugcagaccuucaugagaauggccuggggcggcagcuacaucgcccuggacagcggcagaggcaacugggacugcaucaugaccagcuaccaguaccugaucauccagaacaccaccugggaggaccacugccaguucagcagacccagccccaucggcuaccugggccugcugagccagagaaccagagacaucuacaucagcagaagacugcugggcaccuucaccuggacccugagcgacagcgagggcaaggacacccccggcggcuacugccugaccagauggaugcugaucgaggccgagcugaagugcuucggcaacaccgccguggccaagugcaacgagaagcacgacgaggaguucugcgacaugcugagacuguucgacuucugcaagcaggccauccagagacugaaggcccccgcccagaugagcauccagcugaucaacaaggccgugaacgcccugaucaacgaccagcugaucaugaagaaccaccugagagacaucaugggcauccccuacugcaacuacagcaaguacugguaccugaaccacaccaccaccggcagaaccagccugcccaagugcuggcuggugagcaacggcagcuaccugaacgagacccacuucagcgacgacaucgagcagcaggccgacaacaugaucaccgagaugcugcagaaggaguacauggagagacagggcaagaccccccugggccugguggaccuguucguguucagcaccagcuucuaccugaucagcaucuuccugcaccuggugaagauccccacccacagacacaucgugggcaagagcugccccaagccccacagacugaaccacaugggcaucugcagcugcggccuguacaagcagcccggcgugcccgugaaguggaagagaugaggacuaguuauaagacugacuagcccgaugggccucccaacgggcccuccuccccuccuugcaccgagauuaauaaaaaaaaaaaaaaaaaaaaaaaaaaaaaaaaaaaaaaaaaaaaaaaaaaaaaaaaaaaaaaaaaaaaaaaaaaaaaaaaaaaaaaaaaaaaaaaaaaaa

SEQ ID NO: 31366 - RNA, 1662 nt, Artificial Sequence
  mRNA product Design i-3 (A100) comprising derived and/or modified sequence from LASV(LP;Clade I)__AAF86701__GPCmut6 (opt4)
aggagaaagcuuaccaugggccagaucaucaccuucuuccaggaggugccccacgugaucgaggaggugaugaacaucgugcugaucgcccugagccugcuggccauccugaagggccuguacaacaucgccaccugcggcaucaucggccugguggccuuccuguuccugugcggcaagagcugcagccugacccugaagggcggcuacgagcugcagacccuggagcugaacauggagacccugaacaugugcaugccccugagcugcaccaagaacagcagccaccacuacaucagagugggcaacgagaccggccuggagcugacccugaccaacaccagcaucaucaaccacaaguucugcaaccugagcgacgcccacaagaagaaccuguacgaccacgcccugaugagcaucaucagcaccuuccaccugagcauccccaacuucaaccaguacgaggccaugagcugcgacuucaacggcggcaagaucagcgugcaguacaaccugagccacagcuacgccggcgacgccgccgagcacugcggcaccguggccaacggcgugcugcagaccuucaugagaauggccuggggcggcagauacaucgcccuggacagcggcaagggcaacugggacugcaucaugaccagcuaccaguaccugaucauccagaacaccaccugggaggaccacugccaguucagcagacccagccccaucggcuaccugggccugcugagccagagaaccagagacaucuacaucagcagaagacugcugggcaccuucaccuggacccugagcgacagcgagggcaacgagacccccggcggcuacugccugaccagauggaugcugaucgaggccgagcugaagugcuucggcaacaccgccguggccaagugcaacgagaagcacgacgaggaguucugcgacaugcugagacuguucgacuucugcaagcaggccaucagaagacugaaggcccccgcccagaugagcauccagcugaucaacaaggccgugaacgcccugaucaacgaccagcugaucaugaagaaccaccugagagacaucaugggcauccccuacugcaacuacagcaaguacugguaccugaaccacaccagcagcggcagaaccagccugcccaagugcuggcugaucagcaacggcagcuaccugaacgagacccaguucagcgacgacaucgagcagcaggccgacaacaugaucaccgagaugcugcagaaggaguacaucgagagacagggcaagaccccccugggccugguggacaucuucaucuucagcaccagcuucuaccugaucagcaucuuccugcaccugaucaagauccccacccacagacacaucgugggcaagcccugccccaagccccacagacugaaccacaugggcgugugcagcugcggccuguacaagcaccccggcgugcccaccaaguggaagagaugaggacuaguuauaagacugacuagcccgaugggccucccaacgggcccuccuccccuccuugcaccgagauuaauaaaaaaaaaaaaaaaaaaaaaaaaaaaaaaaaaaaaaaaaaaaaaaaaaaaaaaaaaaaaaaaaaaaaaaaaaaaaaaaaaaaaaaaaaaaaaaaaaaaa

SEQ ID NO: 31367 - RNA, 1662 nt, Artificial Sequence
  mRNA product Design i-3 (A100) comprising derived and/or modified sequence from LASV(803213;Clade II)__AAF86703__GPCmut6 (opt4)
aggagaaagcuuaccaugggccagaucaucaccuucuuccaggaggugccccacgugaucgaggaggugaugaacaucgugcugaucgcccugagccugcuggccauccugaagggcaucuacaacguggccaccugcggccuguucggccugaucagcuuccugcugcugugcggcagaagcugcagcgugaccuacaagggcguguacgagcugcagacccuggagcugaacauggccaaccugaacaugugcaugccccugagcugcaccaagaacaacagccaccacuacaucauggugggcaacgagaccggccuggagcugacccugaccaacaccagcaucaucaaccacaaguucugcaaccugagcgacgcccacaagaagaaccuguacgaccacgcccugaugagcaucaucagcaccuuccaccugagcauccccaacuucaaccaguacgaggccaugagcugcgacuucaacggcggcaagaucagcgugcaguacaaccugagccacagcuucgccguggacgccgccaaccacugcggcaccaucgccaacggcgugcugcagaccuucaugagaauggccuggggcggcagcuacaucgcccuggacagcggcaagggcaacugggacugcaucaugaccagcuaccaguaccugaucauccagaacaccaccugggaggaccacugccaguucagcagacccagccccaucggcuaccugggccugcugagccagagaaccagagacaucuacaucagcagaagacugcugggcaccuucaccuggacccugagcgacagcgagggcaacgaggcccccggcggcuacugccugaccagauggaugcugaucgaggccgagcugaagugcuucggcaacaccgccguggccaagugcaacgagaagcacgacgaggaguucugcgacaugcugagacuguucgacuucugcaagcaggccaucaagagacugaagacccccgcccagaugagcauccagcugaucaacaaggccgugaacgcccugaucaacgaccagcugaucaugaagaaccaccugagagacaucaugggcauccccuacugcaacuacagcagauacugguaccugaaccacaccgugaccggcaagaccagccugcccagaugcuggcuggugagcaacggcagcuaccugaacgagacccacuucagcgacgacaucgagcagcaggccgacaacaugaucaccgagaugcugcagaaggaguacauggacagacagggcaagaccccccugggccugguggaccuguucguguucagcaccagcuucuaccugaucagcaucuuccugcaccuggugaagauccccacccacagacacaucgugggcaagcccugccccaagccccacagacugaaccacaugggcaucugcagcugcggccuguacaagcaccccggcgugcccgugaaguggaagagaugaggacuaguuauaagacugacuagcccgaugggccucccaacgggcccuccuccccuccuugcaccgagauuaauaaaaaaaaaaaaaaaaaaaaaaaaaaaaaaaaaaaaaaaaaaaaaaaaaaaaaaaaaaaaaaaaaaaaaaaaaaaaaaaaaaaaaaaaaaaaaaaaaaaa

SEQ ID NO: 31368 - RNA, 1662 nt, Artificial Sequence
  mRNA product Design i-3 (A100) comprising derived and/or modified sequence from LASV(GA391;Clade III)__CAA36645__GPCmut6 (opt4)
aggagaaagcuuaccaugggccagaucgugaccuucuuccaggaggugccccacgugaucgaggaggugaugaacaucgugcugaucgcccugagcauccuggccauccugaagggccuguacaacguggccaccugcggccugaucggccuggugaccuuccugcugcugagcggcagaagcugcagccugaucuacaagggcaccuacgagcugcagacccuggagcugaacauggagacccugaacaugugcaugccccugagcugcaccaagaacaacagccaccacuacaucagagugggcaacgagaccggccuggagcugacccugaccaacaccagcauccugaaccacaaguucugcaaccugagcgacgcccacaagagaaaccuguacgaccacagccugaugagcaucaucagcaccuuccaccugagcauccccaacuucaaccaguacgaggccaugagcugcgacuucaacggcggcaagaucaccgugcaguacaaccugagccacagcuucgccguggacgccgccggccacugcggcacccuggccaacggcgugcugcagaccuucaugagaauggccuggggcggcagcuacaucgcccuggacagcggcagaggcaacugggacugcaucaugaccagcuaccaguaccugaucauccagaacaccaccugggacgaccacugccaguucagcagacccagccccaucggcuaccugggccugcugagccagagaaccagagacaucuacaucagcagaagacugcugggcaccuucaccuggacccugagcgacagcgagggcaacgagacccccggcggcuacugccugaccagauggaugcugaucgaggccgagcugaagugcuucggcaacaccgccguggccaagugcaacgagaagcacgacgaggaguucugcgacaugcugagacuguucgacuucugcaagcaggccaucagaagacugaagacccccgcccagaugagcauccagcugaucaacaaggccgugaacgcccugaucaacgaccagcugaucaugaagaaccaccugagagacaucaugggcauccccuacugcaacuacagcagauacugguaccugaaccacaccagcaccggcaagaccagccugcccagaugcuggcugaucagcaacggcagcuaccugaacgagaccaaguucagcgacgacaucgagcagcaggccgacaacaugaucaccgagaugcugcagaaggaguacaucgacagacagggcaagaccccccugggccugguggaccuguucguguucagcaccagcuucuaccugaucagcaucuuccugcaccuggugaagauccccacccacagacacaucgugggcaagcccugccccaagccccacagacugaaccacaugggcaucugcagcugcggccuguacaagcagcccggcgugcccgugagauggaagagaugaggacuaguuauaagacugacuagcccgaugggccucccaacgggcccuccuccccuccuugcaccgagauuaauaaaaaaaaaaaaaaaaaaaaaaaaaaaaaaaaaaaaaaaaaaaaaaaaaaaaaaaaaaaaaaaaaaaaaaaaaaaaaaaaaaaaaaaaaaaaaaaaaaaa

SEQ ID NO: 31369 - RNA, 1665 nt, Artificial Sequence
  mRNA product Design i-3 (A100) comprising derived and/or modified sequence from LASV(AV;Clade V)__CCA30314__GPCmut6 (opt4)
aggagaaagcuuaccaugggccagaucgugaccuucuuccaggaggugccccacgugaucgaggaggugaugaacaucgugcugaucgcccugagcauccuggccgugcugaagggccuguacaacaucgccaccugcggccugaucggccugaucaccuuccugcugcugugcggcagaagcugcagcagcaaccuguacaagggcguguacgagcugcagagccuggaccugaacauggagacccugaacaugugcaugccccugagcugcaccaagaacaacagccaccacuacaucagagugggcaacgacaccggccuggagcugacccugaccaacaccagcauccugaaccacaaguucugcaaccugagcgacgcccacaagaaggaccuguacgaccacgcccugaugagcaucaucagcaccuuccaccugagcauccccaacuucaaccaguacgaggccaugagcugcgacuucaacggcggcaagaucagcgugcaguacaaccugagccacagcuacgccaucgacgccgccaaccacugcggcaccguggccaacggcauccugcagaccuucaugagaauggccuggggcggcagcuacaucgcccuggacagcggcagaggcaacugggacugcaucaugaccagcuaccaguaccugaucauccagaacaccaccugggagaaccacugccaguucagcagacccagccccaucggcuaccugggccugcugagccagagaaccagagacaucuacaucagcagaagacugcugggcaccuucaccuggacccugagcgacagcgagggcaacgccacccccggcggcuacugccugaccagauggaugcugaucgaggccgagcugaagugcuucggcaacaccgccguggccaagugcaacgagaagcacgacgaggaguucugcgacaugcugagacuguucgacuucugcaagcaggccaucagcagacugaagagccccgcccagaugagcauccagcugaucaacaaggccgugaacgcccugaucaacgaccagcugaucaugaagaaccaccugagagacaucaugggcauccccuacugcaacuacagcaaguacugguaccugaaccacaccaucaccggcaagaccagccugcccaagugcuggcuggugagcaacggcagcuaccugaacgagacccacuucagcgacgacaucgagcagcaggccgacaacaugaucaccgagaugcugcagaaggaguacauggagagacagggcaagaccccccugggccugguggaccuguucguguucagcaccagcuucuaccugaucagcaucuuccugagacuggugaagauccccacccacagacacaucgugggcaagcccugccccaagccccacagacugaaccacaugggcaucugcagcugcggccuguacaagcagcccggcgugcccgugagauggaagagaugaggacuaguuauaagacugacuagcccgaugggccucccaacgggcccuccuccccuccuugcaccgagauuaauaaaaaaaaaaaaaaaaaaaaaaaaaaaaaaaaaaaaaaaaaaaaaaaaaaaaaaaaaaaaaaaaaaaaaaaaaaaaaaaaaaaaaaaaaaaaaaaaaaaa

SEQ ID NO: 31370 - RNA, 1662 nt, Artificial Sequence
  mRNA product Design i-3 (A100) comprising derived and/or modified sequence from LASV(Togo/2016/7082;Clade VI)__AMR44577__GPCmut6 (opt4)
aggagaaagcuuaccaugggccagaucaucaccuucuuccaggaggugccccacgugaucgaggaggugaugaacaucgugcugaucgcccugagccugcuggccauccugaagggcguguacaacguggccaccugcggcaucaucggccuggugaccuuccuguuccugugcggcagaagcugcagccugaucuacaagggcagcuacgagcugcagacccuggagcugaacauggagacccugaacaugugcaugccccugagcugcaccaagaacagcagccaccacuacaucagagugggcaacgagaccggccuggagcugacccugaccaacaccagcaucaucaaccacaaguucugcaaccugagcgacgcccacaagagaaaccuguacgaccacgcccugaugagcauccugagcaccuuccaccugagcauccccaacuucaaccaguacgaggccaugagcugcgacuucaacggcggcaagaucagcgugcaguacaaccugagccacgccuacgccguggacgccgccgagcacugcggcaccguggccaacggcgugcugcagaccuucaugagaauggccuggggcggcagcuacaucgcccuggacagcggcagaggcaacugggacugcaucaugaccagcuaccaguaccugaucauccagaacaccaccugggaggaccacugccaguucagcagacccagccccaucggcuaccugggccugcugagccagagaaccagagacaucuacaucagcagaagacugcugggcaccuucaccuggacccugagcgacagcgagggcaacgagacccccggcggcuacugccugaccagauggaugcugaucgaggccgagcugaagugcuucggcaacaccgccguggccaagugcaacgagaagcacgacgaggaguucugcgacaugcugagacuguucgacuucugcaagcaggccauccagagacugaagagccccgcccagaugagcauccagcugaucaacaaggccgugaacgcccugaucaacgaccagcugaucaugaagaaccaccugagagacaugaugggcauccccuacugcaacuacagcaaguacugguaccugaaccacaccagcagcggcagaaccagccugcccaagugcuggcuggugagcaacggcagcuaccugaacgagacccacuucagcgacgacaucgagcagcaggccgacaacaugaucaccgagaugcugcagaaggaguacaucgacagacagggcaagaccccccugggccugguggaccuguucguguucagcaccagcuucuaccugaucagcaucuuccugcaccugaucaagauccccacccacagacacaucgugggcaagcccugccccaagccccacagacugaaccacaugggcaucugcagcugcggccuguacaagcagcccggcgugcccaccagauggaagagaugaggacuaguuauaagacugacuagcccgaugggccucccaacgggcccuccuccccuccuugcaccgagauuaauaaaaaaaaaaaaaaaaaaaaaaaaaaaaaaaaaaaaaaaaaaaaaaaaaaaaaaaaaaaaaaaaaaaaaaaaaaaaaaaaaaaaaaaaaaaaaaaaaaaa

SEQ ID NO: 31371 - RNA, 1662 nt, Artificial Sequence
  mRNA product Design i-3 (A100) comprising derived and/or modified sequence from LASV(KAK-428;Clade n.d. (VII))__ANH09740__GPCmut6 (opt4)
aggagaaagcuuaccaugggccagaucgugaccuucuuccaggaggugccccacgugaucgaggaggugaugaacaucgugcugaucgcccugagccugcuggccauccugaagggccuguacaacuucgccaccugcggcgugaucggccugaucaccuuccugcugcugugcggcagaagcugcagcgccaccuacaagggccaguacgagcugcagacccuggagcugaacauggagagccugaacaugugcaugccccugagcugcaccaagaacaacagccaccacuacaucagagccggcaacaacaccggccuggagcugacccugaccaacaccagcaucaucagccacaaguucugcaaccugagcgacgcccacaagaagaaccuguacgaccacacccugaugagcaucaucaccaccuuccaccugagcauccccaacuucaaccaguacgaggccaugagcugcgacuucaacggcggcaagaucagcauccaguacaaccugagccacagcuacgccggcgacgccgcccagcacugcggcaccguggccaacggcgugcugcagaccuucaugagaauggccuggggcggcagcuaccuggcccuggacagcggcagaagaggcugggacugcaucaucagcagcuaccaguaccugaucauccagaacaccaccugggacgaccacugccaguucagcagacccagccccaucggcuaccugggcuucgugagccagaagaccagagacaucuacaucagcagaagacugcugggcaccuucaccuggacccugagcgacagcgagggccacgacaugcccggcggcuacugccugaccagauggaugcugaucgaggccgaccugaagugcuucggcaacaccgccguggccaagugcaacgagaagcacgacgaggaguucugcgacauguggagacuguucgacuucugcaagcaggccauccagagacugaaggcccccgcccagaugaacauccagcugaucaacaaggccgugaacgcccugaucaacgaccagcugaugaugaagaaccaccugagagacaucaugggcauccccuacugcaacuacagcaaguucugguaccugaacaacaccaccaccggcagaaccagccugcccagaugcuggcugaucagcaacggcagcuaccugaacgagacccacuucagcgacgacaucgagcagcaggccgacaacaugaucaccgagaugcugcagaaggaguacauggacagacagggcaagaccccccugggccugguggaccuguucguguucagcaccagcuucuaccugaucaccaucuuccugcaccuggugaagauccccacccacagacacaucgugggcaagcccugccccaagccccacagacugaaccacaugggcaucugcagcugcggccuguacaagcagcccggcgugcccgugagauggaagagaugaggacuaguuauaagacugacuagcccgaugggccucccaacgggcccuccuccccuccuugcaccgagauuaauaaaaaaaaaaaaaaaaaaaaaaaaaaaaaaaaaaaaaaaaaaaaaaaaaaaaaaaaaaaaaaaaaaaaaaaaaaaaaaaaaaaaaaaaaaaaaaaaaaaa

SEQ ID NO: 31372 - RNA, 1662 nt, Artificial Sequence; identical to SEQ ID NO: 31366
  mRNA product Design i-3 (A100) comprising derived and/or modified sequence from LASV(Pinneo-NIG-1969;Clade I)__AIT17836__GPCmut6 (opt4)

SEQ ID NO: 31373 - RNA, 1662 nt, Artificial Sequence
  mRNA product Design i-3 (A100) comprising derived and/or modified sequence from LASV(ISTH0009-NIG-2011;Clade II)__AIT17404__GPCmut6 (opt4)
aggagaaagcuuaccaugggccagaucaucaccuucuuccaggaggugccccacgugaucgaggaggugaugaacaucgugcugaucgcccugagccugcuggccauccugaagggcaucuacaacguggccaccugcggccuguucggccuggugagcuuccugcugcugugcggcagaagcugcagcaccaccuacaagggcguguacgagcugcagacccuggagcuggacauggccagccugaacaugugcaugccccugagcugcaccaagaacaacagccaccacuacaucauggugggcaacgagaccggccuggagcugacccugaccaacaccagcaucaucaaccacaaguucugcaaccugagcgacgcccacaagaagaaccuguacgaccacgcccugaugagcaucaucagcaccuuccaccugagcauccccaacuucaaccaguacgaggccaugagcugcgacuucaacggcggcaagaucagcgugcaguacaaccugagccacgccuacgccguggacgccgccaaccacugcggcaccaucgccaacggcgugcugcagaccuucaugagaauggccuggggcggcagcuacaucgcccuggacagcggcaagggcagcugggacugcaucaugaccagcuaccaguaccugaucauccagaacaccaccugggaggaccacugccaguucagcagacccagccccaucggcuaccugggccugcugagccagagaaccagagacaucuacaucagcagaagacugcugggcaccuucaccuggacccugagcgacagcgagggcaacgagacccccggcggcuacugccugaccagauggaugcugaucgaggccgagcugaagugcuucggcaacaccgccguggccaagugcaacgagaagcacgacgaggaguucugcgacaugcugagacuguucgacuucugcaagcaggccaucagaagacugaagacccccgcccagaugagcauccagcugaucaacaaggccgugaacgcccugaucaacgaccagcugaucaugaagaaccaccugagagacaucaugggcauccccuacugcaacuacagcaaguacugguaccugaaccacaccgugaccggcaagaccagccugcccagaugcuggcuggugagcaacggcagcuaccugaacgagacccacuucagcgacgacaucgagcagcaggccgacaacaugaucaccgagcugcugcagaaggaguacauggacagacagggcaagaccccccugggccugguggaccuguucguguucagcaccagcuucuaccugaucagcaucuuccugcaccugaucaagauccccacccacagacacaucaccggcaagcccugccccaagccccacagacugaaccacaugggcaucugcagcugcggccuguacaagcaccccggcgugcccgugaaguggaagagaugaggacuaguuauaagacugacuagcccgaugggccucccaacgggcccuccuccccuccuugcaccgagauuaauaaaaaaaaaaaaaaaaaaaaaaaaaaaaaaaaaaaaaaaaaaaaaaaaaaaaaaaaaaaaaaaaaaaaaaaaaaaaaaaaaaaaaaaaaaaaaaaaaaaa

SEQ ID NO: 31374 - RNA, 1662 nt, Artificial Sequence
  mRNA product Design i-3 (A100) comprising derived and/or modified sequence from LASV(ISTH2010-NIG-2012;Clade II)__AIT17482__GPCmut6 (opt4)
aggagaaagcuuaccaugggccagaucaucaccuucuuccaggaggugccccacgugaucgaggaggugaugaacaucgugcugaucgcccugagccugcuggccauccugaagggcaucuacaacguggccaccugcggccuguucggccuggugagcuuccugcugcugugcggcagaagcugcagcaccaccuacaagggcguguacgagcugcagacccuggagcuggacauggccagccugaacaugugcaugccccugagcugcaccaagaacaacagccaccacuacaucauggugggcaacgagaccggccuggagcugacccugaccaacaccagcaucaucaaccacaaguucugcaaccugagcgacgcccacaagaagaaccuguacgaccacgcccugaugagcaucaucagcaccuuccaccugagcauccccaacuucaaccaguacgaggccaugagcugcgacuucaacggcggcaagaucagcgugcaguacaaccugagccacgccuacgccguggacgccgccaaccacugcggcaccaucgccaacggcgugcugcagaccuucaugagaauggccuggggcggcagcuacaucgcccuggacagcggcaagggcagcugggacugcaucaugaccagcuaccaguaccugaucauccagaacaucaccugggaggaccacugccaguucagcagacccagccccaucggcuaccugggccugcugagccagagaaccagagacaucuacaucagcagaagacugcugggcaccuucaccuggacccugagcgacagcgagggcaacgagacccccggcggcuacugccugaccagauggaugcugaucgaggccgagcugaagugcuucggcaacaccgccguggccaagugcaacgagaagcacgacgaggaguucugcgacaugcugagacuguucgacuucugcaagcaggccaucagaagacugaagacccccgcccagaugagcauccagcugaucaacaaggccgugaacgcccugaucaacgaccagcugaucaugaagaaccaccugagagacaucaugggcauccccuacugcaacuacagcaaguacugguaccugaaccacaccgugaccggcaagaccagccugcccagaugcuggcuggugagcaacggcagcuaccugaacgagacccacuucagcgacgacaucgagcagcaggccgacaacaugaucaccgagcugcugcagaaggaguacaucgacagacagggcaagaccccccugggccugguggaccuguucguguucagcaccagcuucuaccugaucagcaucuuccugcaccuggugaagauccccacccacagacacguggugggcaagcccugccccaagccccacagacugaaccacaugggcaucugcagcugcggccuguacaagcaccccggcgugcccgugaaguggaagagaugaggacuaguuauaagacugacuagcccgaugggccucccaacgggcccuccuccccuccuugcaccgagauuaauaaaaaaaaaaaaaaaaaaaaaaaaaaaaaaaaaaaaaaaaaaaaaaaaaaaaaaaaaaaaaaaaaaaaaaaaaaaaaaaaaaaaaaaaaaaaaaaaaaaa

SEQ ID NO: 31375 - RNA, 1662 nt, Artificial Sequence
  mRNA product Design i-3 (A100) comprising derived and/or modified sequence from LASV(Lassa virus/H.sapiens-wt/NGA/2015/ISTH_0543;Clade II)__AVO03639__GPCmut6 (opt4)
aggagaaagcuuaccaugggccagaucaucaccuucuuccaggaggugccccacgugaucgaggaggugaugaacaucgugcugaucgcccugagccugcuggccauccugaagggcaucuacaacguggccaccugcggccuguucggccuggugagcuuccugcugcugugcggcagaagcugcagcaccaccuacaagggcguguacgagcugcagacccuggagcuggacauggccaaccugaacaugugcaugccccugagcugcaccaagaacaacagccaccacuacaucauggugggcaacgagaccggccuggagcugacccugaccaacaccagcaucaucaaccacaaguucugcaaccugagcgacgcccacaagaagaaccuguacgaccacgcccugaugagcaucaucagcaccuuccaccugagcauccccaacuucaaccaguacgaggccaugagcugcgacuucaacggcggcaagaucagcgugcaguacaaccugagccacaccuacgccguggacgccgccaaccacugcggcaccaucgccaacggcgugcugcagaccuucaugagaauggccuggggcggcagcuacaucgcccuggacagcggcaagggcagcugggacugcaucaugaccagcuaccaguaccuggugauccagaacaccaccugggaggaccacugccaguucagcagacccagccccaucggcuaccugggccugcugagccagagaaccagagacaucuacaucagcagaagacugcugggcaccuucaccuggacccugagcgacagcgagggcaacgagacccccggcggcuacugccugaccagauggaugcugaucgaggccgagcugaagugcuucggcaacaccgccguggccaagugcaacgagaagcacgacgaggaguucugcgacaugcugagacuguucgacuucugcaagcaggccaucagaagacugaagacccccgcccagaugagcauccagcugaucaacaaggccgugaacgcccugaucaacgaccagcugaucaugaagaaccaccugagagacaucaugggcauccccuacugcaacuacagcaaguacugguaccugaaccacaccgugaccggcaagaccagccugcccagaugcuggcuggugagcaacggcagcuaccugaacgagacccacuucagcgacgacaucgagcagcaggccgacaacaugaucaccgagcugcugcagaaggaguacaucgacagacagggcaagaccccccugggccugguggaccuguucguguucagcaccagcuucuaccugaucagcaucuuccugcaccuggugaagauccccacccacagacacaucaccggcaagcccugccccaagccccacagacugaaccacaugggcaucugcagcugcggccuguacaagcaccccggcgugcccgugaaguggaagagaugaggacuaguuauaagacugacuagcccgaugggccucccaacgggcccuccuccccuccuugcaccgagauuaauaaaaaaaaaaaaaaaaaaaaaaaaaaaaaaaaaaaaaaaaaaaaaaaaaaaaaaaaaaaaaaaaaaaaaaaaaaaaaaaaaaaaaaaaaaaaaaaaaaaa

SEQ ID NO: 31376 - RNA, 1662 nt, Artificial Sequence
  mRNA product Design i-3 (A100) comprising derived and/or modified sequence from LASV(Lassa virus/H.sapiens-wt/NGA/2016/ISTH_0009;Clade II)__AVO03571__GPCmut6 (opt4)
aggagaaagcuuaccaugggccagaucaucaccuucuuccaggaggugccccacgugaucgaggaggugaugaacaucgugcugaucgcccugagccugcuggccauccugaagggcaucuacaacguggccaccugcggccugcugggccuggugagcuuccugcugcugugcggcagaagcugcagcaccaccuacaagggcguguacgagcugcagacccuggagcuggacauggccagccugaacaugugcaugccccugagcugcaccaagaacaacagccaccacuacaucauggugggcaacgagaccggccuggagcugacccugaccaacaccagcaucaucaaccacaaguucugcaaccugagcgacgcccacaagaagaaccuguacgaccacgcccugaugagcaucaucagcaccuuccaccugagcauccccaacuucaaccaguacgaggccaugagcugcgacuucaacggcggcagaaucagcgugcaguacaaccugagccacagcuacgccguggacgccgccaaccacugcggcaccaucgccaacggcgugcugcagaccuucaugagaauggccuggggcggcagcuacaucgcccuggacagcggcaagggcagcugggacugcaucaugaccagcuaccaguaccugaucauccagaacaccaccugggaggaccacugccaguucagcagacccagccccaucggcuaccugggccugcugagccagagaaccagagacaucuacaucagcagaagacugcugggcaccuucaccuggacccugagcgacagcgagggcaacgagacccccggcggcuacugccugaccagauggaugcugaucgaggccgagcugaagugcuucggcaacaccgccguggccaagugcaacgagaagcacgacgaggaguucugcgacaugcugagacuguucgacuucugcaagcaggccaucagaagacugaagacccccgcccagaugagcauccagcugaucaacaaggccgugaacgcccugaucaacgaccagcugaucaugaagaaccaccugagagacaucaugggcauccccuacugcaacuacagcaaguacugguaccugaaccacaccgugaccggcaagaccagccugcccagaugcuggcuggugagcaacggcagcuaccugaacgagacccacuucagcgacgacaucgagcagcaggccgacaacaugaucaccgagcugcugcagaaggaguacaucgacagacagggcaagaccccccugggccugguggaccuguucguguucagcaccagcuucuaccugaucagcaucuuccugcaccuggugaagauccccacccacagacacaucaccggcaagcccugccccaagccccacagacugaaccacaugggcaucugcagcugcggccuguacaaccaccccggcgugcccgugaaguggaagagaugaggacuaguuauaagacugacuagcccgaugggccucccaacgggcccuccuccccuccuugcaccgagauuaauaaaaaaaaaaaaaaaaaaaaaaaaaaaaaaaaaaaaaaaaaaaaaaaaaaaaaaaaaaaaaaaaaaaaaaaaaaaaaaaaaaaaaaaaaaaaaaaaaaaa

SEQ ID NO: 31377 - RNA, 1662 nt, Artificial Sequence
  mRNA product Design i-3 (A100) comprising derived and/or modified sequence from LASV(Lassa virus/H.sapiens-wt/NGA/2016/ISTH_0017;Clade II)__AVO03567__GPCmut6 (opt4)
aggagaaagcuuaccaugggccagaucaucaccuucuuccaggaggugccccacgugaucgaggaggugaugaacaucgugcugaucgcccugagccugcuggccauccugaagggcaucuacaacguggccaccugcggccuguucggccuggugagcuuccugcugcugugcggcagaagcugcagcaccaccuacaagggcguguacgagcugcagacccuggagcuggacauggccagccugaacaugugcaugccccugagcugcaccaagaacaacagccaccacuacaucauggugggcaacgagaccggccuggagcugacccugaccaacaccagcaucaucaaccacaaguucugcaaccugagcgacgcccacaagaagaaccuguacgaccacgcccugaugagcaucaucagcaccuuccaccugagcauccccaacuucaaccaguacgaggccaugagcugcgacuucaacggcggcaagaucagcgugcaguacaaccugagccacaccuacgccaucgacgccgccaaccacugcggcaccaucgccaacggcgugcugcagaccuucaugagaauggccuggggcggcagcuacaucgcccuggacagcggcaagggcagcugggacugcaucaugaccagcuaccaguaccugaucauccagaacaccaccugggaggaccacugccaguucagcagacccagccccaucggcuaccugggccugcugagccagagaaccagagacaucuacaucagcagaagacugcugggcaccuucaccuggacccugagcgacagcgagggcaacgagacccccggcggcuacugccugaccagauggaugcugaucgaggccgagcugaagugcuucggcaacaccgccguggccaagugcaacgagaagcacgacgaggaguucugcgacaugcugagacuguucgacuucugcaagcaggccaucagaagacugaagacccccgcccagaugagcauccagcugaucaacaaggccgugaacgcccugaucaacgaccagcugaucaugaagaaccaccugagagacaucaugggcauccccuacugcaacuacagcaaguacugguaccugaaccacaccgugaccggcaagaccagccugcccagaugcuggcuggugagcaacggcagcuaccugaacgagacccacuucagcgacgacaucgagcagcaggccgacaacaugaucaccgagcugcugcagaaggaguacauggacagacagggcaagaccccccugggccugguggaccuguucguguucagcaccagcuucuaccugaucagcaucuuccugcaccuggugagaauccccacccacagacacgugaucggcaagcccugccccaagccccacagacugaaccacaugggcaucugcagcugcggccuguacaagcaccccggcgugcccgugaaguggaagagaugaggacuaguuauaagacugacuagcccgaugggccucccaacgggcccuccuccccuccuugcaccgagauuaauaaaaaaaaaaaaaaaaaaaaaaaaaaaaaaaaaaaaaaaaaaaaaaaaaaaaaaaaaaaaaaaaaaaaaaaaaaaaaaaaaaaaaaaaaaaaaaaaaaaa

SEQ ID NO: 31378 - RNA, 1662 nt, Artificial Sequence
  mRNA product Design i-3 (A100) comprising derived and/or modified sequence from LASV(Lassa virus/H.sapiens-wt/NGA/2018/ISTH_0959;Clade II)__AVV65099__GPCmut6 (opt4)
aggagaaagcuuaccaugggccagaucaucaccuucuuccaggaggugccccacgugaucgaggaggugaugaacaucgugcugaucgcccugagccugcuggccauccugaagggcaucuacaacguggugaccugcggccuguucggccuggugagcuuccugcugcugugcggcagaagcugcagcaccaccuacaagggcguguacgagcugcagacccuggagcuggacauggccagccugaacaugugcaugccccugagcugcaccaagaacaacagccaccacuacaucauggugggcaacgagaccggccuggagcugacccugaccaacaccagcaucaucaaccacaaguucugcaaccugagcgacgcccacaagaagaaccuguacgaccacgcccugaugagcaucaucagcaccuuccaccugagcauccccaacuucaaccaguacgaggccaugagcugcgacuucaacggcggcaagaucagcgugcaguacaaccugagccacgccuacgccaucgacgccgccaaccacugcggcaccaucgccaacggcgugcugcagaccuucaugagaauggccuggggcggcagcuacaucgcccuggacagcggcaagggcagcugggacugcaucaugaccagcuaccaguaccugaucauccagaacaccaccugggaggaccacugccaguucagcagacccagccccaucggcuaccugggccugcugagccagagaaccagagacaucuacaucagcagaagacugcugggcaccuucaccuggacccugagcgacagcgagggcaacgagacccccggcggcuacugccugaccagauggaugcugaucgaggccgagcugaagugcuucggcaacaccgccguggccaagugcaacgagaagcacgacgaggaguucugcgacaugcugagacuguucgacuucugcaagcaggccaucagaagacugaagacccccgcccagaugagcauccagcugaucaacaaggccgugaacgcccugaucaacgaccagcugaucaugaagaaccaccugagagacaucaugggcauccccuacugcaacuacagcaaguacugguaccugaaccacaccgugaccggcaagaccagccugcccagaugcuggcuggugagcaacggcagcuaccugaacgagacccacuucagcgacgacaucgagcagcaggccgacaacaugaucaccgagcugcugcagaaggaguacaucgacagacagggcaagaccccccugggccugguggaccuguucguguucagcaccagcuucuaccugaucagcaucuuccugcaccuggugaagauccccacccacagacacgugaucggcaagcccugccccaagccccacagacugaaccacaugggcaucugcagcugcggccuguacaagcaccccggcgugcccgugaaguggaagagaugaggacuaguuauaagacugacuagcccgaugggccucccaacgggcccuccuccccuccuugcaccgagauuaauaaaaaaaaaaaaaaaaaaaaaaaaaaaaaaaaaaaaaaaaaaaaaaaaaaaaaaaaaaaaaaaaaaaaaaaaaaaaaaaaaaaaaaaaaaaaaaaaaaaa

SEQ ID NO: 31379 - RNA, 1662 nt, Artificial Sequence
  mRNA product Design i-3 (A100) comprising derived and/or modified sequence from LASV(LASV003-NIG-2008;Clade II)__AIT17580__GPCmut6 (opt4)
aggagaaagcuuaccaugggccagaucaucaccuucuuccaggaggugccccacgugaucgaggaggugaugaacaucgugcugaucgcccugagccugcuggccauccugaagggcaucuacaacguggccaccugcggccuguucggccuggugagcuuccugcugcugugcggcagaagcugcagcaccaccuacaagggcguguacgagcugcagacccuggagcuggacauggccagccugaacaugugcaugccccugagcugcaccaagaacaacagccaccacuacaucauggugggcaacgagaccggccuggagcugacccugaccaacaccagcaucaucaaccacaaguucugcaaccugagcgacgcccacaagaagaaccuguacgaccacgcccugaugagcaucaucagcaccuuccaccugagcauccccaacuucaaccaguacgaggccaugagcugcgacuucaacggcggcaagaucagcgugcaguacaaccugagccacaccuacgccguggacgccgccaaccacugcggcaccaucgccaacggcgugcugcagaccuucaugagaauggccuggggcggcagcuacaucgcccuggacagcggcaagggcagcugggacugcaucaugaccagcuaccaguaccugaucauccagaacaccaccugggaggaccacugccaguucagcagacccagccccaucggcuaccugggccugcugagccagagaaccagagacaucuacaucagcagaagacugcugggcaccuucaccuggacccugagcgacagcgagagcaacgagacccccggcggcuacugccugaccagauggaugcugaucgaggccgagcugaagugcuucggcaacaccgccguggccaagugcaacgagaagcacgacgaggaguucugcgacaugcugagacuguucgacuucugcaagcaggccaucagaagacugaaggcccccgcccagaugagcauccagcugaucaacaaggccgugaacgcccugaucaacgaccagcugaucaugaagaaccaccugagagacaucaugggcauccccuacugcaacuacagcaaguacugguaccugaaccacaccgugaccggcagaaccagccugcccagaugcuggcuggugagcaacggcagcuaccugaacgagacccacuucagcgacgacaucgagcagcaggccgacaacaugaucaccgagcugcugcagaaggaguacauggacagacagggcaagaccccccugggccugguggaccuguucguguucagcaccagcuucuaccugaucagcaucuuccugcaccuggugaagauccccacccacagacacgugaucggcaagcccugccccaagccccacagacugaaccacaugggcaucugcagcugcggccuguacaagcaccccggcgugcccgugaaguggaagagaugaggacuaguuauaagacugacuagcccgaugggccucccaacgggcccuccuccccuccuugcaccgagauuaauaaaaaaaaaaaaaaaaaaaaaaaaaaaaaaaaaaaaaaaaaaaaaaaaaaaaaaaaaaaaaaaaaaaaaaaaaaaaaaaaaaaaaaaaaaaaaaaaaaaa

SEQ ID NO: 31380 - RNA, 1662 nt, Artificial Sequence
  mRNA product Design i-3 (A100) comprising derived and/or modified sequence from LASV(LASV035-NIG-2009;Clade II)__AIT17588__GPCmut6 (opt4)
aggagaaagcuuaccaugggccagaucaucaccuucuuccaggaggugccccacgugaucgaggaggugaugaacaucgugcugaucgcccugagccugcuggccauccugaagggcaucuacaacguggccaccugcggccuguucggccuggugagcuuccugcugcugugcggcagaagcugcagcaccaccuacaagggcguguacgagcugcagacccuggagcuggacauggccagccugaacaugugcaugccccugagcugcaccaagaacaacagccaccacuacaucauggugggcaacgagaccggccuggagcugacccugaccaacaccagcaucaucaaccacaaguucugcaaccugagcgacgcccacaagaagaaccuguacgaccacgcccugaugagcaucaucagcaccuuccaccugagcauccccaacuucaaccaguacgaggccaugagcugcgacuucaacggcggcaagaucagcgugcaguacaaccugagccacgccuacgccguggacgccgccaaccacugcggcaccaucgccaacggcgugcugcagaccuucaugagaauggccuggggcggcagcuacaucgcccuggacagcggcaagggcagcugggacugcaucaugaccagcuaccaguaccugaucauccagaacaccaccugggaggaccacugccaguucagcagacccagccccaucggcuaccugggccugcugagccagagaaccagagacaucuacaucagcagaagacugcugggcaccuucaccuggacccugagcgacagcgagggcaacgagacccccggcggcuacugccugaccagauggaugcugaucgaggccgagcugaagugcuucggcaacaccgccguggccaagugcaacgagaagcacgacgaggaguucugcgacaugcugagacuguucgacuucugcaagcaggccaucagaagacugaaggcccccgcccagaugagcauccagcugaucaacaaggccgugaacgcccugaucaacgaccagcugaucaugaagaaccaccugagagacaucaugggcauccccuacugcaacuacagcaaguacugguaccugaaccacaccgugaccggcaagaccagccugcccagaugcuggcuggugagcaacggcagcuaccugaacgagacccacuucagcgacgacaucgagcagcaggccgacaacaugaucaccgagcugcugcagaaggaguacaucgacagacagggcaagaccccccugggccugguggaccuguucguguucagcaccagcuucuaccugaucagcaucuuccugcaccuggugaagauccccacccacagacacgugaucggcaagcccugccccaagccccacagacugaaccacaugggcaucugcagcugcggccuguacaagcaccccggcgugcccgugaaguggaagagaugaggacuaguuauaagacugacuagcccgaugggccucccaacgggcccuccuccccuccuugcaccgagauuaauaaaaaaaaaaaaaaaaaaaaaaaaaaaaaaaaaaaaaaaaaaaaaaaaaaaaaaaaaaaaaaaaaaaaaaaaaaaaaaaaaaaaaaaaaaaaaaaaaaaa

SEQ ID NO: 31381 - RNA, 1662 nt, Artificial Sequence
  mRNA product Design i-3 (A100) comprising derived and/or modified sequence from LASV(LASV1000-NIG-2009;Clade II)__AIT17782__GPCmut6 (opt4)
aggagaaagcuuaccaugggccagaucaucaccuucuuccaggaggugccccacgugaucgaggaggugaugaacaucgugcugaucgcccugagccugcuggccauccugaagggcaucuacaacguggccaccugcggccuguucggccuggugagcuuccugcugcugugcggcagaagcugcagcaccaccuacaagggcguguacgagcugcagacccuggagcuggacauggccagccugaacaugugcaugccccugagcugcaccaagaacaacagccaccacuacaucauggugggcaacgagaccggccuggagcugacccugaccaacaccagcaucaucaaccacaaguucugcaaccugagcgacgcccacaagaagaaccuguacgaccacgcccugaugagcaucaucagcaccuuccaccugagcauccccaacuucaaccaguacgaggccaugagcugcgacuucaacggcggcaagaucagcgugcaguacaaccugagccacaccuacgccguggacgccgccaaccacugcggcaccaucgccaacggcgugcugcagaccuucaugagaauggccuggggcggcagcuacaucgcccuggacagcggcaagggcagcugggacugcaucaugaccagcuaccaguaccugaucauccagaacaccaccugggaggaccacugccaguucagcagacccagccccaucggcuaccugggccugcugagccagagaaccagagacaucuacaucagcagaagacugcugggcaccuucaccuggacccugagcgacagcgagggcaacgagacccccggcggcuacugccugaccagauggaugcugaucgaggccgagcugaagugcuucggcaacaccgccguggccaagugcaacgagaagcacgacgaggaguucugcgacaugcugagacuguucgacuucugcaagcaggccaucaagagacugaagacccccgcccagaugagcauccagcugaucaacaaggccgugaacgcccugaucaacgaccagcugaucaugaagaaccaccugagagacaucaugggcauccccuacugcaacuacagcaaguacugguaccugaaccacaccgugaccggcaagaccagccugcccagaugcuggcuggugagcaacggcagcuaccugaacgagacccacuucagcgacgacaucgagcagcaggccgacaacaugaucaccgagcugcugcagaaggaguacaucgacagacagggcaagaccccccugggccugguggaccuguucguguucagcaccagcuucuaccugaucagcaucuuccugcaccuggugaagauccccacccacagacacguggugggcaagcccugccccaagccccacagacugaaccacaugggcaucugcagcugcggccuguacaagcaccccggcgugcccgugaaguggaagagaugaggacuaguuauaagacugacuagcccgaugggccucccaacgggcccuccuccccuccuugcaccgagauuaauaaaaaaaaaaaaaaaaaaaaaaaaaaaaaaaaaaaaaaaaaaaaaaaaaaaaaaaaaaaaaaaaaaaaaaaaaaaaaaaaaaaaaaaaaaaaaaaaaaaa

SEQ ID NO: 31382 - RNA, 1662 nt, Artificial Sequence
  mRNA product Design i-3 (A100) comprising derived and/or modified sequence from LASV(LASV221-NIG-2010;Clade II)__AIT17624__GPCmut6 (opt4)
aggagaaagcuuaccaugggccagaucaucaccuucuuccaggaggugccccacgugaucgaggaggugaugaacaucgugcugaucgcccugagccugcuggccauccugaagggcaucuacaacguggccaccugcggccuguucggccuggugagcuuccugcugcugugcggcagaagcugcagcaccaccuacaagggcguguacgagcugcagacccuggagcuggacauggccagccugaacaugugcaugccccugagcugcaccaagaacaacagccaccacuacaucauggugggcaacgagaccggccuggagcugacccugaccaacaccagcaucaucaaccacaaguucugcaaccugagcgacgcccacaagaagaaccuguacgaccacgcccugaugagcaucaucagcaccuuccaccugagcauccccaacuucaaccaguacgaggccaugagcugcgacuucaacggcggcaagaucagcgugcaguacaaccugagccacaccuacgccaucgacgccgccaaccacugcggcaccaucgccaacggcgugcugcagaccuucaugagaauggccuggggcggcagcuacaucgcccuggacagcggcaagggcagcugggacugcaucaugaccagcuaccaguaccugaucauccagaacaccaccugggaggaccacugccaguucagcagacccagccccaucggcuaccugggccugcugagccagagaaccagagacaucuacaucagcagaagacugcugggcaccuucaccuggacccugagcgacagcgagggcaacgagacccccggcggcuacugccugaccagauggaugcugaucgaggccgagcugaagugcuucggcaacaccgccguggccaagugcaacgagaagcacgacgaggaguucugcgacaugcugagacuguucgacuucugcaagcaggccaucagaagacugaagacccccgcccagaugagcauccagcugaucaacaaggccgugaacgcccugaucaacgaccagcugaucaugaagaaccaccugagagacaucaugggcauccccuacugcaacuacagcaaguacugguaccugaaccacaccgugaccggcaagaccagccugcccagaugcuggcuggugagcaacggcagcuaccugaacgagacccacuucagcgacgacaucgagcagcaggccgacaacaugaucaccgagaugcugcagaaggaguacauggacagacagggcaagaccccccugggccugguggaccuguucguguucagcaccagcuucuaccugaucagcaucuuccugcaccuggugaagauccccacccacagacacgugaucggcaagcccugccccaagccccacagacugaaccacaugggcaucugcagcugcggccuguacaagcaccccggcgugcccgugaaguggaagagaugaggacuaguuauaagacugacuagcccgaugggccucccaacgggcccuccuccccuccuugcaccgagauuaauaaaaaaaaaaaaaaaaaaaaaaaaaaaaaaaaaaaaaaaaaaaaaaaaaaaaaaaaaaaaaaaaaaaaaaaaaaaaaaaaaaaaaaaaaaaaaaaaaaaa

SEQ ID NO: 31383 - RNA, 1662 nt, Artificial Sequence
  mRNA product Design i-3 (A100) comprising derived and/or modified sequence from LASV(LASV237-NIG-2010;Clade II)__AIT17638__GPCmut6 (opt4)
aggagaaagcuuaccaugggccagaucaucaccuucuuccaggaggugccccacgugaucgaggaggugaugaacaucgugcugaucgcccugagccugcuggccauccugaagggcaucuacaacguggccaccugcggccuguucggccuggugagcuuccugcugcugugcggcagaagcugcagcaccaccuacaagggcguguacgagcugcagacccuggagcuggacauggccagccugaacaugugcaugccccugagcugcaccaagaacaacagccaccacuacaucauggugggcaacgagaccggccuggagcugacccugaccaacaccagcaucaucaaccacaaguucugcaaccugagcgacgcccacaagaaggaccuguacgaccacgcccugaugagcaucaucagcaccuuccaccugagcauccccaacuucaaccaguacgaggccaugagcugcgacuucaacggcggcaagaucagcgugcaguacaaccugagccacaccuacgccguggacgccgccaaccacugcggcaccaucgccaacggcgugcugcagaccuucaugagaauggccuggggcggcagcuacaucgcccuggacagcggcaagggcagcugggacugcaucaugaccagcuaccaguaccugaucauccagaacaccaccugggaggaccacugccaguucagcagacccagccccaucggcuaccugggccugcugagccagagaaccagagacaucuacaucagcagaagacugcugggcaccuucaccuggacccugagcgacagcgagggcaacgagacccccggcggcuacugccugaccagauggaugcugaucgaggccgagcugaagugcuucggcaacaccgccguggccaagugcaacgagaagcacgacgaggaguucugcgacaugcugagacuguucgacuucugcaagcaggccaucagaagacugaagacccccgcccagaugagcauccagcugaucaacaaggccgugaacgcccugaucaacgaccagcugaucaugaagaaccaccugagagacaucaugggcauccccuacugcaacuacagcaaguacugguaccugaaccacaccgugaccggcaagaccagccugcccagaugcuggcuggugagcaacggcagcuaccugaacgagacccacuucagcgacgacaucgagcagcaggccgacaacaugaucaccgagcugcugcagaaggaguacauggacagacagggcaagaccccccugggccugguggaccuguucguguucagcaccagcuucuaccugaucagcaucuuccugcaccugaucaagauccccacccacagacacaucaccggcaagcccugccccaagccccacagacugaaccacaugggcaucugcagcugcggccuguacaagcaccccggcgugcccgugaaguggaagagaugaggacuaguuauaagacugacuagcccgaugggccucccaacgggcccuccuccccuccuugcaccgagauuaauaaaaaaaaaaaaaaaaaaaaaaaaaaaaaaaaaaaaaaaaaaaaaaaaaaaaaaaaaaaaaaaaaaaaaaaaaaaaaaaaaaaaaaaaaaaaaaaaaaaa

SEQ ID NO: 31384 - RNA, 1662 nt, Artificial Sequence
  mRNA product Design i-3 (A100) comprising derived and/or modified sequence from LASV(LASV253-NIG-2011;Clade II)__AIT17670__GPCmut6 (opt4)
aggagaaagcuuaccaugggccagaucaucaccuucuuccaggaggugccccacgugaucgaggaggugaugaacaucgugcugaucgcccugagccugcuggccauccugaagggcaucuacaacguggccaccugcggccuguucggccuggugagcuuccugcugcugugcggcagaagcugcagcaccaccuacaagggcguguacgagcugcagacccuggagcuggacauggccagccugaacaugugcaugccccugagcugcaccaagaacaacagccaccacuacaucauggugggcaacgagaccggccuggagcugacccugaccaacaccagcaucaucaaccacaaguucugcaaccugagcgacgcccacaagaagaaccuguacgaccacgcccugaugagcaucaucagcaccuuccaccugagcauccccaacuucaaccaguacgaggccaugagcugcgacuucaacggcggcaagaucagcgugcaguacaaccugagccacaccuacgccguggacgccgccaaccacugcggcaccaucgccaacggcgugcugcagaccuucaugagaauggccuggggcggcagcuacaucgcccuggacagcggcaagggcagcugggacugcaucaugaccagcuaccaguaccugaucauccagaacaccaccugggaggaccacugccaguucagcagacccagccccaucggcuaccugggccugcugagccagagaaccagagacaucuacaucagcagaagacugcugggcaccuucaccuggacccugagcgacagcgagggcaacgagacccccggcggcuacugccugaccagauggaugcugaucgaggccgagcugaagugcuucggcaacaccgccguggccaagugcaacgagaagcacgacgaggaguucugcgacaugcugagacuguucgacuucugcaagcaggccaucagaagacugaaggcccccgcccagaugagcauccagcugaucaacaaggccgugaacgcccugaucaacgaccagcugaucaugaagaaccaccugagagacaucaugggcauccccuacugcaacuacagcaaguacugguaccugaaccacaccgugaccggcagaaccagccugcccagaugcuggcuggugagcaacggcagcuaccugaacgagacccacuucagcgacgacaucgagcagcaggccgacaacaugaucaccgagcugcugcagaaggaguacaucgacagacagggcaagaccccccugggccugguggaccuguucguguucagcaccagcuucuaccugaucagcaucuuccugcaccuggugaagauccccacccacagacacaucaucggcaagcccugccccaagccccacagacugaaccacaugggcaucugcagcugcggccuguacaagcaccccggcgugcccgugaaguggaagagaugaggacuaguuauaagacugacuagcccgaugggccucccaacgggcccuccuccccuccuugcaccgagauuaauaaaaaaaaaaaaaaaaaaaaaaaaaaaaaaaaaaaaaaaaaaaaaaaaaaaaaaaaaaaaaaaaaaaaaaaaaaaaaaaaaaaaaaaaaaaaaaaaaaaa

SEQ ID NO: 31385 - RNA, 1662 nt, Artificial Sequence
  mRNA product Design i-3 (A100) comprising derived and/or modified sequence from LASV(LASV254-NIG-2011;Clade II)__AIT17674__GPCmut6 (opt4)
aggagaaagcuuaccaugggccagaucaucaccuucuuccaggaggugccccacgugaucgaggaggugaugaacaucgugcugaucgcccugagccugcuggccauccugaagggcaucuacaacguggccaccugcggccuguucggccuggugagcuuccugcugcugugcggcagaagcugcagcaccaccuacaagggcguguacgagcugcagacccuggagcuggacaugaccaaccugaacaugugcaugccccugagcugcaccaagaacaacagccaccacuacaucauggugggcaacgagaccggccuggagcugacccugaccaacaccagcaucaucaaccacaaguucugcaaccugagcgacgcccacaagaagaaccuguacaaccacgcccugaugagcaucaucagcaccuuccaccugagcauccccaacuucaaccaguacgaggccaugagcugcgacuucaacggcggcaagaucagcgugcaguacaaccugagccacagcuacgccguggacgccgccaaccacugcggcaccaucgccaacggcgugcugcagaccuucaugagaauggccuggggcggcagcuacaucgcccuggacagcggcaagggcaacugggacugcaucaugaccagcuaccaguaccugaucauccagaacaccaccugggaggaccacugccaguucagcagacccagccccaucggcuaccugggccugcugagccagagaaccagagacaucuacaucagcagaagacugcugggcaccuucaccuggacccugagcgacagcgagggcaacgagacccccggcggcuacugccugaccagauggaugcugaucgaggccgagcugaagugcuucggcaacaccgccguggccaagugcaacgagaagcacgacgaggaguucugcgacaugcugagacuguucgacuucugcaagcaggccaucagaagacugaagacccccgcccaggccaacauccagcugaucaacaaggccgugaacgcccugaucaacgaccagcugaucaugaagaaccaccugagagacaucaugggcauccccuacugcaacuacagcaaguacugguaccugaaccacaccgugaccggcaagaccagccugcccagaugcuggcuggugagcaacggcagcuaccugaacgagacccacuucagcgacgacaucgagcagcaggccgacaacaugaucaccgagcugcugcagaaggaguacauggacagacagggcaagaccccccugggccugguggaccuguucguguucagcaccagcuucuaccugaucagcaucuuccugcaccuggugaagauccccacccacagacacgugaucggcaagcccugccccaagccccacagacugaaccacaugggcaucugcagcugcggccuguacaagcaccccggcgugcccgugaaguggaagagaugaggacuaguuauaagacugacuagcccgaugggccucccaacgggcccuccuccccuccuugcaccgagauuaauaaaaaaaaaaaaaaaaaaaaaaaaaaaaaaaaaaaaaaaaaaaaaaaaaaaaaaaaaaaaaaaaaaaaaaaaaaaaaaaaaaaaaaaaaaaaaaaaaaaa

SEQ ID NO: 31386 - RNA, 1662 nt, Artificial Sequence
  mRNA product Design i-3 (A100) comprising derived and/or modified sequence from LASV(Nig08-A19;Clade III)__ADU56618__GPCmut6 (opt4)
aggagaaagcuuaccaugggccagaucgugaccuucuuccaggaggugccccacgugaucgaggaggugaugaacaucgugcugaucgcccugagcauccuggccauccugaagggccuguacaacaucgccaccugcggccugaucggccuggugaccuuccugcugcugagcggcagaagcugcagcaugaccuacaagggcguguacgagcugcagacccuggagcugaacaugaacacccugaacaugugcaugccccugagcugcaccaagaacaacagccaccacuacaucauggugggcaacgagaccggccuggagcugacccugaccaacaccagccugcugcaccacaaguucugcaaccugagcgacgcccacaagaagaaccuguacgaccacacccugaugagcaucaucagcaccuuccaccugagcauccccaacuucaaccaguacgaggccaugagcugcgacuucaacggcggcaagaucaccgugcaguacaaccugagccacagcuacgccaucgacgccgccaaccacugcggcaccguggccaacggcgugcugcagaccuucaugagaauggccuggggcggcagcuacaucgcccuggacagcggcagaggcaagugggacugcaucaugaccagcuaccaguaccugaucauccagaacaccaccugggaggaccacugccaguucagcagacccagccccaucggcuaccugggccugcugagccagagaaccagagacaucuacaucagcagaagacugcugggcaccuucaccuggacccugagcgacagcgagggcaacgagacccccggcggcuacugccugaccagauggaugcugaucgaggccgagcugaagugcuucggcaacaccgccguggccaagugcaacgagaagcacgacgaggaguucugcgacaugcugagacuguucgacuucugcaagcaggccaucagaagacugaaggcccccgcccagaugagcauccagcugaucaacaaggccgugaacgcccugaucaacgaccagcugaucaugaagaaccaccugagagacaucaugggcauccccuacugcaacuacagcaaguacugguaccugaaccacaccagcaccggcagaaccagccugcccagaugcuggcuggugagcaacggcagcuaccugaacgagacccacuucagcgacgacaucgagcagcaggccgacaacaugaucaccgagaugcugcagaaggaguaccuggacagacagggcaagaccccccugggccugguggaccuguucguguucagcaccagcuucuaccugaucagcaucuuccugcaccuggugaagauccccacccacagacacaucgugggcaagcccugccccaagccccacagacugaaccacaugggcaucugcagcugcggccuguacaagcagcccggcgugcccgugagauggaagagaugaggacuaguuauaagacugacuagcccgaugggccucccaacgggcccuccuccccuccuugcaccgagauuaauaaaaaaaaaaaaaaaaaaaaaaaaaaaaaaaaaaaaaaaaaaaaaaaaaaaaaaaaaaaaaaaaaaaaaaaaaaaaaaaaaaaaaaaaaaaaaaaaaaaa

SEQ ID NO: 31387 - RNA, 1665 nt, Artificial Sequence
  mRNA product Design i-3 (A100) comprising derived and/or modified sequence from LASV(G1180-SLE-2010;Clade IV)__AIT17168__GPCmut6 (opt4)
aggagaaagcuuaccaugggccagaucgugaccuucuuccaggaggugccccacgugaucgaggaggugaugaacaucgugcugaucgcccugagcauccuggccgugcugaagggccuguacaacuucgccaccugcggccuggugggccugcugaccuuccugcugcugugcggcagaagcugcaccgccagcagauacaagggcguguacgagcugcagacccuggagcugaacauggagacccugaacaugugcaugccccugagcugcaccaagaacaacagccaccacuacaucauggugggcaacgagaccggccuggagcugacccugaccaacaccagcaucaucaaccacaaguucugcaaccugagcgacgcccacaagaagaaccuguacgaccacgcccugaugagcaucaucagcaccuuccaccugagcauccccaacuucaaccaguacgaggccaugagcugcgacuucaacggcggcaagaucagcgugcaguacaaccugagccacagcuacgccggcgacgccgccaaccacugcggcaccguggccaacggcgugcugcagaccuucaugagaauggccuggggcggcagcuacaucgcccuggacagcggccacggcagcugggacugcaucaugaccagcuaccaguaccugaucauccagaacaccaccugggaggaccacugccaguucagcagacccagccccaucggcuaccugggccugcugagccagagaaccagagacaucuacaucagcagaagacugcugggcaccuucaccuggacccugagcgacagcgagggcaaggacacccccggcggcuacugccugaccagauggaugcugaucgaggccgagcugaagugcuucggcaacaccgccguggccaagugcaacgagaagcacgacgaggaguucugcgacaugcugagacuguucgacuucugcaagcaggccauccagagacugaaggcccccgcccagaugagcauccagcugaucaacaaggccgugaacgcccugaucaacgaccagcugaucaugaagaaccaccugagagacaucaugggcauccccuacugcaacuacagcaaguacugguaccugaaccacaccaccaccggcaagaccagccugcccaagugcuggcuggugagcaacggcagcuaccugaacgagacccacuucagcgacgacaucgagcagcaggccgacaacaugaucaccgagaugcugcagaaggaguacauggagagacagggcaagaccccccugggccugguggaccuguucguguucagcaccagcuucuaccugaucagcaucuuccugcaccuggugaagauccccacccacagacacaucgugggcaagagcugccccaagccccacagacugaaccacaugggcaucugcagcugcggccuguacaagcagcccggcgugcccgugaaguggaagagaugaggacuaguuauaagacugacuagcccgaugggccucccaacgggcccuccuccccuccuugcaccgagauuaauaaaaaaaaaaaaaaaaaaaaaaaaaaaaaaaaaaaaaaaaaaaaaaaaaaaaaaaaaaaaaaaaaaaaaaaaaaaaaaaaaaaaaaaaaaaaaaaaaaaa

SEQ ID NO: 31388 - RNA, 1665 nt, Artificial Sequence
  mRNA product Design i-3 (A100) comprising derived and/or modified sequence from LASV(G1442-SLE-2011;Clade IV)__AIT17180__GPCmut6 (opt4)
aggagaaagcuuaccaugggccagaucgugaccuucuuccaggaggugccccacgugaucgaggaggugaugaacaucgugcugaucgcccugagcauccuggccgugcugaagggccuguacaacguggccaccugcggccugaucggccuggugaccuuccugcugcugugcggcagaagcugcaccaccacccuguacaagggcguguacgagcugcagacccuggagcugaacauggagacccugaacaugugcaugccccugagcugcaccaagaacaacagccaccacuacaucagagugggcaacgagaccggccuggagcugacccugaccaacaccagcaucaucaaccacaaguucugcaaccugagcgacgcccacaagaagaaccuguacgaccacgcccugaugagcaucaucagcaccuuccaccugagcauccccaacuucaaccaguacgaggccaugagcugcgacuucaacggcggcaagaucagcgugcaguacaaccugagccacagcuacgccggcgacgccgccaaccacugcggcaccguggccaacggcgugcugcagaccuucaugagaauggccuggggcggcagcuacaucgcccuggacagcggcagaggcaacugggacugcaucaugaccagcuaccaguaccugaucauccagaacaccaccugggacgaccacugccaguucagcagacccagccccaucggcuaccugggccugcugagccagagaaccagagacguguacaucagcagaagacugcugggcaccuucaccuggacccugagcgacagcgagggcaaggacacccccggcggcuacugccugaccagauggaugcugaucgaggccgagcugaagugcuucggcaacaccgccguggccaagugcaacgagaagcacgacgaggaguucugcgacaugcugagacuguucgacuucugcaagcaggccauccagagacugaaggcccccgcccagaugagcauccagcugaucaacaaggccgugaacgcccugaucaacgaccagcugaucaugaagaaccaccugagagacaucaugggcauccccuacugcaacuacagcaaguacugguaccugaacaacaccgccaccggcaagaccagccugcccaagugcuggcugaucagcaacggcagcuaccugaacgagacccacuucagcgacgacaucgagcaggaggccgacaacaugaucaccgagaugcugcagaaggaguacauggagagacagggcaagaccccccugggccugguggaccuguucguguucagcaccagcuucuaccugaucagcaucuuccugcaccuggugaagauccccacccacagacacaucgugggcaagagcugccccaagccccacagacugaaccacaugggcaucugcagcugcggccuguacaagcagcccggcgugcccgugagauggaagagaugaggacuaguuauaagacugacuagcccgaugggccucccaacgggcccuccuccccuccuugcaccgagauuaauaaaaaaaaaaaaaaaaaaaaaaaaaaaaaaaaaaaaaaaaaaaaaaaaaaaaaaaaaaaaaaaaaaaaaaaaaaaaaaaaaaaaaaaaaaaaaaaaaaaa

SEQ ID NO: 31389 - RNA, 1665 nt, Artificial Sequence
  mRNA product Design i-3 (A100) comprising derived and/or modified sequence from LASV(G3010-SLE-2013;Clade IV)__AIT17344__GPCmut6 (opt4)
aggagaaagcuuaccaugggccagaucgugaccuucuuccaggaggugccccacgugaucgaggaggugaugaacaucgugcugaucgcccugagcauccuggccgugcugaagggccuguacaacuucgccaccugcggccuggugggccuggugaccuuccugcugcugugcggcagaagcugcaccaccagccuguacaagggcguguacgagcugcagacccuggagcugaacauggagacccugaacaugugcaugccccugagcugcaccaagaacaacagccaccacuacaucauggugggcaacgagaccggccuggagcugacccugaccaacaccagcaucaucaaccacaaguucugcaaccugagcgacgcccacaagaagaaccuguacaaccacgcccugaugagcaucaucagcaccuuccaccugagcauccccaacuucaaccaguacgaggccaugagcugcgacuucaacggcggcaagaucagcgugcaguacaaccugagccacagcuacgccggcgacgccgccagccacugcggcaccguggccaacggcgugcugcagaccuucaugagaauggccuggggcggcagcuacaucgcccuggacagcggcuacggcaagugggacugcaucaugaccagcuaccaguaccugaucauccagaacaccaccugggaggaccacugccaguucagcagacccagccccaucggcuaccugggccugcugagccagagaaccagagacaucuacaucagcagaagacugcugggcaccuucaccuggacccugagcgacagcgagggcaaggacacccccggcggcuacugccugaccagauggaugcugaucgaggccgagcugaagugcuucggcaacaccgccguggccaagugcaacgagaagcacgacgaggaguucugcgacaugcugagacuguucgacuucugcaagcaggccauccagagacugaagacccccgcccagaugagcauccagcugaucaacaaggccgugaacgcccugaucaacgaccagcugaucaugaagaaccaccugagagacaucaugggcauccccuacugcaacuacagcaaguacugguaccugaaccacaccaccaccggcaagaccagccugcccaagugcuggcuggugagcaacggcagcuaccugaacgagacccacuucagcgacgacaucgagcagcaggccgacaacaugaucaccgagaugcugcagaaggaguacauggagagacagggcaagaccccccugggccugguggaccuguucguguucagcaccagcuucuaccugaucagcaucuuccugcaccuggugaagauccccacccacagacacaucgugggcaagagcugccccaagccccacagacugaaccacaugggcaucugcagcugcggccuguacaagcagcccggcgugcccgugagauggaagagaugaggacuaguuauaagacugacuagcccgaugggccucccaacgggcccuccuccccuccuugcaccgagauuaauaaaaaaaaaaaaaaaaaaaaaaaaaaaaaaaaaaaaaaaaaaaaaaaaaaaaaaaaaaaaaaaaaaaaaaaaaaaaaaaaaaaaaaaaaaaaaaaaaaaa

SEQ ID NO: 31390 - RNA, 1665 nt, Artificial Sequence
  mRNA product Design i-3 (A100) comprising derived and/or modified sequence from LASV(G502-SLE-2009;Clade IV)__AIT17126__GPCmut6 (opt4)
aggagaaagcuuaccaugggccagaucgugaccuucuuccaggaggugccccacgugaucgaggaggugaugaacaucgugcugaucgcccugagcauccuggccgugcugaagggccuguacaacuucgccaccugcggccuggugggccugcugaccuuccugcugcugugcggcagaagcugcaccaccggccuguacaagggcguguacgagcugcagacccuggagcugaacauggagacccugaacaugugcaugccccugagcugcaccaagaacaacagccaccacuacaucauggugggcaacgagaccggccuggagcugacccugaccaacaccagcaucaucaaccacaaguucugcaaccugagcgacgcccacaagaagaaccuguacgaccacgcccugaugagcaucaucagcaccuuccaccugagcauccccaacuucaaccaguacgaggccaugagcugcgacuucaacggcggcaagaucagcgugcaguacaaccugagccacagcuacgccggcgacgccgccgaccacugcggcaccguggccaacggcgugcugcagaccuucaugagaauggccuggggcggcagcuacaucgcccuggacagcggcagaggcagaugggacugcaucaugaccagcuaccaguaccugaucauccagaacaccaccugggaggaccacugccaguucagcagacccagccccaucggcuaccugggccugcugagccagagaaccagagacaucuacaucagcagaagacugcugggcaccuucaccuggacccugagcgacagcgagggcaaggacacccccggcggcuacugccugaccagauggaugcugaucgaggccgagcugaagugcuucggcaacaccgccguggccaagugcaacgagaagcacgacgaggaguucugcgacaugcugagacuguucgacuucugcaagcaggccauccagagacugaaggcccccgcccagaugagcauccagcugaucaacaaggccgugaacgcccugaucaacgaccagcuggugaugaagaaccaccugagagacaucaugggcauccccuacugcaacuacagcagauacugguaccugaaccacaccaccaccggcagaaccagccugcccaagugcuggcuggugagcaacggcagcuaccugaacgagacccacuucagcgacgacaucgagcagcaggccgacaacaugaucaccgagaugcugcagaaggaguacauggagagacagggcaagaccccccugggccugguggaccuguucguguucagcaccagcuucuaccugaucagcaucuuccugcaccuggugaagauccccacccacagacacaucgugggcaagagcugccccaagccccacagacugaaccacaugggcaucugcagcugcggccuguacaagcagcccggcgugcccgugaaguggaagagaugaggacuaguuauaagacugacuagcccgaugggccucccaacgggcccuccuccccuccuugcaccgagauuaauaaaaaaaaaaaaaaaaaaaaaaaaaaaaaaaaaaaaaaaaaaaaaaaaaaaaaaaaaaaaaaaaaaaaaaaaaaaaaaaaaaaaaaaaaaaaaaaaaaaa

SEQ ID NO: 31391 - RNA, 1665 nt, Artificial Sequence
  mRNA product Design i-3 (A100) comprising derived and/or modified sequence from LASV(G733-SLE-2010;Clade IV)__AIT17154__GPCmut6 (opt4)
aggagaaagcuuaccaugggccagaucgugaccuucuuccaggaggugccccacgugaucgaggaggugaugaacaucgugcugaucgcccugagcauccuggccgugcugaagggccuguacaacuucgccaccugcggcaucgugggccuggugagcuuccugcugcugugcggcagaagcugcaccaccagccuguacaagggcguguacgagcugcagacccuggagcugaacauggagacccugaacaugugcaugccccugagcugcaccaagaacaacagccaccacuacaucauggugggcaacgagaccggccuggagcugacccugaccaacaccagcaucaucaaccacaaguucugcaaccugagcgacgcccacaagaagaaccuguacgaccacgcccugaugagcaucaucagcaccuuccaccugagcauccccaacuucaaccaguacgaggccaugagcugcgacuucaacggcggcaagaucagcgugcaguacaaccugagccacagcuacgccggcgacgccgccaaccacugcggcaccaucgccaacggcgugcugcagaccuucaugagaauggccuggggcggcagcuacaucgcccuggacagcggcagagacagaugggacugcaucaugaccagcuaccaguaccugaucauccagaacaccaccugggaggaccacugccaguucagcagacccagccccaucggcuaccugggccugcugagccagagaaccagagacaucuacaucagcagaagacugcugggcaccuucaccuggacccugagcgacagcgagggcaaggacacccccggcggcuacugccugaccagauggaugcugaucgaggccgagcugaagugcuucggcaacaccgccguggccaagugcaacgagaagcacgacgaggaguucugcgacaugcugagacuguucgacuucugcaagcaggccauccagagacugaaggcccccgcccagaugagcauccagcugaucaacaaggccgugaacgcccugaucaacgaccagcugaucaugaagaaccaccugagagacaucaugggcauccccuacugcaacuacagcaaguacugguaccugaaccacaccaccaccggcaagaccagccugcccaagugcuggcuggugagcaacggcagcuaccugaacgagacccacuucagcgacgacaucgagcagcaggccgacaacaugaucaccgagaugcugcagaaggaguacauggagagacagggcaagaccccccugggccugguggaccuguucguguucagcaccagcuucuaccugaucagcaucuuccugcaccuggugaagauccccacccacagacacguggugggcaagagcugccccaagccccacagacugaaccacaugggcaucugcagcugcggccuguacggccagcccggcgugcccgugaaguggaagagaugaggacuaguuauaagacugacuagcccgaugggccucccaacgggcccuccuccccuccuugcaccgagauuaauaaaaaaaaaaaaaaaaaaaaaaaaaaaaaaaaaaaaaaaaaaaaaaaaaaaaaaaaaaaaaaaaaaaaaaaaaaaaaaaaaaaaaaaaaaaaaaaaaaaa

SEQ ID NO: 31392 - RNA, 1665 nt, Artificial Sequence
  mRNA product Design i-3 (A100) comprising derived and/or modified sequence from MOPV/LASV reassortant(IGS-1;Clade IV)__AFY05576__GPCmut6 (opt4)
aggagaaagcuuaccaugggccagaucgugaccuucuuccaggaggugccccacgugaucgaggaggugaugaacaucgugcugaucgcccugagcgugcuggccgugcugaagggccuguacaacuucgccaccugcggccuggugggccuggugaccuuccugcugcugugcggcagaagcugcaccaccagccuguacaagggcguguacgagcugcagacccuggagcugaacauggagacccugaacaugugcaugccccugagcugcaccaagaacaacagccaccacuacaucauggugggcaacgagaccggccuggagcugacccugaccaacaccagcaucaucaaccacaaguucugcaaccugagcgacgcccacaagaagaaccuguacgaccacgcccugaugagcaucaucagcaccuuccaccugagcauccccaacuucaaccaguacgaggccaugagcugcgacuucaacggcggcaagaucagcgugcaguacaaccugagccacagcuacgccggcgacgccgccaaccacugcggcaccguggccaacggcgugcugcagaccuucaugagaauggccuggggcggcagcuacaucgcccuggacagcggcagaggcaacugggacugcaucaugaccagcuaccaguaccugaucauccagaacaccaccugggaggaccacugccaguucagcagacccagccccaucggcuaccugggccugcugagccagagaaccagagacaucuacaucagcagaagacugcugggcaccuucaccuggacccugagcgacagcgagggcgaggacacccccggcggcuacugccugaccagauggaugcugaucgaggccgagcugaagugcuucggcaacaccgccguggccaagugcaacgagaagcacgacgaggaguucugcgacaugcugagacuguucgacuucugcaagcaggccauccagagacugaaggcccccgcccagaugagcauccagcugaucaacaaggccgugaacgcccugaucaacgaccagcugaucaugaagaaccaccugagagacaucaugggcauccccuacugcaacuacagcaaguacugguaccugaaccacaccaccaccggcagaaccagccugcccaagugcuggcuggugagcaacggcagcuaccugaacgagacccacuucagcgacgacaucgagcagcaggccgacaacaugaucaccgagaugcugcagaaggaguacauggagagacagggcaagaccccccugggccugguggaccuguucguguucagcaccagcuucuaccugaucagcaucuuccugcaccuggugaagauccccacccacagacacaucgugggcaagagcugccccaagccccacagacugaaccacaugggcaucugcagcugcggccuguacaagcagcccggcgugcccgugaaguggaagagaugaggacuaguuauaagacugacuagcccgaugggccucccaacgggcccuccuccccuccuugcaccgagauuaauaaaaaaaaaaaaaaaaaaaaaaaaaaaaaaaaaaaaaaaaaaaaaaaaaaaaaaaaaaaaaaaaaaaaaaaaaaaaaaaaaaaaaaaaaaaaaaaaaaaa

SEQ ID NO: 31393 - RNA, 1665 nt, Artificial Sequence
  mRNA product Design i-3 (A100) comprising derived and/or modified sequence from LASV(LM765-SLE-2012;Clade IV)__AIT17814__GPCmut6 (opt4)
aggagaaagcuuaccaugggccagaucgugaccuucuuccaggaggugccccacgugaucgaggaggugaugaacaucgugcugaucgcccugagcauccuggccgugcugaagggccuguacaacuucgccaccugcggccuggugggccuggugaccuuccugcugcugugcggcagaagcugcaccaccagccuguacaagggcguguacgagcugcagacccuggagcugaacauggagacccugaacaugugcaugccccugagcugcaccaagaacaacagccaccacuacaucauggugggcaacgagaccggccuggagcugacccugaccaacaccagcaucaucgaccacaaguucugcaaccugagcgacgcccacagaaagaaccuguacgaccacgcccugaugagcaucaucagcaccuuccaccugagcauccccaacuucaaccaguacgaggccaugagcugcgacuucaacggcggcaagaucagcgugcaguacaaccugagccacagcuacgccaaggacgccgccgaccacugcggcaccguggccaacggcgugcugcagaccuucaugagaauggccuggggcggcagcuacaucgcccuggacagcggcagaggcagaugggacugcaucaugaccagcuaccaguaccugaucauccagaacaccaccugggaggaccacugccaguucagcagacccagccccaucggcuaccugggccugcugagccagagaaccagagacaucuacaucagcagaagacugcugggcaccuucaccuggacccugagcgacagcgagggcaaggacacccccggcggcuacugccugaccagauggaugcugaucgaggccgagcugaagugcuucggcaacaccgccguggccaagugcaacgagaagcacgacgaggaguucugcgacaugcugagacuguucgacuucugcaagcaggccauccagagacugaaggcccccgcccagaugagcauccagcugaucaacaaggccgugaacgcccugaucaacgaccagcugaucaugaagaaccaccugagagacaucaugggcauccccuacugcaacuacagcaaguacugguaccugaaccacaccaccaccggcaagaccagccugcccaagugcuggcuggugagcaacggcagcuaccugaacgagacccacuucagcgacgacaucgagcagcaggccgacaacaugaucaccgagaugcugcagaaggaguacauggagagacagggcaagaccccccugggccugguggaccuguucguguucagcaccagcuucuaccugaucagcaucuuccugcaccuggugaagauccccacccacagacacaucgugggcaagcccugccccaagccccacagacugaaccacaugggcaucugcagcugcggccuguacaagcagcccggcgugcccgugaaguggaagagaugaggacuaguuauaagacugacuagcccgaugggccucccaacgggcccuccuccccuccuugcaccgagauuaauaaaaaaaaaaaaaaaaaaaaaaaaaaaaaaaaaaaaaaaaaaaaaaaaaaaaaaaaaaaaaaaaaaaaaaaaaaaaaaaaaaaaaaaaaaaaaaaaaaaa

SEQ ID NO: 31394 - RNA, 1665 nt, Artificial Sequence
  mRNA product Design i-3 (A100) comprising derived and/or modified sequence from LASV(LM776-SLE-2012;Clade IV)__AIT17824__GPCmut6 (opt4)
aggagaaagcuuaccaugggccagaucgugaccuucuuccaggaggugccccacgugaucgaggaggugaugaacaucgugcugaucgcccugagcauccuggccgugcugaagggccuguacaacuucgccaccugcggccuggugggccuggugaccuuccugcugcugugcggcagaagcugcaccaccagcguguacaagggcguguacgagcugcagacccuggagcugaacauggagacccugaacaugugcaugccccugagcugcaccaagaacaacagccaccacuacaucauggugggcaacgagaccggccuggagcugacccugaccaacaccagcaucaucaaccacaaguucugcaaccugagcgacgcccacaagaagaaccuguacgaccacgcccugaugagcaucaucagcaccuuccaccugagcauccccaacuucaaccaguacgaggccaugagcugcgacuucaacggcggcaagaucagcgugcaguacaaccugagccacagcuacgccggcgacgccgccaaccacugcggcaccguggccaacggcgugcugcagaccuucaugagaauggccuggggcggcagcuacaucgcccuggacagcggccacggcaagugggacugcaucaugaccagcuaccaguaccugaucauccagaacaccaccugggaggaccacugccaguucagcagacccagccccaucggcuaccugggccugcugagccagagaaccagagacaucuacaucagcagaagacugcugggcaccuucaccuggacccugagcgacagcgagggcaaggacacccccggcggcuacugccugaccagauggaugcugaucgaggccgagcugaagugcuucggcaacaccgccguggccaagugcaacgagaagcacgacgaggaguucugcgacaugcugagacuguucgacuucugcaagcaggccauccagagacugaaggcccccgcccagaugagcauccagcugaucaacaaggccgugaacgcccugaucaacgaccagcugaucaugaagaaccaccugagagacaucaugggcauccccuacugcaacuacagcaaguacugguaccugaaccacaccaccaccggcaagaccagccugcccaagugcuggcuggugagcaacggcagcuaccugaacgagacccacuucagcgacgacaucgagcagcaggccgacaacaugaucaccgagaugcugcagaaggaguacauggagagacagggcaagaccccccugggccugguggaccuguucguguucagcaccagcuucuaccugaucagcaucuuccugcaccuggugaagauccccacccacagacacaucgugggcaagagcugccccaagccccacagacugaaccacaugggcaucugcagcugcggccuguacaagcagcccggcgugcccgugagauggaagagaugaggacuaguuauaagacugacuagcccgaugggccucccaacgggcccuccuccccuccuugcaccgagauuaauaaaaaaaaaaaaaaaaaaaaaaaaaaaaaaaaaaaaaaaaaaaaaaaaaaaaaaaaaaaaaaaaaaaaaaaaaaaaaaaaaaaaaaaaaaaaaaaaaaaa

SEQ ID NO: 31395 - RNA, 1665 nt, Artificial Sequence
  mRNA product Design i-3 (A100) comprising derived and/or modified sequence from LASV(Mad39;Clade IV)__ANH09722__GPCmut6 (opt4)
aggagaaagcuuaccaugggccagaucgugaccuucuuccaggaggugccccacgugaucgaggaggugaugaacaucgugcugaucgcccugagcauccuggccgugcugaagggccuguacaacguggccaccugcggccugaucggccuggugaccuuccugcugcugugcggcagaagcugcaccaccacccuguacaagggcguguacgagcugcaggcccuggagcugaacauggagacccugaacaugugcaugccccugagcugcaccaagaacaacagccaccacuacaucagagugggcaacgagaccggccuggagcugacccugaccaacaccagccugaucaaccacaaguucugcaaccugagcgacgcccacaagaagaaccuguacgaccacgcccugaugagcaucaucagcaccuuccaccugagcauccccaacuucaaccaguacgaggccaugagcugcgacuucaacgacggcaagaucagcgugcaguacaaccugagccacaccuacgccggcgacaccgccaaccacugcggcaccguggccaacggcgugcugcagaccuucaugagaauggccuggggcggcagcuacaucgcccuggacagcggcagaggcggcugggacugcaucaugaccagcuaccaguaccugaucauccagaacaccaccugggaggaccacugccaguucagcagacccagccccaucggcuaccugggccugcugagccagagaaccagagacaucuacaucagcagaagacugcugggcaccuucaccuggacccugagcgacagcgagggcaaggacacccccggcggcuacugccugaccagauggaugcugaucgaggccgagcugaagugcuucggcaacaccgccguggccaagugcaacgagaagcacgacgaggaguucugcgacaugcugagacuguucgacuucugcaagcaggccauccagagacugaaggcccccgcccagaugagcauccagcugaucaacaaggccgugaacgcccugaucaacgaccagcugaucaugaagaaccaccugagagacaucaugggcauccccuacugcaacuacagcaaguacugguaccugaaccacaccgugaccggcaagaccagccugcccaagugcuggcuggugagcaacggcagcuaccugaacgagacccacuucagcgacgacaucgagcagcaggccgacaacaugaucaccgagaugcugcagaaggaguacauggagagacagggcaagaccccccugggccugguggaccuguucguguucagcaccagcuucuaccugaucagcaucuuccugcaccuggugaagauccccacccacagacacguggugggcaagcccugccccaagccccacagacugaaccacaugggcaucugcagcugcggcuucuacaagcagcccggcgugcccgugagauggaagagaugaggacuaguuauaagacugacuagcccgaugggccucccaacgggcccuccuccccuccuugcaccgagauuaauaaaaaaaaaaaaaaaaaaaaaaaaaaaaaaaaaaaaaaaaaaaaaaaaaaaaaaaaaaaaaaaaaaaaaaaaaaaaaaaaaaaaaaaaaaaaaaaaaaaa

SEQ ID NO: 31396 - RNA, 1665 nt, Artificial Sequence
  mRNA product Design i-3 (A100) comprising derived and/or modified sequence from LASV(Z0947-SLE-2011;Clade IV)__AIT17840__GPCmut6 (opt4)
aggagaaagcuuaccaugggccagaucgugaccuucuuccaggaggugccccacgugaucgaggaggugaugaacaucgugcugaucgcccugagcauccuggccgugcugaagggccuguacaacuucgccaccugcggccuggugggccuggugaccuuccugcugcugugcggcagaagcugcaccaucagccuguacaagggcguguacgagcugcagacccuggagcugaacauggagacccugaacaugugcaugccccugagcugcaccaagaacaacagccaccacuacaucauggugggcaacgagaccggccuggagcugacccugaccaacaccagcaucaucaaccacaaguucugcaaccugagcgacgcccacaagaagaaccuguacgaccacgcccugaugagcaucaucagcaccuuccaccugagcauccccaacuucaaccaguacgaggccaugagcugcgacuucaacggcggcaagaucagcgugcaguacaaccugagccacagcuacgccggcgacgccgccaaccacugcggcaccguggccaacggcgugcugcagaccuucaugagaauggccuggggcggcagcuacaucgcccuggacagcggcagagacagaugggacugcaucaugaccagcuaccaguaccugaucauccagaacaccaccugggaggaccacugccaguucagcagacccagccccaucggcuaccugggccugcugagccagagaaccagagacaucuacaucagcagaagacugcugggcaccuucaccuggacccugagcgacagcgagggcaaggacacccccggcggcuacugccugaccagauggaugcugaucgaggccgagcugaagugcuucggcaacaccgccguggccaagugcaacgagaagcacgacgaggaguucugcgacaugcugagacuguucgacuucugcaagcaggccauccagagacugaaggcccccgcccagaugagcauccagcugaucaacaaggccgugaacgcccugaucaacgaccagcugaucaugaagaaccaccugagagacaucaugggcauccccuacugcaacuacagcaaguacugguaccugaaccacaccaccaccggcaagaccagccugcccaagugcuggcuggugagcaacggcagcuaccugaacgagacccacuucagcgacgacaucgagcagcaggccgacaacaugaucaccgagaugcugcagaaggaguacauggagagacagggcaagaccccccugggccugguggaccuguucguguucagcaccagcuucuaccugaucagcaucuuccugcaccuggugaagauccccacccacagacacaucgugggcaagcccugccccaagccccacagacugaaccacaugggcaucugcagcugcggccuguacaagcagcccggcgugcccgugaaguggaagagaugaggacuaguuauaagacugacuagcccgaugggccucccaacgggcccuccuccccuccuugcaccgagauuaauaaaaaaaaaaaaaaaaaaaaaaaaaaaaaaaaaaaaaaaaaaaaaaaaaaaaaaaaaaaaaaaaaaaaaaaaaaaaaaaaaaaaaaaaaaaaaaaaaaaa

SEQ ID NO: 31397 - RNA, 1665 nt, Artificial Sequence
  mRNA product Design i-3 (A100) comprising derived and/or modified sequence from LASV(Josiah;Clade IV)__NP_694870__GPCmut6 (opt5)
aggagaaagcuuaccaugggccagaucgugaccuucuuucaagaggucccccacguuauugaagaggugaugaacaucgugcugauugcccucagcguccuggcugugcuuaaggggcuguacaauuucgccacaugcggacucguuggccuggugacguuucuucugcucugugggagauccugcaccacaucucuguauaaaggagucuacgaacugcagacccucgagcugaacauggaaacacuuaauauguguaugccucugagcugcaccaagaacaauucccaucacuauaucauggugggcaacgagacagggcucgagcugacccuuacgaauaccucuauuaucaaccauaaauucuguaaucugagcgacgcgcacaagaaaaaccucuacgaucaugcucugauguccaucauuucuacauuucaccugagcaucccgaauuucaaccaguaugaagccauguccugcgacuuuaauggaggcaagauuagcguucaguacaaccucucucacuccuaugccggcgaugcugccaaucauugugggaccguggcuaacggaguccugcaaacauucaugcggauggccuggggcgggagcuacaucgcgcuugacucuggacgcggcaacugggauugcauuaugaccuccuaccaguaucugaucauucagaauacgacaugggaggaccacugucaguuuagcagacccucuccuaucggguaccucggacugcuuucccaacggacccgcgauaucuauauuagcagacggcugcucggcacauucaccuggacccuguccgacucugaaggcaaggauacacccgggggauacugccugacgcgcuggaugcucaucgaggccgagcugaaauguuuuggcaacaccgcuguggccaagugcaaugaaaaacaugacgaggaguucugcgauaugcuuagacuguuugacuucuguaagcaggcuauucagcggcucaaagccccugcgcagaugagcauccaacugauuaacaaggccgugaaugcucuuaucaacgaucagcugaucaugaagaaucaccuccgcgacauuauggggauccccuauugcaacuacuccaaauauugguaccugaaucacacaaccacaggaagaaccagccugccuaaguguuggcucgucucuaacggcuccuaccugaaugaaacgcauuucagcgacgauauugaacagcaagccgacaacaugaucacagagaugcuucagaaagaguauauggaacggcaggggaagaccccgcugggacucguugaucuguuuguguucucuaccagcuuuuaccugauuuccaucuuccuucaccucgugaaaauccccacacaucgccacauugucggcaagucuugcccuaaaccccauagacugaaucacaugggcaucuguagcugcgggcuguauaagcagccuggagugcccguuaaguggaaacggugaggacuaguuauaagacugacuagcccgaugggccucccaacgggcccuccuccccuccuugcaccgagauuaauaaaaaaaaaaaaaaaaaaaaaaaaaaaaaaaaaaaaaaaaaaaaaaaaaaaaaaaaaaaaaaaaaaaaaaaaaaaaaaaaaaaaaaaaaaaaaaaaaaaa

SEQ ID NO: 31398 - RNA, 1662 nt, Artificial Sequence
  mRNA product Design i-3 (A100) comprising derived and/or modified sequence from LASV(LP;Clade I)__AAF86701__GPCmut6 (opt5)
aggagaaagcuuaccaugggccagaucauuaccuucuuucaagaggugccccacgucaucgaagagguuaugaacauugugcugaucgcccucagccugcuugcuauucugaaggggcucuacaauaucgccacaugcggaaucauuggccugguggcguuccuuuuucugugugggaaauccugcucucucacgcugaagggaggcuaugaacugcagacccucgagcugaacauggaaacacuuaauauguguaugccucugagcugcaccaaaaacuccucucaucacuacaucagagucgggaaugagacaggacucgagcugacccuuacaaacaccagcauuaucaaucauaaguucuguaaccuguccgacgcucacaaaaagaaucucuaugaucaugcccugaugucuauuaucagcacguuucaccuguccauuccgaacuucaaucaguacgaagccaugagcugcgacuuuaacggcggcaagaucucugugcaguauaaucucucccacagcuacgcuggggaugccgcugagcauuguggaaccguugccaacggcgugcugcaaacauucaugcggauggcguggggagggcgcuauaucgcccuugacucuggcaaagggaauugggauugcauuaugaccuccuaccaguaccugaucauucagaacacaaccugggaagaccacugucaguuuagcagacccucuccuaucggauaucucggccugcuuucccaacggacgcgcgauauuuacaucagcagacggcugcucggcacauucaccuggacacuguccgacucugaggggaacgagacccccggaggcuauugccugacccgcuggaugcucaucgaagcugagcugaaguguuuugggaauacagccgucgcuaaaugcaacgaaaagcaugaugaggaguucugcgacaugcuuagacuguuugauuucuguaaacaggccauucggcgccucaaggcgccugcccagaugagcauccagcugauuaauaaggcugugaacgcccuuaucaaugaccaacugauuaugaaaaaccaccucagagauaucaugggaauccccuacugcaauuauuccaaguacugguaucugaaccacacgagcucuggccggaccucccugccuaaauguuggcucauuagcaaugggucuuaccugaacgaaacacaguucagcgacgacaucgagcagcaagcugauaauaugauuaccgaaaugcuucagaaggaguacaucgaacgccagggaaaaacaccgcugggccucguugacauuuuuaucuucuccaccucuuuuuaucugauuagcaucuuccugcaucuuaucaagauucccacgcacagacauaucgugggcaaaccuugccccaagccucaccggcucaaccauaugggggucuguuccugcggacuguacaagcaccccggcgugccgacaaaauggaagcgcugaggacuaguuauaagacugacuagcccgaugggccucccaacgggcccuccuccccuccuugcaccgagauuaauaaaaaaaaaaaaaaaaaaaaaaaaaaaaaaaaaaaaaaaaaaaaaaaaaaaaaaaaaaaaaaaaaaaaaaaaaaaaaaaaaaaaaaaaaaaaaaaaaaaa

SEQ ID NO: 31399 - RNA, 1662 nt, Artificial Sequence
  mRNA product Design i-3 (A100) comprising derived and/or modified sequence from LASV(803213;Clade II)__AAF86703__GPCmut6 (opt5)
aggagaaagcuuaccaugggccagaucauuaccuucuuucaagaggugccccacgucaucgaagagguuaugaacauugugcugaucgcccucagccugcuugcuauucugaaggggaucuacaauguggccacaugcggacucuucggccugaucuccuuucuucugcucugugggagaucuugcagcgucacguauaaaggaguguacgaacugcagacccuggagcucaacauggcgaaucugaacauguguaugccucuuuccugcacaaagaauaacucucaucacuauauuaugguuggcaaugaaaccgggcuggagcucacacugaccaacacaagcaucauuaaucauaaauucuguaaccuuuccgacgcucacaagaaaaaucuguacgaucaugcccucaugucuaucauuagcaccuuucaccuguccaucccgaacuucaaucaguaugaggccaugagcugcgacuuuaacggaggcaagauuucugugcaguacaaucugucccacagcuucgcugucgaugccgcuaaccauuguggcacgaucgccaacggggugcuccaaaccuuuaugcggauggcguggggaggcucuuauaucgcccuggacuccgggaagggaaauugggauugcauuaugacaagcuaccaguaccuuaucauucagaacaccacaugggaagaccacugucaguucucucgccccuccccuaucggcuaucuggggcuccugagccaaagaacccgggauauuuacaucucccgcagacuucugggaacguuuacauggacccucucugacagcgagggcaaugaagcucccggcggguauugccugacacgguggaugcugaucgaggccgagcucaaauguuucggaaacaccgcuguugccaagugcaaugaaaaacaugaugaggaauuuugcgacaugcugcgccuuuucgauuucuguaagcaggcgauuaaaagacugaagaccccugcccagauguccauccagcucauuaacaaggcugugaaugcccugaucaacgaccaacuuauuaugaaaaaucaucugcgggauaucaugggcauccccuacugcaacuauagccgcuacugguaucucaaucacacagucacggggaagaccucucugccuagauguuggcugguguccaacggaagcuaccucaaugagacacacuuuucugacgacauugaacagcaggcugauaacaugaucaccgagaugcugcaaaaagaguacauggaccggcagggcaagacaccgcuugggcugguggaucucuucgucuuuagcaccuccuucuaucugauuucuaucuuucugcaccuuguuaaaauucccacgcaucgccacaucgugggaaagccuugccccaaaccucauagacucaaucacaugggcauuuguagcugcggccuguacaagcaccccggggugccggucaaguggaaacggugaggacuaguuauaagacugacuagcccgaugggccucccaacgggcccuccuccccuccuugcaccgagauuaauaaaaaaaaaaaaaaaaaaaaaaaaaaaaaaaaaaaaaaaaaaaaaaaaaaaaaaaaaaaaaaaaaaaaaaaaaaaaaaaaaaaaaaaaaaaaaaaaaaaa

SEQ ID NO: 31400 - RNA, 1662 nt, Artificial Sequence
  mRNA product Design i-3 (A100) comprising derived and/or modified sequence from LASV(GA391;Clade III)__CAA36645__GPCmut6 (opt5)
aggagaaagcuuaccaugggccagaucgugaccuucuuucaagaggucccccacguuauugaagaggugaugaacaucgugcugauugcccucagcauccuggcuauucuuaaggggcuguacaaugucgccacaugcggacucaucggccuggugacguuccuucugcucuccgggagaucuuguagccugaucuauaaaggaaccuacgaacugcagacacucgagcugaacauggaaacccuuaauaugugcaugccucuguccuguacaaagaacaauucucaucacuauauucggguuggcaacgagaccgggcucgagcugacacuuaccaauacgagcauccugaaccauaaauuuugcaaucucuccgacgcgcacaagcgcaaccuguacgaucauucucugaugagcauuaucuccaccuuccaccucagcauuccgaauuuuaaccaguaugaagcuaugucuugugacuucaauggaggcaaaaucacagugcaguacaaccugucccacagcuuugccgucgaugccgcuggccauugcgggacccuugccaauggagugcugcaaacauucaugagaauggcuuggggcgggucuuauauugcccucgacuccggacggggcaacugggauuguaucaugaccagcuaccaguaccugaucauucagaacacgacaugggacgaucacugccaguuuucucgccccuccccuaucggguaucuuggacugcucagccaaagaacccgggacauuuacaucucccgcagacugcugggcacauucaccuggacccucucugauagcgagggcaaugaaacacccgggggauauugucugacgcgguggaugcuuauugaggcggagcugaagugcuuuggcaacaccgccguugcuaaguguaaugaaaaacaugacgaggaguucugcgauaugcuccgccuguuugacuucugcaagcaggccaucagacggcuuaaaaccccugcucagauguccauccagcugauuaacaaggccgugaaugcgcucaucaacgaucaacugauuaugaaaaaucaucugcgcgacaucauggggauucccuacuguaacuauagcagauacugguaucucaaucacacaucuacaggaaagaccucccugccucggugcuggcuuaucagcaacggcucuuaccugaaugaaacgaaguucagcgacgauaucgaacagcaggccgacaacaugauuacagagaugcuccaaaaagaguacaucgaucgccaggggaagaccccgcugggacuggucgaccuuuuuguguucuccaccucuuuuuaucucauuagcaucuuccugcaccuggugaaaauucccacacacagacauaucgucggcaagccuugucccaaaccucaccggcucaaucauaugggcauuugcuccugugggcuguacaagcagcccggaguuccggugagauggaaacgcugaggacuaguuauaagacugacuagcccgaugggccucccaacgggcccuccuccccuccuugcaccgagauuaauaaaaaaaaaaaaaaaaaaaaaaaaaaaaaaaaaaaaaaaaaaaaaaaaaaaaaaaaaaaaaaaaaaaaaaaaaaaaaaaaaaaaaaaaaaaaaaaaaaaa

SEQ ID NO: 31401 - RNA, 1665 nt, Artificial Sequence
  mRNA product Design i-3 (A100) comprising derived and/or modified sequence from LASV(AV;Clade V)__CCA30314__GPCmut6 (opt5)
aggagaaagcuuaccaugggccagaucgugaccuucuuucaagaggucccccacguuauugaagaggugaugaacaucgugcugauugcccucagcauccuggcuguccuuaaggggcuguacaauauugccacaugcggacucaucggccugaucacguuccuucugcucugugggagauccugcucuagcaaccuguauaaaggaguguacgaacugcagucccucgaccugaauauggagacccuuaacauguguaugccucugucuugcacaaagaauaacagccaucacuauauucggguuggcaaugauaccgggcucgaacugacacuuaccaacacauccauccugaaucauaaauuuuguaaccucucugacgcgcacaagaaagaucuguacgaccaugcucugaugagcauuaucuccaccuuccaccucagcauuccgaauuuuaaccaguaugaggccaugucuugcgauuucaauggaggcaagaucuccgugcaguacaaccugagccacucuuaugccauugacgcugccaaucauuguggcacggucgcuaacgggauccuucaaaccuuuaugcgcauggccuggggaggcuccuacaucgcgcuggauagcgggagaggaaacugggacugcauuaugacaucuuaccaguaucucaucauucagaauaccacaugggagaaccacugucaguucucccggcccagcccuaucggcuaccuggggcuucugucccaacgcaccagagauauuuauaucucucggcgccuccugggaacguuuacauggacccugagcgacuccgaaggcaaugccacacccggcggguacugccucaccagauggaugcugaucgaggcugaacuuaaguguuucggaaacaccgccguggcuaaaugcaaugagaagcaugaugaggaauuuugcgacaugcugcgccucuucgauuuuuguaaacaggccauuagccggcugaagucuccugcgcagauguccauccagcuuauuaacaaagccguuaaugcucugaucaacgaccaacucauuaugaagaaucaccugagagacaucaugggcauccccuauugcaacuacagcaaguauugguaccugaaucacacaauuacggggaaaaccucucucccuaaguguuggcuggugagcaacggauccuaccuuaaugagacacauuucucugaugacaucgaacagcaggccgauaacaugauuaccgagaugcugcaaaaagaauauauggagcggcagggcaagacaccgcucgggcuggucgaccuguucguguuuagcaccuccuucuaccuuaucagcauuuuucuccgccuggugaaaauccccacgcacagacauauugucggaaagccuugccccaaaccucaccggcugaaucauaugggcaucuguucuugcggccucuauaagcagcccgggguuccggugcgcuggaagagaugaggacuaguuauaagacugacuagcccgaugggccucccaacgggcccuccuccccuccuugcaccgagauuaauaaaaaaaaaaaaaaaaaaaaaaaaaaaaaaaaaaaaaaaaaaaaaaaaaaaaaaaaaaaaaaaaaaaaaaaaaaaaaaaaaaaaaaaaaaaaaaaaaaaa

SEQ ID NO: 31402 - RNA, 1662 nt, Artificial Sequence
  mRNA product Design i-3 (A100) comprising derived and/or modified sequence from LASV(Togo/2016/7082;Clade VI)__AMR44577__GPCmut6 (opt5)
aggagaaagcuuaccaugggccagaucauuaccuucuuucaagaggugccccacgucaucgaagagguuaugaacauugugcugaucgcccucagccugcuugcuauucugaaggggguguacaaugucgccacaugcggaaucaucggccucgugacguuccuguuucuuugugggagauccugcucucugauuuauaaaggaagcuacgaacuccagacccuggagcugaacauggaaacacucaauauguguaugccucuguccugcaccaagaacucuagccaucacuauauccggguuggcaaugagacagggcuugagcugacccucacaaacaccuccauuaucaaucauaaauucuguaaccugucugacgcgcacaagcgcaaucuuuacgaucaugcucugaugagcauucucuccacguuucaccugagcaucccgaacuucaaucaguaugaagccaugucuugcgacuuuaacggaggcaaaauuuccgugcaguacaaucugagccacgccuaugcugucgaugccgcugagcauuguggcaccguggccaacgggguucuccaaacauucaugagaauggcguggggaggcucuuacaucgcccuggacuccgggcggggaaauugggauugcaucaugaccagcuaccaguaucuuauuauccagaacacaaccugggaagaccacugucaguuuucucgccccuccccuauuggcuaccuggggcuccugagccaaagaacgcgggauaucuauauuucccgcagacuucugggaacauucaccuggacacucucugacagcgagggcaacgagacccccggcggguacugccugacccgguggaugcugaucgaagcugagcucaaguguuuuggaaauacagccguggcuaagugcaacgaaaaacaugaugaggaguucugcgacaugcugcgccuuuuugauuucuguaagcaggccauccagagacugaaauccccugcgcagaugagcauucaacucaucaauaaggccgucaacgcucugauuaaugaccagcuuaucaugaaaaaccaucugcgggauaugaugggcauucccuauugcaauuacucuaaguauugguaccucaaccacacguccagcgggcgcaccucucugccuaaguguuggcuggugagcaauggauccuaccucaacgaaacacacuucucugacgacaucgagcagcaagccgauaauaugaucaccgaaaugcugcagaaagaguauauugacagacagggcaagacaccgcuugggcugguggaucucuuugucuucagcaccuccuuuuaccugaucagcauuuuccugcaccuuaucaaaauucccacgcaucggcacaucguuggaaagccuugccccaaaccucaucgccucaaccacaugggcauuuguucuugcggccuguauaagcagcccggggugccgacaagauggaaacggugaggacuaguuauaagacugacuagcccgaugggccucccaacgggcccuccuccccuccuugcaccgagauuaauaaaaaaaaaaaaaaaaaaaaaaaaaaaaaaaaaaaaaaaaaaaaaaaaaaaaaaaaaaaaaaaaaaaaaaaaaaaaaaaaaaaaaaaaaaaaaaaaaaaa

SEQ ID NO: 31403 - RNA, 1662 nt, Artificial Sequence
  mRNA product Design i-3 (A100) comprising derived and/or modified sequence from LASV(KAK-428;Clade n.d. (VII))__ANH09740__GPCmut6 (opt5)
aggagaaagcuuaccaugggccagaucgugaccuucuuucaagaggucccccacguuauugaagaggugaugaacaucgugcugauugcccucagccugcuugcuauccugaaggggcucuacaauuucgccacaugcggagucauuggccugaucacguuucuucugcucugugggagauccugcucugcgaccuauaaaggacaguacgaacugcagacacuggagcucaacauggaaagccugaauauguguaugccucuuuccugcaccaagaacaauucucaucacuauauccgggcuggcaacaauacagggcuggagcucacccugacaaacaccagcauuaucucccauaaauucuguaaucuuucugacgcccacaagaaaaaccuguacgaucauacgcucaugagcauuaucaccacauuucaccuguccauuccgaauuucaaccaguaugaggccaugagcugcgacuuuaauggaggcaagaucucuauucaauacaaccugucccacagcuaugcuggcgaugccgcucagcauugugggaccguggccaauggaguucuccagacauucaugcgcauggcguggggcgggucuuaccuggcccuugacuccggaagacggggcugggauugcaucaucagcucuuaccaguaucugauuauccaaaacaccacgugggacgaucacugucaguuuucccgccccagcccuauuggguaccucggauucgugucccagaagacaagagacaucuauauuucucggcgccugcuuggcaccuuuacauggacccugagcgauuccgaaggccaugacaugcccgggggauacugccucaccagauggaugcugaucgaggcugaucugaaauguuucggcaacacagccgucgcuaagugcaaugaaaaacacgacgaggaguuuugcgauauguggcgccucuucgacuucuguaagcaggccauccaacggcugaaagcgccugcccagaugaacauucagcuuaucaauaaggcugugaacgcccugauuaaugaccaacucaugaugaagaaccaccugagagauaucauggggauucccuauugcaauuacagcaaauuuugguaucuuaacaauacgaccacaggacggaccucucugccucgcuguuggcucaucuccaacggcagcuaccugaaugaaacacauuucucugacgauaucgagcagcaggcugacaacaugauuaccgaaaugcugcagaaggaguacauggauagacaagggaaaacgccgcucggacugguugaccuuuuuguguucagcacauccuuuuaucugaucaccauuuuccuccaccuggucaagauccccacccaucggcacauugugggcaaaccuugccccaagccucaucgccugaaucacaugggcaucuguucuugcgggcuuuacaaacagcccggagugccggucagauggaagcggugaggacuaguuauaagacugacuagcccgaugggccucccaacgggcccuccuccccuccuugcaccgagauuaauaaaaaaaaaaaaaaaaaaaaaaaaaaaaaaaaaaaaaaaaaaaaaaaaaaaaaaaaaaaaaaaaaaaaaaaaaaaaaaaaaaaaaaaaaaaaaaaaaaaa

SEQ ID NO: 31404 - RNA, 1662 nt, Artificial Sequence; identical to SEQ ID NO: 31398
  mRNA product Design i-3 (A100) comprising derived and/or modified sequence from LASV(Pinneo-NIG-1969;Clade I)__AIT17836__GPCmut6 (opt5)

SEQ ID NO: 31405 - RNA, 1662 nt, Artificial Sequence
  mRNA product Design i-3 (A100) comprising derived and/or modified sequence from LASV(ISTH0009-NIG-2011;Clade II)__AIT17404__GPCmut6 (opt5)
aggagaaagcuuaccaugggccagaucauuaccuucuuucaagaggugccccacgucaucgaagagguuaugaacauugugcugaucgcccucagccugcuugcuauucugaaggggaucuacaauguggccacaugcggacucuucggccuggucuccuuucuucugcucugugggagaucuugcagcacgaccuauaaaggaguguacgaacugcagacacuggagcucgacauggcgucccugaacauguguaugccucuuucuugcaccaagaauaacagccaucacuauaucaugguuggcaaugaaacagggcuggagcucacccugacaaacaccuccauuaucaaucauaaauucuguaaccuuucugaugcucacaagaaaaaucuguacgaccaugcccucaugagcauuaucuccacguuucaccugagcauuccgaacuucaaucaguaugaggccaugucuugcgauuuuaacggaggcaagaucuccgugcaguacaaucugagccacgcuuaugccgucgacgcugccaaccauuguggcaccauugcgaauggggugcuccaaacauucaugcggauggccuggggaggcucuuacaucgcucuggauuccgggaagggaagcugggacugcaucaugaccucuuaccaguaucuuauuauccagaacacaaccugggaagaucacugucaguuuucccgccccagcccuauuggcuaccuggggcuccugucccaaagaacgcgggacaucuauauuucucgcagacuucugggaacauucaccuggacacucagcgauuccgagggcaacgaaacccccggcggguacugccugacccgguggaugcugaucgaggccgagcucaaauguuuuggaaauacagcuguugccaagugcaacgaaaaacaugacgaggaguucugcgauaugcugcgccuuuuugacuucuguaagcaggcgaucagacggcugaaaacgccugcccagaugagcauucagcucaucaauaaggcugugaacgcccugauuaaugaucaacuuaucaugaagaaccaucugcgcgacauuaugggcauccccuauugcaauuacucuaaauauugguaccucaaccacaccgucacagggaagaccucccugccuagauguuggcuggugagcaauggaucuuaccucaacgaaacacacuucagcgacgauaucgaacagcaggcugacaauaugauuaccgagcugcuucaaaaagaguauauggaucggcagggcaagacgccgcuggggcucguggaccuguuugucuucuccacaucuuuuuaccugaucagcauuuuccuucaccucaucaaaauucccacccaucgccacaucaccggaaagccuugccccaaaccucauagacugaaccacaugggcauuuguuccugcggccuguauaagcaccccgggguuccggugaaguggaaacggugaggacuaguuauaagacugacuagcccgaugggccucccaacgggcccuccuccccuccuugcaccgagauuaauaaaaaaaaaaaaaaaaaaaaaaaaaaaaaaaaaaaaaaaaaaaaaaaaaaaaaaaaaaaaaaaaaaaaaaaaaaaaaaaaaaaaaaaaaaaaaaaaaaaa

SEQ ID NO: 31406 - RNA, 1662 nt, Artificial Sequence
  mRNA product Design i-3 (A100) comprising derived and/or modified sequence from LASV(ISTH2010-NIG-2012;Clade II)__AIT17482__GPCmut6 (opt5)
aggagaaagcuuaccaugggccagaucauuaccuucuuucaagaggugccccacgucaucgaagagguuaugaacauugugcugaucgcccucagccugcuugcuauucugaaggggaucuacaauguggccacaugcggacucuucggccuggucuccuuucuucugcucugugggagaucuugcagcacgaccuauaaaggaguguacgaacugcagacacuggagcucgacauggcgucccugaacauguguaugccucuuucuugcaccaagaauaacagccaucacuauaucaugguuggcaaugaaacagggcuggagcucacccugacaaacaccuccauuaucaaucauaaauucuguaaccuuucugaugcucacaagaaaaaucuguacgaccaugcccucaugagcauuaucuccacguuucaccugagcauuccgaacuucaaucaguaugaggccaugucuugcgauuuuaacggaggcaagaucuccgugcaguacaaucugagccacgcuuaugccgucgacgcugccaaccauuguggcaccauugcgaauggggugcuccaaacauucaugcggauggccuggggaggcucuuacaucgcucuggauuccgggaagggaagcugggacugcaucaugaccucuuaccaguaucuuauuauccagaacauuacaugggaagaucacugucaguuuucccgccccagcccuaucggcuaccuggggcuccugucccaaagaacccgggacauuuauaucucucgcagacuucugggaacguucacauggacccucagcgauuccgagggcaacgaaacacccggcggguacugccugacccgguggaugcugaucgaggccgagcucaaauguuuuggaaauaccgcuguugccaagugcaacgaaaaacaugacgaggaguucugcgauaugcugcgccuuuuugacuucuguaagcaggcgauuagacggcugaaaacgccugcccagaugagcauccagcucauuaauaaggcugugaacgcccugaucaaugaucaacuuauuaugaagaaccaucugcgcgacaucaugggcauccccuauugcaauuacucuaaauauugguaccucaaccacacagucaccgggaagacaucccugccuagauguuggcuggugagcaauggaucuuaccucaacgaaacccacuucagcgacgauauugaacagcaggcugacaauaugaucacagagcugcuucaaaaagaguauauugaucggcagggcaagaccccgcuggggcucguggaccuguuugucuucuccacgucuuuuuaccugaucagcauuuuccuucaccucguuaaaauccccacacaucgccacguggugggaaagccuugccccaaaccucauagacugaaccacaugggcauuuguuccugcggccuguauaagcaccccggggucccggugaaguggaaacggugaggacuaguuauaagacugacuagcccgaugggccucccaacgggcccuccuccccuccuugcaccgagauuaauaaaaaaaaaaaaaaaaaaaaaaaaaaaaaaaaaaaaaaaaaaaaaaaaaaaaaaaaaaaaaaaaaaaaaaaaaaaaaaaaaaaaaaaaaaaaaaaaaaaa

SEQ ID NO: 31407 - RNA, 1662 nt, Artificial Sequence
  mRNA product Design i-3 (A100) comprising derived and/or modified sequence from LASV(Lassa virus/H.sapiens-wt/NGA/2015/ISTH_0543;Clade II)__AVO03639__GPCmut6 (opt5)
aggagaaagcuuaccaugggccagaucauuaccuucuuucaagaggugccccacgucaucgaagagguuaugaacauugugcugaucgcccucagccugcuugcuauucugaaggggaucuacaauguggccacaugcggacucuucggccuggucuccuuucuucugcucugugggagaucuugcagcacgaccuauaaaggaguguacgaacugcagacacuggagcucgacauggcgaaccugaauauguguaugccucuuuccugcaccaagaacaauucucaucacuauaucaugguuggcaacgaaacagggcuggagcucacccugacaaauaccagcauuaucaaccauaaauucuguaaucuuuccgaugcucacaagaaaaaccuguacgaccaugcccucaugucuauuaucagcacguuucaccuguccauuccgaauuucaaccaguaugaggccaugagcugcgauuuuaauggaggcaagaucucugugcaguacaaccugucccacaccuaugcugucgacgccgcuaaucauuguggcacaauugccaacggggugcuccaaaccuucaugcggauggcguggggaggcagcuacaucgcccuggauucugggaagggauccugggacugcaucaugacaagcuaccaguaucuuguuauucagaacaccacgugggaagaucacugucaguuuucucgccccuccccuaucggcuaccuggggcuccugagccaaagaacacgggacauuuauaucucccgcagacuucugggaaccuucacauggacccucucugauagcgagggcaaugaaacccccggcggguacugccugacacgguggaugcugauugaggcugagcucaaauguuuuggaaacacggccguggcuaagugcaaugaaaaacaugacgaggaguucugcgauaugcugcgccuuuuugacuucuguaagcaggccaucagacggcugaaaaccccugcgcagauguccauccagcucauuaacaaggccgucaaugcucugaucaacgaucaacuuauuaugaagaaucaucugcgcgacaucaugggcauucccuauugcaacuacagcaaauauugguaccucaaucacacagugaccgggaagacaucucugccuagauguuggcugguguccaacggaagcuaccucaaugaaacccacuucucugacgauaucgaacagcaggccgacaacaugaucacggagcugcuucaaaaagaguauauugaucggcagggcaagacaccgcuggggcucgucgaccuguuuguuuucagcaccuccuuuuaccugaucucuauuuuccuucaccucgugaaaauccccacccaucgccacauuacaggaaagccuugccccaaaccucauagacugaaucacaugggcaucuguagcugcggccuguauaagcaccccggggugccggucaaguggaaacggugaggacuaguuauaagacugacuagcccgaugggccucccaacgggcccuccuccccuccuugcaccgagauuaauaaaaaaaaaaaaaaaaaaaaaaaaaaaaaaaaaaaaaaaaaaaaaaaaaaaaaaaaaaaaaaaaaaaaaaaaaaaaaaaaaaaaaaaaaaaaaaaaaaaa

SEQ ID NO: 31408 - RNA, 1662 nt, Artificial Sequence
  mRNA product Design i-3 (A100) comprising derived and/or modified sequence from LASV(Lassa virus/H.sapiens-wt/NGA/2016/ISTH_0009;Clade II)__AVO03571__GPCmut6 (opt5)
aggagaaagcuuaccaugggccagaucauuaccuucuuucaagaggugccccacgucaucgaagagguuaugaacauugugcugaucgcccucagccugcuugcuauucugaaggggaucuacaauguggccacaugcggacuccugggccuugucuccuuccugcuccugugugggagaucuugcagcacgaccuauaaaggaguguacgaacugcagacacucgagcuggacauggcgucccuuaacauguguaugccucugucuugcaccaagaauaacagccaucacuauaucaugguuggcaaugaaacagggcucgagcugacccuuacaaacaccuccauuaucaaucauaaauuuuguaaccugucugaugcucacaagaaaaaucucuacgaccaugcccugaugagcauuaucuccacguuccaccugagcauuccgaacuuuaaucaguaugaggccaugucuugcgauuucaacggaggccggaucuccgugcaguacaaucucagccacucuuaugcugucgacgccgcuaaccauuguggcaccauugccaauggggugcugcaaacauuuaugcgcauggcguggggaggcuccuacaucgcccuugauagcgggaagggaucuugggacugcaucaugaccuccuaccaguaucugauuauccagaacacaaccugggaagaucacugucaguucagcagacccuccccuauuggcuaccucgggcugcuuucucaacggacgcgcgacaucuauauuagcagacggcugcucggaacauuuaccuggacacuguccgauagcgagggcaacgaaacccccggcggguacugccugacccgcuggaugcucaucgaggcugagcugaaguguuucggaaauacagccguugcuaaaugcaacgaaaagcaugacgaggaauuuugcgauaugcuuagacuguucgacuuuuguaaacaggccauccggcgccucaagacgccugcgcagaugucuauucagcugaucaauaaagccgugaacgcucuuauuaaugaucaacugaucaugaagaaccaccucagagacauuaugggcauccccuauugcaauuacuccaaguauugguaccugaaccacaccgucacagggaaaaccagccugccucgguguuggcucgugucuaauggaagcuaccugaacgagacacauuucuccgacgauaucgaacagcaggccgacaauaugauuaccgagcuucugcaaaaggaguauaucgaucgccagggcaaaacgccgcucgggcugguggaccuguucgucuuuucuaccagcuucuaccuuauuuccaucuuucuccaccugguuaagauucccacacauagacacaucaccggaaaaccuugccccaagccucaucggcugaaccacaugggcauuuguagcugcggccucuauaaucaccccggggugccggugaaauggaagcgcugaggacuaguuauaagacugacuagcccgaugggccucccaacgggcccuccuccccuccuugcaccgagauuaauaaaaaaaaaaaaaaaaaaaaaaaaaaaaaaaaaaaaaaaaaaaaaaaaaaaaaaaaaaaaaaaaaaaaaaaaaaaaaaaaaaaaaaaaaaaaaaaaaaaa

SEQ ID NO: 31409 - RNA, 1662 nt, Artificial Sequence
  mRNA product Design i-3 (A100) comprising derived and/or modified sequence from LASV(Lassa virus/H.sapiens-wt/NGA/2016/ISTH_0017;Clade II)__AVO03567__GPCmut6 (opt5)
aggagaaagcuuaccaugggccagaucauuaccuucuuucaagaggugccccacgucaucgaagagguuaugaacauugugcugaucgcccucagccugcuugcuauucugaaggggaucuacaauguggccacaugcggacucuucggccuggucuccuuucuucugcucugugggagaucuugcagcacgaccuauaaaggaguguacgaacugcagacacuggagcucgacauggcgucccugaacauguguaugccucuuucuugcaccaagaauaacagccaucacuauaucaugguuggcaaugaaacagggcuggagcucacccugacaaacaccuccauuaucaaucauaaauucuguaaccuuucugaugcucacaagaaaaaucuguacgaccaugcccucaugagcauuaucuccacguuucaccugagcauuccgaacuucaaucaguaugaggccaugucuugcgauuuuaacggaggcaagaucuccgugcaguacaaucugagccacaccuaugcuauugacgccgcuaaccauuguggcacaaucgccaaugggguccuccaaaccuucaugcggauggcguggggaggcucuuacaucgcccuggauuccgggaagggaagcugggacugcauuaugacaucuuaccaguaucuuaucauucagaacaccacgugggaagaucacugucaguuuucccgccccagcccuaucggcuaccuggggcuccugucccaaagaacacgggacauuuauaucucucgcagacuucugggaaccuucacauggacccucagcgauuccgagggcaacgaaacccccggcggguacugccugacacgguggaugcugaucgaggcugagcucaaauguuuuggaaauacggccguggcuaagugcaacgaaaaacaugacgaggaguucugcgauaugcugcgccuuuuugacuucuguaagcaggccauuagacggcugaaaaccccugcgcagaugagcauccagcucauuaauaaggccguuaacgcucugaucaaugaucaacuuauuaugaagaaccaucugcgcgacaucaugggcauccccuauugcaauuacucuaaauauugguaccucaaccacacagugaccgggaagacaucccugccuagauguuggcuggucagcaauggaucuuaccucaacgaaacccacuucagcgacgauauugaacagcaggccgacaauaugaucacggagcugcuucaaaaagaguauauggaucggcagggcaagacaccgcuggggcucguggaccuguuuguguucuccaccucuuuuuaccugauuagcaucuuccuucaccucguccgcauucccacccauagacacguuaucggaaaaccuugccccaagccucaucggcugaaccacaugggcauuuguuccugcggccuguauaaacaccccggggugccggugaaguggaagcgcugaggacuaguuauaagacugacuagcccgaugggccucccaacgggcccuccuccccuccuugcaccgagauuaauaaaaaaaaaaaaaaaaaaaaaaaaaaaaaaaaaaaaaaaaaaaaaaaaaaaaaaaaaaaaaaaaaaaaaaaaaaaaaaaaaaaaaaaaaaaaaaaaaaaa

SEQ ID NO: 31410 - RNA, 1662 nt, Artificial Sequence
  mRNA product Design i-3 (A100) comprising derived and/or modified sequence from LASV(Lassa virus/H.sapiens-wt/NGA/2018/ISTH_0959;Clade II)__AVV65099__GPCmut6 (opt5)
aggagaaagcuuaccaugggccagaucauuaccuucuuucaagaggugccccacgucaucgaagagguuaugaacauugugcugaucgcccucagccugcuugcuauucugaaggggaucuacaauguggucacaugcggacucuucggccugguguccuuucuucugcucugugggagaucuugcagcacgaccuauaaaggaguuuacgaacugcagacacuggagcucgacauggccucccugaacauguguaugccucuuucuugcaccaagaauaacagccaucacuauaucauggugggcaaugaaacagggcuggagcucacccugacaaacaccuccauuaucaaucauaaauucuguaaccuuucugaugcgcacaagaaaaaucuguacgaccaugcucucaugagcauuaucuccacguuucaccugagcauuccgaacuucaaucaguaugaggccaugucuugcgauuuuaacggaggcaagaucuccguccaguacaaucugagccacgccuaugcuauugacgccgcuaaccauuguggcaccaucgccaauggggugcuccaaacauucaugcggauggcguggggaggcucuuacaucgcccuggauuccgggaagggaagcugggacugcauuaugaccucuuaccaguaucuuaucauucagaacacaaccugggaagaucacugucaguuuucccgccccagcccuaucggcuaccuggggcuccugucccaaagaacgcgggacauuuauaucucucgcagacuucugggaacauucaccuggacacucagcgauuccgagggcaacgaaacccccggcggguacugccugacccgguggaugcugaucgaggcugagcucaaauguuuuggaaauacagccguugcuaagugcaacgaaaaacaugacgaggaguucugcgauaugcugcgccuuuuugacuucuguaagcaggccauuagacggcugaaaacgccugcgcagaugagcauccagcucauuaauaaggccgugaacgcucugaucaaugaucaacuuauuaugaagaaccaucugcgcgacaucaugggcauccccuauugcaauuacucuaaauauugguaccucaaccacaccgucacagggaagaccucccugccuagauguuggcuggugagcaauggaucuuaccucaacgaaacacacuucagcgacgauauugaacagcaggccgacaauaugaucaccgagcugcuucaaaaagaguauauugaucggcagggcaagacgccgcuggggcucguggaccuguuugucuucuccacaucuuuuuaccugaucagcauuuuccuucaccucguuaaaauccccacccaucgccacgugauuggaaagccuugccccaaaccucauagacugaaccacaugggcaucuguuccugcggccuguauaagcaccccggggugccggucaaguggaaacggugaggacuaguuauaagacugacuagcccgaugggccucccaacgggcccuccuccccuccuugcaccgagauuaauaaaaaaaaaaaaaaaaaaaaaaaaaaaaaaaaaaaaaaaaaaaaaaaaaaaaaaaaaaaaaaaaaaaaaaaaaaaaaaaaaaaaaaaaaaaaaaaaaaaa

SEQ ID NO: 31411 - RNA, 1662 nt, Artificial Sequence
  mRNA product Design i-3 (A100) comprising derived and/or modified sequence from LASV(LASV003-NIG-2008;Clade II)__AIT17580__GPCmut6 (opt5)
aggagaaagcuuaccaugggccagaucauuaccuucuuucaagaggugccccacgucaucgaagagguuaugaacauugugcugaucgcccucagccugcuugcuauucugaaggggaucuacaauguggccacaugcggacucuucggccuggucuccuuucuucugcucugugggagaucuugcagcacgaccuauaaaggaguguacgaacugcagacacuggagcucgacauggcgucccugaacauguguaugccucuuucuugcaccaagaauaacagccaucacuauaucaugguuggcaaugaaacagggcuggagcucacccugacaaacaccuccauuaucaaucauaaauucuguaaccuuucugaugcucacaagaaaaaucuguacgaccaugcccucaugagcauuaucuccacguuucaccugagcauuccgaacuucaaucaguaugaggccaugucuugcgauuuuaacggaggcaagaucuccgugcaguacaaucugagccacaccuaugcugucgacgccgcuaaccauuguggcacaauugccaauggggugcuccaaaccuucaugcggauggcguggggaggcucuuacaucgcccuggauuccgggaagggaagcugggacugcaucaugacaucuuaccaguaucuuauuauccagaacaccacgugggaagaucacugucaguuuucccgccccagcccuauuggcuaccuggggcuccugucccaaagaacacgggacaucuauauuucucgcagacuucugggaaccuucacauggacccucagcgauuccgagagcaacgaaacccccggcggcuacugccugacacgguggaugcugaucgaggcugagcucaaauguuuugggaauacggccguugcuaagugcaacgaaaaacaugacgaggaguucugcgauaugcugcgccuuuuugacuucuguaagcaggccaucagacggcugaaagcgccugcccagaugucuauucagcucaucaauaaggcugugaacgcccugauuaaugaucaacuuaucaugaagaaccaucugcgcgacauuaugggaauccccuauugcaauuacuccaaauauugguaccucaaccacaccgucacaggcagaaccagccugccucgguguuggcuggugucuaaugggagcuaccucaacgaaacacacuucuccgacgauaucgaacagcaggcugacaauaugauuaccgagcugcuucaaaaggaguauauggaucgccagggaaaaacgccgcugggccucguggaccuguuugucuucucuaccagcuuuuaccugaucuccauuuuccuucaccucguuaagauccccacacauagacacgugauugggaaaccuugccccaagccucaucggcugaaccacaugggaaucuguagcugcggccuguauaaacaccccggcgugccggucaaguggaagcgcugaggacuaguuauaagacugacuagcccgaugggccucccaacgggcccuccuccccuccuugcaccgagauuaauaaaaaaaaaaaaaaaaaaaaaaaaaaaaaaaaaaaaaaaaaaaaaaaaaaaaaaaaaaaaaaaaaaaaaaaaaaaaaaaaaaaaaaaaaaaaaaaaaaaa

SEQ ID NO: 31412 - RNA, 1662 nt, Artificial Sequence
  mRNA product Design i-3 (A100) comprising derived and/or modified sequence from LASV(LASV035-NIG-2009;Clade II)__AIT17588__GPCmut6 (opt5)
aggagaaagcuuaccaugggccagaucauuaccuucuuucaagaggugccccacgucaucgaagagguuaugaacauugugcugaucgcccucagccugcuugcuauucugaaggggaucuacaauguggccacaugcggacucuucggccuggucuccuuucuucugcucugugggagaucuugcagcacgaccuauaaaggaguguacgaacugcagacacuggagcucgacauggcgucccugaacauguguaugccucuuucuugcaccaagaauaacagccaucacuauaucaugguuggcaaugaaacagggcuggagcucacccugacaaacaccuccauuaucaaucauaaauucuguaaccuuucugaugcucacaagaaaaaucuguacgaccaugcccucaugagcauuaucuccacguuucaccugagcauuccgaacuucaaucaguaugaggccaugucuugcgauuuuaacggaggcaagaucuccgugcaguacaaucugagccacgcuuaugccgucgacgcugccaaccauuguggcaccauugcgaauggggugcuccaaacauucaugcggauggccuggggaggcucuuacaucgcucuggauuccgggaagggaagcugggacugcaucaugaccucuuaccaguaucuuauuauccagaacacaaccugggaagaucacugucaguuuucccgccccagcccuauuggcuaccuggggcuccugucccaaagaacgcgggacaucuauauuucucgcagacuucugggaacauucaccuggacacucagcgauuccgagggcaacgaaacccccggcggguacugccugacccgguggaugcugaucgaggccgagcucaaauguuuuggaaauacagcuguugccaagugcaacgaaaaacaugacgaggaguucugcgauaugcugcgccuuuuugacuucuguaagcaggcgaucagacggcugaaagccccugcucagaugagcauucagcucaucaauaaggccgugaacgcucugauuaaugaucaacuuaucaugaagaaccaucugcgcgacauuaugggcauccccuauugcaauuacucuaaauauugguaccucaaccacacggucaccgggaagacaucccugccuagauguuggcuggugagcaauggaucuuaccucaacgaaacccacuucagcgacgauaucgaacagcaggccgacaauaugauuacagagcugcuucaaaaagaguauaucgaucggcagggcaagaccccgcuggggcucguggaccuguuugucuucuccacgucuuuuuaccugauuagcaucuuccuucaccucguuaaaauucccacacaucgccacgugaucggaaagccuugccccaaaccucauagacugaaccacaugggcauuuguuccugcggccuguauaagcaccccggggugccggucaaguggaaacggugaggacuaguuauaagacugacuagcccgaugggccucccaacgggcccuccuccccuccuugcaccgagauuaauaaaaaaaaaaaaaaaaaaaaaaaaaaaaaaaaaaaaaaaaaaaaaaaaaaaaaaaaaaaaaaaaaaaaaaaaaaaaaaaaaaaaaaaaaaaaaaaaaaaa

SEQ ID NO: 31413 - RNA, 1662 nt, Artificial Sequence
  mRNA product Design i-3 (A100) comprising derived and/or modified sequence from LASV(LASV1000-NIG-2009;Clade II)__AIT17782__GPCmut6 (opt5)
aggagaaagcuuaccaugggccagaucauuaccuucuuucaagaggugccccacgucaucgaagagguuaugaacauugugcugaucgcccucagccugcuugcuauucugaaggggaucuacaauguggccacaugcggacucuucggccuggucuccuuucuucugcucugugggagaucuugcagcacgaccuauaaaggaguguacgaacugcagacacuggagcucgacauggcgucccugaacauguguaugccucuuucuugcaccaagaauaacagccaucacuauaucaugguuggcaaugaaacagggcuggagcucacccugacaaacaccuccauuaucaaucauaaauucuguaaccuuucugaugcucacaagaaaaaucuguacgaccaugcccucaugagcauuaucuccacguuucaccugagcauuccgaacuucaaucaguaugaggccaugucuugcgauuuuaacggaggcaagaucuccgugcaguacaaucugagccacaccuaugcugucgacgccgcuaaccauuguggcacaauugccaauggggugcuccaaaccuucaugcggauggcguggggaggcucuuacaucgcccuggauuccgggaagggaagcugggacugcaucaugacaucuuaccaguaucuuauuauccagaacaccacgugggaagaucacugucaguuuucccgccccagcccuauuggcuaccuggggcuccugucccaaagaacacgggacaucuauauuucucgcagacuucugggaaccuucacauggacccucagcgauuccgagggcaacgaaacccccggcggguacugccugacacgguggaugcugaucgaggcugagcucaaauguuuuggaaauacggccguugcuaagugcaacgaaaaacaugacgaggaguucugcgauaugcugcgccuuuuugacuucuguaagcaggccaucaaaagacugaagaccccugcgcagaugagcauucagcucaucaauaaggccgugaacgcucugauuaaugaucaacuuaucaugaaaaaccaucugcgggacauuaugggcauccccuauugcaauuacucuaaguauugguaccucaaccacacagucaccgggaaaacaucccugccucgcuguuggcuggugagcaauggaucuuaccucaacgaaacccacuucagcgacgauaucgaacagcaggccgacaauaugauuacggagcugcuucaaaaggaguauaucgauagacagggcaaaacaccgcuggggcucguggaccuguuugucuucuccaccucuuuuuaccugauuagcaucuuccuucaccucguuaagauucccacccaucggcacguggugggaaaaccuugccccaagccucaucgccugaaccacaugggcaucuguuccugcggccuguauaagcaccccggggucccggugaaauggaagagaugaggacuaguuauaagacugacuagcccgaugggccucccaacgggcccuccuccccuccuugcaccgagauuaauaaaaaaaaaaaaaaaaaaaaaaaaaaaaaaaaaaaaaaaaaaaaaaaaaaaaaaaaaaaaaaaaaaaaaaaaaaaaaaaaaaaaaaaaaaaaaaaaaaaa

SEQ ID NO: 31414 - RNA, 1662 nt, Artificial Sequence
  mRNA product Design i-3 (A100) comprising derived and/or modified sequence from LASV(LASV221-NIG-2010;Clade II)__AIT17624__GPCmut6 (opt5)
aggagaaagcuuaccaugggccagaucauuaccuucuuucaagaggugccccacgucaucgaagagguuaugaacauugugcugaucgcccucagccugcuugcuauucugaaggggaucuacaauguggccacaugcggacucuucggccuggucuccuuucuucugcucugugggagaucuugcagcacgaccuauaaaggaguguacgaacugcagacacuggagcucgacauggcgucccugaacauguguaugccucuuucuugcaccaagaauaacagccaucacuauaucaugguuggcaaugaaacagggcuggagcucacccugacaaacaccuccauuaucaaucauaaauucuguaaccuuucugaugcucacaagaaaaaucuguacgaccaugcccucaugagcauuaucuccacguuucaccugagcauuccgaacuucaaucaguaugaggccaugucuugcgauuuuaacggaggcaagaucuccgugcaguacaaucugagccacaccuaugcuauugacgccgcuaaccauuguggcacaaucgccaaugggguccuccaaaccuucaugcggauggcguggggaggcucuuacaucgcccuggauuccgggaagggaagcugggacugcauuaugacaucuuaccaguaucuuaucauucagaacaccacgugggaagaucacugucaguuuucccgccccagcccuaucggcuaccuggggcuccugucccaaagaacacgggacauuuauaucucucgcagacuucugggaaccuucacauggacccucagcgauuccgagggcaacgaaacccccggcggguacugccugacacgguggaugcugaucgaggcugagcucaaauguuuuggaaauacggccguggcuaagugcaacgaaaaacaugacgaggaguucugcgauaugcugcgccuuuuugacuucuguaagcaggccauuagacggcugaaaaccccugcgcagaugagcauccagcucauuaauaaggccguuaacgcucugaucaaugaucaacuuauuaugaagaaccaucugcgcgacaucaugggcauccccuauugcaauuacucuaaauauugguaccucaaccacacagugaccgggaagacaucccugccuagauguuggcuggucagcaauggaucuuaccucaacgaaacccacuucagcgacgauauugaacagcaggccgacaauaugaucacggagaugcugcaaaaagaguauauggaucggcagggcaagacaccgcuugggcugguggaccucuuuguguucuccaccucuuuuuaccugauuagcaucuuccugcaccuugucaaaauucccacccaucgccacguuaucggaaagccuugccccaaaccucauagacucaaccacaugggcauuuguuccugcggccuguauaagcaccccggggugccggugaaguggaaacggugaggacuaguuauaagacugacuagcccgaugggccucccaacgggcccuccuccccuccuugcaccgagauuaauaaaaaaaaaaaaaaaaaaaaaaaaaaaaaaaaaaaaaaaaaaaaaaaaaaaaaaaaaaaaaaaaaaaaaaaaaaaaaaaaaaaaaaaaaaaaaaaaaaaa

SEQ ID NO: 31415 - RNA, 1662 nt, Artificial Sequence
  mRNA product Design i-3 (A100) comprising derived and/or modified sequence from LASV(LASV237-NIG-2010;Clade II)__AIT17638__GPCmut6 (opt5)
aggagaaagcuuaccaugggccagaucauuaccuucuuucaagaggugccccacgucaucgaagagguuaugaacauugugcugaucgcccucagccugcuugcuauucugaaggggaucuacaauguggccacaugcggacucuucggccuggucuccuuucuucugcucugugggagaucuugcagcacgaccuauaaaggaguguacgaacugcagacacuggagcucgacauggcgucccugaacauguguaugccucuuucuugcaccaagaauaacagccaucacuauaucaugguuggcaaugaaacagggcuggagcucacccugacaaacaccuccauuaucaaucauaaauucuguaaccuuucugaugcucacaagaaagaccuguacgaucaugcccucaugagcauuaucuccacguuucaccugagcauuccgaauuucaaccaguaugaggccaugucuugcgacuuuaauggaggcaagaucuccgugcaguacaaccugagccacaccuaugcugucgaugccgcuaaucauuguggcacaauugccaacggggugcuccaaaccuucaugcggauggcguggggaggcucuuacaucgcccuggacuccgggaagggaagcugggauugcaucaugacaucuuaccaguaucuuauuauccagaauaccacgugggaagaccacugucaguuuucccgccccagcccuauuggcuaccuggggcuccugucccaaagaacacgggauaucuauauuucucgcagacuucugggaaccuucacauggacccucagcgacuccgagggcaacgaaacccccggcggguacugccugacacgguggaugcugaucgaggcugagcucaaauguuuuggaaacacggccguugcuaagugcaaugaaaaacaugaugaggaguucugcgacaugcugcgccuuuuugauuucuguaagcaggccaucagacggcugaaaaccccugcgcagaugagcauucagcucaucaacaaggccgugaaugcucugauuaacgaccaacuuaucaugaagaaucaucugcgcgacauuaugggcauccccuauugcaacuacucuaaauauugguaccucaaucacacagucaccgggaagacaucccugccuagauguuggcuggugagcaacggaucuuaccucaaugaaacccacuucagcgaugacaucgaacagcaggccgauaacaugauuacggagcugcuucaaaaagaguauauggaccggcagggcaagacaccgcuggggcucguggaucuguuugucuucuccaccucuuuuuaccugaucagcauuuuccuucaccucaucaaaauucccacccaucgccacaucacaggaaagccuugccccaaaccucauagacugaaucacaugggcauuuguuccugcggccuguauaagcaccccgggguuccggugaaguggaaacggugaggacuaguuauaagacugacuagcccgaugggccucccaacgggcccuccuccccuccuugcaccgagauuaauaaaaaaaaaaaaaaaaaaaaaaaaaaaaaaaaaaaaaaaaaaaaaaaaaaaaaaaaaaaaaaaaaaaaaaaaaaaaaaaaaaaaaaaaaaaaaaaaaaaa

SEQ ID NO: 31416 - RNA, 1662 nt, Artificial Sequence
  mRNA product Design i-3 (A100) comprising derived and/or modified sequence from LASV(LASV253-NIG-2011;Clade II)__AIT17670__GPCmut6 (opt5)
aggagaaagcuuaccaugggccagaucauuaccuucuuucaagaggugccccacgucaucgaagagguuaugaacauugugcugaucgcccucagccugcuugcuauucugaaggggaucuacaauguggccacaugcggacucuucggccuggucuccuuucuucugcucugugggagaucuugcagcacgaccuauaaaggaguguacgaacugcagacacuggagcucgacauggcgucccugaacauguguaugccucuuucuugcaccaagaauaacagccaucacuauaucaugguuggcaaugaaacagggcuggagcucacccugacaaacaccuccauuaucaaucauaaauucuguaaccuuucugaugcucacaagaaaaaucuguacgaccaugcccucaugagcauuaucuccacguuucaccugagcauuccgaacuucaaucaguaugaggccaugucuugcgauuuuaacggaggcaagaucuccgugcaguacaaucugagccacaccuaugcugucgacgccgcuaaccauuguggcacaauugccaauggggugcuccaaaccuucaugcggauggcguggggaggcucuuacaucgcccuggauuccgggaagggaagcugggacugcaucaugacaucuuaccaguaucuuauuauccagaacaccacgugggaagaucacugucaguuuucccgccccagcccuauuggcuaccuggggcuccugucccaaagaacacgggacaucuauauuucucgcagacuucugggaaccuucacauggacccucagcgauuccgagggcaacgaaacccccggcggguacugccugacacgguggaugcugaucgaggcugagcucaaauguuuuggaaauacggccguugcuaagugcaacgaaaaacaugacgaggaguucugcgauaugcugcgccuuuuugacuucuguaagcaggccaucagacggcugaaagcgccugcccagaugagcauucagcucaucaauaaggcugugaacgcccugauuaaugaucaacuuaucaugaagaaccaucugcgcgacauuaugggcauccccuauugcaauuacucuaaauauugguaccucaaccacaccgucacagggagaaccucccugccucgguguuggcuggugagcaauggaucuuaccucaacgaaacacacuucagcgacgauaucgaacagcaggcugacaauaugauuaccgagcugcuucaaaaggaguauaucgaucgccagggcaaaacgccgcuggggcucguggaccuguuugucuucuccacaucuuuuuaccugauuagcaucuuccuucaccucguuaagauucccacccauagacacaucauuggaaaaccuugccccaagccucaucggcugaaccacaugggcaucuguuccugcggccuguauaaacaccccggggugccggugaaguggaagcgcugaggacuaguuauaagacugacuagcccgaugggccucccaacgggcccuccuccccuccuugcaccgagauuaauaaaaaaaaaaaaaaaaaaaaaaaaaaaaaaaaaaaaaaaaaaaaaaaaaaaaaaaaaaaaaaaaaaaaaaaaaaaaaaaaaaaaaaaaaaaaaaaaaaaa

SEQ ID NO: 31417 - RNA, 1662 nt, Artificial Sequence
  mRNA product Design i-3 (A100) comprising derived and/or modified sequence from LASV(LASV254-NIG-2011;Clade II)__AIT17674__GPCmut6 (opt5)
aggagaaagcuuaccaugggccagaucauuaccuucuuucaagaggugccccacgucaucgaagagguuaugaacauugugcugaucgcccucagccugcuugcuauucugaaggggaucuacaauguggccacaugcggacucuucggccuggucuccuuucuucugcucugugggagaucuugcagcacgaccuauaaaggaguguacgaacugcagacacuggagcucgacaugaccaaccugaauauguguaugccucuuuccugcacaaagaacaauucucaucacuauaucaugguuggcaacgaaaccgggcuggagcucacacugaccaauacgagcauuaucaaccauaaauucuguaaucuuuccgaugcgcacaagaaaaaccuguacaaucaugcucucaugucuauuaucagcaccuuucaccuguccauuccgaacuucaaucaguaugaggccaugagcugcgacuuuaacggaggcaagaucucugugcaguacaaucugucccacagcuaugccgucgaugcugccaaccauuguggcacaauugcuaacggggugcuccaaaccuucaugcggauggccuggggaggcucuuacaucgcgcuggacuccgggaagggaaauugggauugcaucaugacaagcuaccaguaucuuauuauccagaacaccacgugggaagaccacugucaguuuucucgccccuccccuauuggcuaccuggggcuccugagccaaagaacacgggauaucuauauuucccgcagacuucugggaaccuucacauggacccucucugacagcgagggcaaugaaacccccggcggguacugccugacacgguggaugcugaucgaggccgagcucaaauguuuuggaaacacggcuguugccaagugcaaugaaaaacaugaugaggaguucugcgacaugcugcgccuuuuugauuucuguaagcaggcuaucagacggcugaaaaccccugcccaggcgaacauucagcucaucaauaaggccgugaacgcucugauuaaugaccaacuuaucaugaagaaccaucugcgcgauauuaugggcauccccuauugcaauuacuccaaauauugguaccucaaccacacagucaccgggaagacaagccugccuagauguuggcuggugucuaauggauccuaccucaacgaaacccacuucagcgacgacaucgaacagcaggccgauaauaugauuacggagcugcuucaaaaagaguauauggaccggcagggcaagacaccgcuggggcucguggaucuguuugucuucucuaccagcuuuuaccugaucuccauuuuccuucaccucguuaaaauccccacccaucgccacgugauuggaaagccuugccccaaaccucauagacugaaccacaugggcaucuguucuugcggccuguauaagcaccccggggugccggucaaguggaaacggugaggacuaguuauaagacugacuagcccgaugggccucccaacgggcccuccuccccuccuugcaccgagauuaauaaaaaaaaaaaaaaaaaaaaaaaaaaaaaaaaaaaaaaaaaaaaaaaaaaaaaaaaaaaaaaaaaaaaaaaaaaaaaaaaaaaaaaaaaaaaaaaaaaaa

SEQ ID NO: 31418 - RNA, 1662 nt, Artificial Sequence
  mRNA product Design i-3 (A100) comprising derived and/or modified sequence from LASV(Nig08-A19;Clade III)__ADU56618__GPCmut6 (opt5)
aggagaaagcuuaccaugggccagaucgugaccuucuuucaagaggucccccacguuauugaagaggugaugaacaucgugcugauugcccucagcauccuggcuauucuuaaggggcuguacaauaucgccacaugcggacucaucggccuggucacguuccuucugcucuccgggagaucuuguagcaugaccuauaaaggaguguacgaacugcagacacuggagcucaacaugaauacccugaacaugugcaugccucuuuccuguacaaagaauaacucucaucacuauauuaugguuggcaaugaaaccgggcuggagcucacacugaccaacacgagccuucugcaucacaaauuuugcaaucucuccgacgcgcauaagaaaaaccuguacgaucacacccugaugucuaucauuagcacauuccaccucuccaucccgaauuuuaaccaguaugaggcuaugagcugugacuucaauggaggcaagauuaccgugcaguacaaccugucucauuccuaugccaucgaugccgcuaaucacugcggcacagucgccaacggggugcuucaaaccuuuaugcggauggcuuggggaggcagcuacauugcccuggacucugggcgcggaaagugggauuguaucaugacguccuaccaguaucucaucauucagaacacaaccugggaagaccauugccaguucagcagacccucuccuaucggcuaccuggggcuucugucccaacggacacgcgauauuuauaucagcagacggcuccugggaaccuuuaccuggacacuguccgacucugagggcaaugaaacgcccggcggguacugucucacccgcuggaugcugauugaggcggagcuuaaaugcuucggaaacacagccguugcuaaguguaaugaaaaacacgaugaggaauuuugcgacaugcugagacucuucgauuuuugcaagcaggccauccggcgccugaaagcuccugcccagaugagcauccagcuuauuaacaaggcggugaaugcccugaucaacgaccaacucauuaugaagaaucaccugagagauaucaugggcauucccuauuguaacuacuccaaauauugguaccugaaucauaccagcacagggcggaccucucucccucgcugcuggcuggucuccaacggaagcuaccuuaaugagacgcacuucucugacgacaucgaacagcaggcugauaacaugaucacagagaugcugcaaaaggaguaucucgacagacagggcaaaaccccgcuggggcugguggaucuuuucguguuuagcaccuccuucuaccucauuucuaucuuucugcaucuggucaagauucccacacaccggcauaucguuggaaaaccuugucccaagccucaccgccucaaucacaugggcauuugcagcuguggccuguauaaacagcccggggugccggugagauggaagcggugaggacuaguuauaagacugacuagcccgaugggccucccaacgggcccuccuccccuccuugcaccgagauuaauaaaaaaaaaaaaaaaaaaaaaaaaaaaaaaaaaaaaaaaaaaaaaaaaaaaaaaaaaaaaaaaaaaaaaaaaaaaaaaaaaaaaaaaaaaaaaaaaaaaa

SEQ ID NO: 31419 - RNA, 1665 nt, Artificial Sequence
  mRNA product Design i-3 (A100) comprising derived and/or modified sequence from LASV(G1180-SLE-2010;Clade IV)__AIT17168__GPCmut6 (opt5)
aggagaaagcuuaccaugggccagaucgugaccuucuuucaagaggucccccacguuauugaagaggugaugaacaucgugcugauugcccucagcauccuggcuguccuuaaggggcuguacaauuucgccacaugcggacucgugggccugcuuacguuucugcuccugugugggagauccugcaccgcgucucgguauaaaggaguuuacgaacugcagacacucgagcugaacauggaaacccuuaauauguguaugccucugagcugcacaaagaacaauucccaucacuauauuauggugggcaacgagaccgggcucgagcugacacuuaccaauacgucuaucaucaaccauaaauucuguaaucugagcgacgcucacaagaaaaaccucuacgaucaugcccugauguccauuaucucuaccuuucaccugagcauuccgaauuucaaccaguaugaagccauguccugcgacuuuaauggaggcaagaucagcguccaguacaaccucucucacuccuaugcuggcgaugccgcuaaucauugugggacaguggccaacggaguucugcaaaccuucaugcgcauggcguggggcgggagcuacauugcccuugacucuggacacggcuccugggauugcaucaugacaagcuaccaguaucugauuauccagaacaccacgugggaggaccauugucaguuuucuagacccuccccuaucggguaccucggacugcuuagccaacggacacgcgauauuuauaucuccagacggcugcucggcaccuucacauggacccugucugacagcgaaggcaaggauacccccgggggauacugccugacacgcuggaugcucauugaggcugagcugaaauguuuuggcaauacggccguggcuaagugcaacgaaaaacacgacgaggaguucugcgauaugcuuagacuguuugacuucuguaagcaggccauccagcggcucaaagcgccugcccagauguccauucaacugaucaauaaggcugucaacgcccuuaucaaugaucagcugauuaugaagaaccaccuccgcgacaucauggggauucccuauugcaauuacagcaaauauugguaccugaaccauaccacaaccggaaagacaucucugccuaaauguuggcucguguccaauggcagcuaccugaacgaaacccacuucucugacgauaucgaacagcaagcugacaauaugauuacggagaugcuucagaaggaguauauggaaagacaggggaaaacaccgcugggacucguggaucuguuugucuucagcaccuccuuuuaccugaucucuaucuuccuucaucucguuaagauucccacccaccggcauaucgugggcaaaagcugcccuaagccccaccgccugaaccacaugggcauuuguuccugcgggcuguauaagcagccuggagugcccgucaaauggaagagaugaggacuaguuauaagacugacuagcccgaugggccucccaacgggcccuccuccccuccuugcaccgagauuaauaaaaaaaaaaaaaaaaaaaaaaaaaaaaaaaaaaaaaaaaaaaaaaaaaaaaaaaaaaaaaaaaaaaaaaaaaaaaaaaaaaaaaaaaaaaaaaaaaaaa

SEQ ID NO: 31420 - RNA, 1665 nt, Artificial Sequence
  mRNA product Design i-3 (A100) comprising derived and/or modified sequence from LASV(G1442-SLE-2011;Clade IV)__AIT17180__GPCmut6 (opt5)
aggagaaagcuuaccaugggccagaucgugaccuucuuucaagaggucccccacguuauugaagaggugaugaacaucgugcugauugcccucagcauccuggcuguccuuaaggggcuguacaauguggccacaugcggacucauuggccugguuacguuccuucugcucugugggagauccugcaccacaacccuguauaaaggaguguacgaacugcagacacucgagcugaacauggaaacccuuaauauguguaugccucugucuugcacaaagaacaauagccaucacuauauccgggucggcaacgagaccgggcucgagcugacgcuuaccaauacauccaucauuaaccauaaauuuuguaaucugucugacgcgcacaagaaaaaccucuacgaucaugcucugaugagcaucauuuccaccuuccaccugucuaucccgaauuuuaaccaguaugaagccaugagcugcgacuucaauggaggcaagauuuccgugcaguacaaccucagccacucuuaugccggcgaugcugccaaucauugugggacaguugcuaacggagugcugcaaaccuuuaugcgcauggccuggggcggguccuacaucgcgcuugacagcggaagaggcaacugggauugcauuaugacgucuuaccaguaucugaucauccagaauacaaccugggacgaucacugucaguucucccggcccagcccuauuggguaccucggacugcuuucucaacgcacaagagacgucuauaucucccggcgccugcucggcaccuuuaccuggacacugagcgauuccgagggcaaggacacgcccgggggauacugccugaccagauggaugcucauugaagccgagcugaaauguuucggcaacacagcuguggccaagugcaaugagaaacaugaugaagaguuuugcgacaugcuucggcuguucgauuuuuguaagcaggcuauccagcgccucaaagccccugcgcagaugucuauucaacugaucaacaaggccgugaaugcucuuaucaacgaccagcugauuaugaagaaucaccucagagacaucauggggauucccuauugcaacuacagcaaauauugguaccugaauaacaccgccacaggaaagaccucccugccuaaauguuggcucaucagcaauggcucuuaccugaacgaaacgcacuucuccgaugacauugagcaggaagcugauaauaugaucacagagaugcuucaaaaggaguauauggaacggcaggggaaaaccccgcugggacucgucgaccuguucguuuuuagcaccucuuucuaccugaucagcauuuuucuucaucucgugaagauccccacacaccgccauauugugggcaaauccugcccuaagccccacagacugaaccauaugggcaucuguucuugcgggcuguauaagcagccuggaguccccgugcgguggaaacgcugaggacuaguuauaagacugacuagcccgaugggccucccaacgggcccuccuccccuccuugcaccgagauuaauaaaaaaaaaaaaaaaaaaaaaaaaaaaaaaaaaaaaaaaaaaaaaaaaaaaaaaaaaaaaaaaaaaaaaaaaaaaaaaaaaaaaaaaaaaaaaaaaaaaa

SEQ ID NO: 31421 - RNA, 1665 nt, Artificial Sequence
  mRNA product Design i-3 (A100) comprising derived and/or modified sequence from LASV(G3010-SLE-2013;Clade IV)__AIT17344__GPCmut6 (opt5)
aggagaaagcuuaccaugggccagaucgugaccuucuuucaagaggucccccacguuauugaagaggugaugaacaucgugcugauugcccucagcauccuggcuguccuuaaggggcuguacaauuucgccacaugcggacucgugggccugguuacguuucuucugcucugugggagauccugcaccacaucucuguauaaaggaguguacgaacugcagacccucgagcugaacauggaaacacuuaauauguguaugccucugagcugcaccaagaacaauucccaucacuauauuauggucggcaacgagacagggcucgagcugacccuuacgaauaccucuaucaucaaccauaaauucuguaaucugagcgacgcgcacaagaaaaaccucuacaaucaugcucugauguccauuaucucuacauuucaccugagcauuccgaacuucaaucaguaugaagccauguccugcgauuuuaacggaggcaagaucagcgugcaguacaaucucucucacuccuaugccggcgacgcugccagccauugugggaccguugcuaacggagugcugcaaacauucaugcggauggccuggggcgggucuuacauugcgcuugauuccggauacggcaagugggacugcaucaugaccagcuaucaguaccugauuauccagaacacgacaugggaggaucacugucaguuuucucgccccuccccuaucggguaucucggacugcuuagccaaagaacccgggacauuuacaucucccgcagacugcucggcacauucaccuggacccugucugauagcgaaggcaaagacacacccgggggauauugccugacgcgguggaugcucauugaggccgagcugaaguguuuuggcaauaccgcugucgccaaaugcaacgaaaagcaugaugaggaguucugcgacaugcuucgccuguuugauuucuguaaacaggcuauccagagacucaagaccccugcccagauguccauucaacugaucaauaaggcggugaacgcccuuaucaaugaccagcugauuaugaaaaaccaccuccgggauaucauggggauucccuacugcaauuauagcaaguacugguaccugaaccacacaacaaccggaaaaacgucucugccuaaguguuggcucguguccaauggcagcuaucugaacgaaacacauuucucugacgacaucgaacagcaagcugauaauaugauuaccgagaugcuucagaaagaguacauggaacgccaggggaagaccccgcugggacucgucgaccuguuuguuuucagcacauccuuuuaucugaucucuaucuuccuucaccucgugaaaauucccacccauagacacaucgugggcaagagcugcccuaagccccaucggcugaaccacaugggcauuuguuccugcgggcuguacaaacagccuggaguccccgugcgcuggaagagaugaggacuaguuauaagacugacuagcccgaugggccucccaacgggcccuccuccccuccuugcaccgagauuaauaaaaaaaaaaaaaaaaaaaaaaaaaaaaaaaaaaaaaaaaaaaaaaaaaaaaaaaaaaaaaaaaaaaaaaaaaaaaaaaaaaaaaaaaaaaaaaaaaaaa

SEQ ID NO: 31422 - RNA, 1665 nt, Artificial Sequence
  mRNA product Design i-3 (A100) comprising derived and/or modified sequence from LASV(G502-SLE-2009;Clade IV)__AIT17126__GPCmut6 (opt5)
aggagaaagcuuaccaugggccagaucgugaccuucuuucaagaggucccccacguuauugaagaggugaugaacaucgugcugauugcccucagcauccuggcuguccuuaaggggcuguacaauuucgccacaugcggacucgugggccugcuuacguuucugcuccugugugggagauccugcaccacaggacuguauaaaggcguuuacgaacuccagacccuggagcuuaacauggaaacacugaauauguguaugccucucucuugcaccaagaacaauagccaucacuauauuaugguggggaacgagacaggacuggagcuuacccugacgaauaccuccaucaucaaccauaaauucuguaaucucucugacgcgcacaagaaaaaccuguacgaucaugcucugaugagcauuaucuccacauuucaccucucuauuccgaauuucaaccaguaugaagccaugagcugcgacuuuaauggcggcaagaucuccguccaguacaaccugagccacucuuaugccggggaugcugccgaccauuguggaaccguggcuaauggcguucuucaaacauucaugcggauggccuggggaggguccuacauugcgcuggauagcggccgcgggagaugggacugcaucaugaccucuuaccaguaucucauuauccagaacacgacaugggaggaucacugucaguuuucccggcccagcccuaucggauaccugggccuucugucucaacgcaccagagacauuuauaucucccggcgccuccugggcacauucaccuggacccugagcgauuccgaagggaaggacacacccggaggcuacugccucacgagauggaugcugauugaggccgagcuuaaauguuuugggaacaccgcuguggccaagugcaaugaaaaacaugaugaggaguucugcgacaugcugcggcucuuugauuucuguaagcaggcuauccagcgccugaaagccccugcgcagaugucuauucaacuuaucaacaaggccgucaaugcucugaucaacgaccagcucgugaugaagaaucaccugagagacauuaugggaauccccuauugcaacuacagccgguauugguaccugaaucacacaaccacaggccgcaccucccucccuaaauguuggcuggugagcaacgggucuuaccuuaaugaaacgcauuucuccgaugacauugaacagcaagccgauaacaugaucacagagaugcugcagaaggaguauauggaaagacagggaaaaaccccgcucggccuggucgaccuguuuguuuucagcaccucuuuuuaccuuauuagcaucuuccuccaccuggugaagauccccacacaucggcacauugugggcaaauccugcccuaagccccaucgccugaaucacauggggaucuguucuugcggacucuauaaacagccuggcguccccgugaaguggaagagaugaggacuaguuauaagacugacuagcccgaugggccucccaacgggcccuccuccccuccuugcaccgagauuaauaaaaaaaaaaaaaaaaaaaaaaaaaaaaaaaaaaaaaaaaaaaaaaaaaaaaaaaaaaaaaaaaaaaaaaaaaaaaaaaaaaaaaaaaaaaaaaaaaaaa

SEQ ID NO: 31423 - RNA, 1665 nt, Artificial Sequence
  mRNA product Design i-3 (A100) comprising derived and/or modified sequence from LASV(G733-SLE-2010;Clade IV)__AIT17154__GPCmut6 (opt5)
aggagaaagcuuaccaugggccagaucgugaccuucuuucaagaggucccccacguuauugaagaggugaugaacaucgugcugauugcccucagcauccuggcuguccuuaaggggcuguacaauuucgccacaugcggaauugugggccucguuuccuuucugcuucugugugggagaucuugcacgaccagccucuauaaaggaguguacgaacugcagacacuggagcucaacauggaaacccugaauauguguaugccucuuuccugcacaaagaacaauucucaucacuauaucauggucggcaacgagaccgggcuggagcucacacugaccaauacgagcaucauuaaccauaaauucuguaaucuuuccgacgcgcacaagaaaaaccuguacgaucaugcucucaugucuaucauuagcaccuuucaccuguccaucccgaauuucaaccaguaugaagccaugagcugcgacuuuaauggaggcaagauuucugugcaguacaaccugucccacagcuaugccggcgaugcugccaaucauugugggacaaucgcuaacggaguucuccaaaccuucaugcggauggccuggggcgggucuuacauugcgcuggacuccggacgcgauagaugggacugcaucaugacaagcuaccaguaucuuaucauucagaacaccacgugggaggaucacugucaguuuucucggcccuccccuaucggcuaccuggggcuccugagccaacgcacaagagacauuuauaucucccggcgccuucugggaaccuucacauggacccucucugauagcgaaggcaaggacacccccggcggguacugccugacaagauggaugcugauugaggccgagcucaaauguuuuggaaauacggcuguggccaagugcaacgaaaaacaugaugaggaguucugcgacaugcugcggcuuuuugauuucuguaagcaggcuauccagcgccugaaagccccugcgcagauguccauccaacucauuaauaaggccgucaacgcucugaucaaugaccagcuuauuaugaagaaccaccugagagacaucaugggcauucccuauugcaauuacagcaaauauugguaccucaaccacaccacaaccgggaagacaucucugccuaaauguuggcugguguccaauggaagcuaccucaacgaaacccauuucucugaugacaucgaacagcaagccgauaauaugaucacggagaugcugcagaaggaguauauggaacggcagggcaaaacaccgcuugggcugguggaccucuuugucuucagcaccuccuuuuaccugauuucuaucuuccugcaccuuguuaagauucccacccaucgccacguggugggaaaaagcugcccuaagccccauagacucaaccacaugggcaucuguuccugcggccuguaugggcagccuggaguccccgugaaguggaaacggugaggacuaguuauaagacugacuagcccgaugggccucccaacgggcccuccuccccuccuugcaccgagauuaauaaaaaaaaaaaaaaaaaaaaaaaaaaaaaaaaaaaaaaaaaaaaaaaaaaaaaaaaaaaaaaaaaaaaaaaaaaaaaaaaaaaaaaaaaaaaaaaaaaaa

SEQ ID NO: 31424 - RNA, 1665 nt, Artificial Sequence
  mRNA product Design i-3 (A100) comprising derived and/or modified sequence from MOPV/LASV reassortant(IGS-1;Clade IV)__AFY05576__GPCmut6 (opt5)
aggagaaagcuuaccaugggccagaucgugaccuucuuucaagaggucccccacguuauugaagaggugaugaacaucgugcugauugcccucagcguccuggcugugcuuaaggggcuguacaauuucgccacaugcggacucguuggccuggugacguuucuucugcucugugggagauccugcaccacaucucuguauaaaggagucuacgaacugcagacccucgagcugaacauggaaacacuuaauauguguaugccucugagcugcaccaagaacaauucccaucacuauaucauggugggcaacgagacagggcucgagcugacccuuacgaauaccucuauuaucaaccauaaauucuguaaucugagcgacgcgcacaagaaaaaccucuacgaucaugcucugauguccaucauuucuacauuucaccugagcaucccgaauuucaaccaguaugaagccauguccugcgacuuuaauggaggcaagauuagcguucaguacaaccucucucacuccuaugccggcgaugcugccaaucauugugggaccguggcuaacggaguccugcaaacauucaugcggauggccuggggcgggagcuacaucgcgcuugacucuggacgcggcaacugggauugcauuaugaccuccuaccaguaucugaucauucagaauacgacaugggaggaccacugucaguuuagcagacccucuccuaucggguaccucggacugcuuucccaacggacccgcgauaucuauauuagcagacggcugcucggcacauucaccuggacccuguccgacucugaaggcgaggauacacccgggggauacugccugacgcgcuggaugcucaucgaggccgaacugaaguguuuuggcaacaccgcuguggccaaaugcaaugagaagcaugacgaagaguucugcgauaugcuuagacuguuugacuucuguaaacaggcuauucagcggcucaaggccccugcgcagaugagcauccaacugauuaacaaagccgugaaugcucuuaucaacgaucagcugaucaugaagaaucaccuccgcgacauuauggggauccccuauugcaacuacuccaaguauugguaccugaaucacacaaccacaggaagaaccagccugccuaaauguuggcucgucucuaacggcuccuaccugaaugaaacgcauuucagcgacgauauugagcagcaagccgacaacaugaucacagagaugcuucagaaggaauauauggagcggcaggggaaaaccccgcugggacucguugaucuguuuguguucucuaccagcuuuuaccugauuuccaucuuccuucaccucgugaagauccccacacaucgccacauugucggcaaaucuugcccuaagccccauagacugaaucacaugggcaucuguagcugcgggcuguauaaacagccuggagugcccguuaaguggaagcggugaggacuaguuauaagacugacuagcccgaugggccucccaacgggcccuccuccccuccuugcaccgagauuaauaaaaaaaaaaaaaaaaaaaaaaaaaaaaaaaaaaaaaaaaaaaaaaaaaaaaaaaaaaaaaaaaaaaaaaaaaaaaaaaaaaaaaaaaaaaaaaaaaaaa

SEQ ID NO: 31425 - RNA, 1665 nt, Artificial Sequence
  mRNA product Design i-3 (A100) comprising derived and/or modified sequence from LASV(LM765-SLE-2012;Clade IV)__AIT17814__GPCmut6 (opt5)
aggagaaagcuuaccaugggccagaucgugaccuucuuucaagaggucccccacguuauugaagaggugaugaacaucgugcugauugcccucagcauccuggcuguccuuaaggggcuguacaauuucgccacaugcggacucgugggccugguuacguuucuucugcucugugggagauccugcaccacaucucuguauaaaggaguguacgaacugcagacccucgagcugaacauggaaacacuuaauauguguaugccucugagcugcaccaagaacaauucccaucacuauauuauggucggcaacgagacagggcucgagcugacccuuacgaauaccucuaucaucgaccauaaauucuguaaccugagcgaugcgcaccggaagaaucucuacgaccaugcucugauguccauuaucucuacauuucaccugagcauuccgaacuucaaucaguaugaagccauguccugcgauuuuaacggaggcaaaaucagcgugcaguacaaucucucucacuccuaugccaaggacgcugccgaucauuguggcaccguugcuaacggggugcugcaaacauucaugcgcauggccuggggaggcagcuacauugcgcuugacucugggagaggacggugggauugcaucaugaccuccuaccaguaucugauuauccagaauacgacaugggaggaccacugucaguuuagccgccccucuccuaucggcuaccucgggcugcuuucccaaagaacccgggauauuuauaucagccgcagacugcucggaacauucaccuggacccuguccgacucugaaggcaaggauacacccggcggguacugccugacgcgguggaugcucauugaggccgagcugaaauguuuuggaaacaccgcugucgccaagugcaacgaaaaacaugacgaggaguucugcgauaugcuucgccuguuugacuucuguaagcaggcuauccagagacucaaagccccugcgcagaugagcauucaacugaucaauaaggccgugaacgcucuuaucaaugaccagcugauuaugaagaaccaccuccgggauaucaugggcauucccuauugcaauuacuccaaauauugguaccugaaccacacaaccacagggaagaccagccugccuaaauguuggcucgugucuaauggauccuaccugaacgaaacgcauuucagcgacgauaucgaacagcaagccgacaauaugauuacagagaugcuucagaaggaguauauggaacgccagggcaaaaccccgcuggggcucgucgaucuguuuguuuucucuaccagcuuuuaccugaucuccaucuuccuucaccucgugaagauucccacacauagacacaucgugggaaaaccuugccccaagccucaucggcugaaccacaugggcauuuguucuugcggccuguauaagcagcccggggucccggugaaauggaagcgcugaggacuaguuauaagacugacuagcccgaugggccucccaacgggcccuccuccccuccuugcaccgagauuaauaaaaaaaaaaaaaaaaaaaaaaaaaaaaaaaaaaaaaaaaaaaaaaaaaaaaaaaaaaaaaaaaaaaaaaaaaaaaaaaaaaaaaaaaaaaaaaaaaaaa

SEQ ID NO: 31426 - RNA, 1665 nt, Artificial Sequence
  mRNA product Design i-3 (A100) comprising derived and/or modified sequence from LASV(LM776-SLE-2012;Clade IV)__AIT17824__GPCmut6 (opt5)
aggagaaagcuuaccaugggccagaucgugaccuucuuucaagaggucccccacguuauugaagaggugaugaacaucgugcugauugcccucagcauccuggcuguccuuaaggggcuguacaauuucgccacaugcggacucgugggccugguuacguuucuucugcucugugggagauccugcaccacaucuguguauaaaggagucuacgaacugcagacccuggagcucaacauggaaacacugaauauguguaugccucuuagcugcaccaagaacaauucccaucacuauauuauggugggcaacgagacagggcuggagcucacccugacgaauaccucuaucaucaaccauaaauucuguaaucuuagcgacgcgcacaagaaaaaccuguacgaucaugcucucauguccauuaucucuacauuucaccugagcauuccgaauuucaaccaguaugaagccauguccugcgacuuuaauggaggcaagaucagcguucaguacaaccugucucacuccuaugccggcgaugcugccaaucauugugggaccguggcuaacggaguccuccaaacauucaugcggauggccuggggcgggagcuacauugcgcuggacucuggacacggcaagugggauugcaucaugaccuccuaccaguaucuuauuauccagaacacgacaugggaggaccauugucaguuuagccgccccucuccuaucggguaccugggacuccugucccaaagaacccgggauauuuauaucagccgcagacuucugggcacauucaccuggacccucuccgacucugaaggcaaagauacacccgggggauacugccugacgcgguggaugcugauugaggccgagcucaaguguuuuggcaauaccgcuguggccaaaugcaacgaaaagcacgacgaggaguucugcgauaugcugcgccuuuuugacuucuguaaacaggcuauccagagacugaaggccccugcgcagaugagcauucaacucaucaauaaggccgugaacgcucugaucaaugaucagcuuauuaugaaaaaccaucugcgggacaucauggggauucccuauugcaauuacuccaaguauugguaccucaaccacacaaccacaggaaaaaccagccugccuaaguguuggcuggucucuaauggcuccuaccucaacgaaacgcacuucagcgacgauaucgaacagcaagccgacaauaugauuacagagaugcugcagaaagaguauauggaacgccaggggaagaccccgcuuggacugguugaucucuuuguguucucuaccagcuuuuaccugaucuccaucuuccugcaucuugugaaaauucccacacacagacauaucgucggcaagucuugcccuaagccccaccggcucaaccacaugggcauuuguagcugcgggcuguauaaacagccuggagugcccguucgcuggaagagaugaggacuaguuauaagacugacuagcccgaugggccucccaacgggcccuccuccccuccuugcaccgagauuaauaaaaaaaaaaaaaaaaaaaaaaaaaaaaaaaaaaaaaaaaaaaaaaaaaaaaaaaaaaaaaaaaaaaaaaaaaaaaaaaaaaaaaaaaaaaaaaaaaaaa

SEQ ID NO: 31427 - RNA, 1665 nt, Artificial Sequence
  mRNA product Design i-3 (A100) comprising derived and/or modified sequence from LASV(Mad39;Clade IV)__ANH09722__GPCmut6 (opt5)
aggagaaagcuuaccaugggccagaucgugaccuucuuucaagaggucccccacguuauugaagaggugaugaacaucgugcugauugcccucagcauccuggcuguccuuaaggggcuguacaauguggccacaugcggacucauuggccugguuacguuccuucugcucugugggagauccugcaccacaacccuguauaaaggaguguacgaacugcaggcgcucgagcugaacauggaaacacuuaauauguguaugccucugucuugcaccaagaacaauagccaucacuauauccgggucggcaacgagacagggcucgagcugacccuuacgaauaccucccugaucaaccauaaauuuuguaaucucucugacgcucacaagaaaaaccuguacgaucaugcccugaugagcauuaucuccacauuccaccucucuauuccgaauuuuaaccaguaugaagccaugagcugcgacuucaaugauggaaagaucuccgugcaguacaaccugagccacaccuaugcuggcgacacagccaaucauuguggcaccguugcuaacggggugcuucaaacguuuaugcgcauggccuggggaggcucuuacauugcgcuggauuccgggagaggaggcugggacugcaucaugacaagcuaccaguaucucauuauccagaacaccacaugggaggaucacugucaguucucucggcccuccccuaucggguaccugggacuucugagccaacgcaccagagacauuuauaucucucggcgccuccugggcaccuuuacauggacgcuguccgauagcgaaggcaaggacacccccgggggauacugccucacaagauggaugcugauugaggccgagcuuaaauguuucggcaauaccgcugucgccaagugcaacgaaaaacaugaugaggaauuuugcgacaugcugcgccucuucgauuuuuguaagcaggcuauccagcggcugaaagccccugcgcagauguccauucaacuuaucaauaaggccgugaacgcucugaucaaugaccagcucauuaugaagaaccaccugagagacaucauggggauucccuauugcaauuacucuaaauauugguaccugaaccacacagugaccggaaagacgagccucccuaaauguuggcuggucuccaauggcagcuaccuuaacgagacacauuucucugaugacaucgaacagcaagccgauaauaugauuaccgagaugcugcagaaggaguauauggaacggcaggggaaaaccccgcucggacugguugaccuguucguguuuuccaccagcuucuaccuuaucucuaucuuucuccaccuggugaagauucccacacaucgccacgucgugggcaaaccuugccccaagccucauagacugaaccacaugggcaucuguagcugcggguucuauaagcagcccggaguuccggugcgguggaaacgcugaggacuaguuauaagacugacuagcccgaugggccucccaacgggcccuccuccccuccuugcaccgagauuaauaaaaaaaaaaaaaaaaaaaaaaaaaaaaaaaaaaaaaaaaaaaaaaaaaaaaaaaaaaaaaaaaaaaaaaaaaaaaaaaaaaaaaaaaaaaaaaaaaaaa

SEQ ID NO: 31428 - RNA, 1665 nt, Artificial Sequence
  mRNA product Design i-3 (A100) comprising derived and/or modified sequence from LASV(Z0947-SLE-2011;Clade IV)__AIT17840__GPCmut6 (opt5)
aggagaaagcuuaccaugggccagaucgugaccuucuuucaagaggucccccacguuauugaagaggugaugaacaucgugcugauugcccucagcauccuggcuguccuuaaggggcuguacaauuucgccacaugcggacucgugggccugguuacguuucuucugcucugugggagauccugcaccauuucucuguauaaaggaguguacgaacugcagacacucgagcugaacauggaaacccuuaauauguguaugccucugagcugcacaaagaacaauucccaucacuauaucauggucggcaacgagaccgggcucgagcugacacuuaccaauacgucuaucauuaaccauaaauucuguaaucugagcgacgcgcacaagaaaaaccucuacgaucaugcucugauguccaucauuucuaccuuucaccugagcaucccgaauuucaaccaguaugaagccauguccugcgacuuuaauggaggcaagauuagcgugcaguacaaccucucucacuccuaugccggcgaugcugccaaucauugugggacaguugcuaacggagugcugcaaaccuucaugcggauggccuggggcgggagcuacaucgcgcuugacucuggacgcgauagaugggacugcauuaugacauccuaccaguaucugaucauccagaacaccacgugggaggaucacugucaguuuagccggcccucuccuauuggcuaccucgggcugcuuucccaacgcacaagagacaucuauauuagccggcgccugcucggaaccuucacauggacccuguccgauucugaaggcaaggacacccccggcggguacugccugacaagauggaugcucaucgaggccgagcugaaauguuuuggaaauacggcugucgccaagugcaacgaaaaacaugaugaggaguucugcgacaugcuucggcuguuugauuucuguaagcaggcuauucagcgccucaaagccccugcgcagaugagcauccaacugaucaauaaggccgugaacgcucuuauuaaugaccagcugaucaugaagaaccaccucagagacauuaugggcauccccuauugcaauuacuccaaauauugguaccugaaccacaccacaaccgggaagacaagccugccuaaauguuggcucgugucuaauggauccuaccugaacgaaacccauuucagcgaugacauugaacagcaagccgauaauaugaucacggagaugcuucagaaggaguauauggaacggcagggcaaaacaccgcuggggcucgucgaccuguuuguuuucucuaccagcuuuuaccugaucuccauuuuccuucaccucgugaagauccccacccaucgccacauugugggaaaaccuugccccaagccucauagacugaaccacaugggcaucuguucuugcggccuguauaagcagcccggggucccggugaaauggaagcggugaggacuaguuauaagacugacuagcccgaugggccucccaacgggcccuccuccccuccuugcaccgagauuaauaaaaaaaaaaaaaaaaaaaaaaaaaaaaaaaaaaaaaaaaaaaaaaaaaaaaaaaaaaaaaaaaaaaaaaaaaaaaaaaaaaaaaaaaaaaaaaaaaaaa

SEQ ID NO: 31429 - protein, 491 aa, Artificial Sequence
  derived and/or modified protein sequence (artificial) from LASV(Josiah;Clade IV)__NP_694870__GPCmut7
MGQIVTFFQEVPHVIEEVMNIVLIALSVLAVLKGLYNFATCGLVGLVTFLLLCGRSCTTSLYKGVYELQTLELNMETLNMTMPLSCTKNNSHHYIMVGNETGLELTLTNTSIINHKFCNLSDAHKKNLYDHALMSIISTFHLSIPNFNQYEAMSCDFNGGKISVQYNLSHSYAGDAANHCGTVANGVLQTFMRMAWGGSYIALDSGRGNWDCIMTSYQYLIIQNTTWEDHCQFSRPSPIGYLGLLSQRTRDIYISRRLLGTFTWTLSDSEGKDTPGGYCLTRWMLIEAELKCFGNTAVAKCNEKHDEEFCDMLRLFDFNKQAIQRLKAPAQMSIQLINKAVNALINDQLIMKNHLRDIMGIPYCNYSKYCYLNHTTTGRTSLPKCCLVSNGSYLNETHFSDDIEQQADNMITEMLQKEYMERQGKTPLGLVDLFVFSTSFYLISIFLHLVKIPTHRHIVGKSCPKPHRLNHMGICSCGLYKQPGVPVKWKR

SEQ ID NO: 31430 - protein, 490 aa, Artificial Sequence
  derived and/or modified protein sequence (artificial) from LASV(LP;Clade I)__AAF86701__GPCmut7
MGQIITFFQEVPHVIEEVMNIVLIALSLLAILKGLYNIATCGIIGLVAFLFLCGKSCSLTLKGGYELQTLELNMETLNMTMPLSCTKNSSHHYIRVGNETGLELTLTNTSIINHKFCNLSDAHKKNLYDHALMSIISTFHLSIPNFNQYEAMSCDFNGGKISVQYNLSHSYAGDAAEHCGTVANGVLQTFMRMAWGGRYIALDSGKGNWDCIMTSYQYLIIQNTTWEDHCQFSRPSPIGYLGLLSQRTRDIYISRRLLGTFTWTLSDSEGNETPGGYCLTRWMLIEAELKCFGNTAVAKCNEKHDEEFCDMLRLFDFNKQAIRRLKAPAQMSIQLINKAVNALINDQLIMKNHLRDIMGIPYCNYSKYCYLNHTSSGRTSLPKCCLISNGSYLNETQFSDDIEQQADNMITEMLQKEYIERQGKTPLGLVDIFIFSTSFYLISIFLHLIKIPTHRHIVGKPCPKPHRLNHMGVCSCGLYKHPGVPTKWKR

SEQ ID NO: 31431 - protein, 490 aa, Artificial Sequence
  derived and/or modified protein sequence (artificial) from LASV(803213;Clade II)__AAF86703__GPCmut7
MGQIITFFQEVPHVIEEVMNIVLIALSLLAILKGIYNVATCGLFGLISFLLLCGRSCSVTYKGVYELQTLELNMANLNMTMPLSCTKNNSHHYIMVGNETGLELTLTNTSIINHKFCNLSDAHKKNLYDHALMSIISTFHLSIPNFNQYEAMSCDFNGGKISVQYNLSHSFAVDAANHCGTIANGVLQTFMRMAWGGSYIALDSGKGNWDCIMTSYQYLIIQNTTWEDHCQFSRPSPIGYLGLLSQRTRDIYISRRLLGTFTWTLSDSEGNEAPGGYCLTRWMLIEAELKCFGNTAVAKCNEKHDEEFCDMLRLFDFNKQAIKRLKTPAQMSIQLINKAVNALINDQLIMKNHLRDIMGIPYCNYSRYCYLNHTVTGKTSLPRCCLVSNGSYLNETHFSDDIEQQADNMITEMLQKEYMDRQGKTPLGLVDLFVFSTSFYLISIFLHLVKIPTHRHIVGKPCPKPHRLNHMGICSCGLYKHPGVPVKWKR

SEQ ID NO: 31432 - protein, 490 aa, Artificial Sequence
  derived and/or modified protein sequence (artificial) from LASV(GA391;Clade III)__CAA36645__GPCmut7
MGQIVTFFQEVPHVIEEVMNIVLIALSILAILKGLYNVATCGLIGLVTFLLLSGRSCSLIYKGTYELQTLELNMETLNMTMPLSCTKNNSHHYIRVGNETGLELTLTNTSILNHKFCNLSDAHKRNLYDHSLMSIISTFHLSIPNFNQYEAMSCDFNGGKITVQYNLSHSFAVDAAGHCGTLANGVLQTFMRMAWGGSYIALDSGRGNWDCIMTSYQYLIIQNTTWDDHCQFSRPSPIGYLGLLSQRTRDIYISRRLLGTFTWTLSDSEGNETPGGYCLTRWMLIEAELKCFGNTAVAKCNEKHDEEFCDMLRLFDFNKQAIRRLKTPAQMSIQLINKAVNALINDQLIMKNHLRDIMGIPYCNYSRYCYLNHTSTGKTSLPRCCLISNGSYLNETKFSDDIEQQADNMITEMLQKEYIDRQGKTPLGLVDLFVFSTSFYLISIFLHLVKIPTHRHIVGKPCPKPHRLNHMGICSCGLYKQPGVPVRWKR

SEQ ID NO: 31433 - protein, 491 aa, Artificial Sequence
  derived and/or modified protein sequence (artificial) from LASV(AV;Clade V)__CCA30314__GPCmut7
MGQIVTFFQEVPHVIEEVMNIVLIALSILAVLKGLYNIATCGLIGLITFLLLCGRSCSSNLYKGVYELQSLDLNMETLNMTMPLSCTKNNSHHYIRVGNDTGLELTLTNTSILNHKFCNLSDAHKKDLYDHALMSIISTFHLSIPNFNQYEAMSCDFNGGKISVQYNLSHSYAIDAANHCGTVANGILQTFMRMAWGGSYIALDSGRGNWDCIMTSYQYLIIQNTTWENHCQFSRPSPIGYLGLLSQRTRDIYISRRLLGTFTWTLSDSEGNATPGGYCLTRWMLIEAELKCFGNTAVAKCNEKHDEEFCDMLRLFDFNKQAISRLKSPAQMSIQLINKAVNALINDQLIMKNHLRDIMGIPYCNYSKYCYLNHTITGKTSLPKCCLVSNGSYLNETHFSDDIEQQADNMITEMLQKEYMERQGKTPLGLVDLFVFSTSFYLISIFLRLVKIPTHRHIVGKPCPKPHRLNHMGICSCGLYKQPGVPVRWKR

SEQ ID NO: 31434 - protein, 490 aa, Artificial Sequence
  derived and/or modified protein sequence (artificial) from LASV(Togo/2016/7082;Clade VI)__AMR44577__GPCmut7
MGQIITFFQEVPHVIEEVMNIVLIALSLLAILKGVYNVATCGIIGLVTFLFLCGRSCSLIYKGSYELQTLELNMETLNMTMPLSCTKNSSHHYIRVGNETGLELTLTNTSIINHKFCNLSDAHKRNLYDHALMSILSTFHLSIPNFNQYEAMSCDFNGGKISVQYNLSHAYAVDAAEHCGTVANGVLQTFMRMAWGGSYIALDSGRGNWDCIMTSYQYLIIQNTTWEDHCQFSRPSPIGYLGLLSQRTRDIYISRRLLGTFTWTLSDSEGNETPGGYCLTRWMLIEAELKCFGNTAVAKCNEKHDEEFCDMLRLFDFNKQAIQRLKSPAQMSIQLINKAVNALINDQLIMKNHLRDMMGIPYCNYSKYCYLNHTSSGRTSLPKCCLVSNGSYLNETHFSDDIEQQADNMITEMLQKEYIDRQGKTPLGLVDLFVFSTSFYLISIFLHLIKIPTHRHIVGKPCPKPHRLNHMGICSCGLYKQPGVPTRWKR

SEQ ID NO: 31435 - protein, 490 aa, Artificial Sequence
  derived and/or modified protein sequence (artificial) from LASV(KAK-428;Clade n.d. (VII))__ANH09740__GPCmut7
MGQIVTFFQEVPHVIEEVMNIVLIALSLLAILKGLYNFATCGVIGLITFLLLCGRSCSATYKGQYELQTLELNMESLNMTMPLSCTKNNSHHYIRAGNNTGLELTLTNTSIISHKFCNLSDAHKKNLYDHTLMSIITTFHLSIPNFNQYEAMSCDFNGGKISIQYNLSHSYAGDAAQHCGTVANGVLQTFMRMAWGGSYLALDSGRRGWDCIISSYQYLIIQNTTWDDHCQFSRPSPIGYLGFVSQKTRDIYISRRLLGTFTWTLSDSEGHDMPGGYCLTRWMLIEADLKCFGNTAVAKCNEKHDEEFCDMWRLFDFNKQAIQRLKAPAQMNIQLINKAVNALINDQLMMKNHLRDIMGIPYCNYSKFCYLNNTTTGRTSLPRCCLISNGSYLNETHFSDDIEQQADNMITEMLQKEYMDRQGKTPLGLVDLFVFSTSFYLITIFLHLVKIPTHRHIVGKPCPKPHRLNHMGICSCGLYKQPGVPVRWKR

SEQ ID NO: 31436 - protein, 490 aa, Artificial Sequence; identical to SEQ ID NO: 31430
  derived and/or modified protein sequence (artificial) from LASV(Pinneo-NIG-1969;Clade I)__AIT17836__GPCmut7

SEQ ID NO: 31437 - protein, 490 aa, Artificial Sequence
  derived and/or modified protein sequence (artificial) from LASV(ISTH0009-NIG-2011;Clade II)__AIT17404__GPCmut7
MGQIITFFQEVPHVIEEVMNIVLIALSLLAILKGIYNVATCGLFGLVSFLLLCGRSCSTTYKGVYELQTLELDMASLNMTMPLSCTKNNSHHYIMVGNETGLELTLTNTSIINHKFCNLSDAHKKNLYDHALMSIISTFHLSIPNFNQYEAMSCDFNGGKISVQYNLSHAYAVDAANHCGTIANGVLQTFMRMAWGGSYIALDSGKGSWDCIMTSYQYLIIQNTTWEDHCQFSRPSPIGYLGLLSQRTRDIYISRRLLGTFTWTLSDSEGNETPGGYCLTRWMLIEAELKCFGNTAVAKCNEKHDEEFCDMLRLFDFNKQAIRRLKTPAQMSIQLINKAVNALINDQLIMKNHLRDIMGIPYCNYSKYCYLNHTVTGKTSLPRCCLVSNGSYLNETHFSDDIEQQADNMITELLQKEYMDRQGKTPLGLVDLFVFSTSFYLISIFLHLIKIPTHRHITGKPCPKPHRLNHMGICSCGLYKHPGVPVKWKR

SEQ ID NO: 31438 - protein, 490 aa, Artificial Sequence
  derived and/or modified protein sequence (artificial) from LASV(ISTH2010-NIG-2012;Clade II)__AIT17482__GPCmut7
MGQIITFFQEVPHVIEEVMNIVLIALSLLAILKGIYNVATCGLFGLVSFLLLCGRSCSTTYKGVYELQTLELDMASLNMTMPLSCTKNNSHHYIMVGNETGLELTLTNTSIINHKFCNLSDAHKKNLYDHALMSIISTFHLSIPNFNQYEAMSCDFNGGKISVQYNLSHAYAVDAANHCGTIANGVLQTFMRMAWGGSYIALDSGKGSWDCIMTSYQYLIIQNITWEDHCQFSRPSPIGYLGLLSQRTRDIYISRRLLGTFTWTLSDSEGNETPGGYCLTRWMLIEAELKCFGNTAVAKCNEKHDEEFCDMLRLFDFNKQAIRRLKTPAQMSIQLINKAVNALINDQLIMKNHLRDIMGIPYCNYSKYCYLNHTVTGKTSLPRCCLVSNGSYLNETHFSDDIEQQADNMITELLQKEYIDRQGKTPLGLVDLFVFSTSFYLISIFLHLVKIPTHRHVVGKPCPKPHRLNHMGICSCGLYKHPGVPVKWKR

SEQ ID NO: 31439 - protein, 490 aa, Artificial Sequence
  derived and/or modified protein sequence (artificial) from LASV(Lassa virus/H.sapiens-wt/NGA/2015/ISTH_0543;Clade II)__AVO03639__GPCmut7
MGQIITFFQEVPHVIEEVMNIVLIALSLLAILKGIYNVATCGLFGLVSFLLLCGRSCSTTYKGVYELQTLELDMANLNMTMPLSCTKNNSHHYIMVGNETGLELTLTNTSIINHKFCNLSDAHKKNLYDHALMSIISTFHLSIPNFNQYEAMSCDFNGGKISVQYNLSHTYAVDAANHCGTIANGVLQTFMRMAWGGSYIALDSGKGSWDCIMTSYQYLVIQNTTWEDHCQFSRPSPIGYLGLLSQRTRDIYISRRLLGTFTWTLSDSEGNETPGGYCLTRWMLIEAELKCFGNTAVAKCNEKHDEEFCDMLRLFDFNKQAIRRLKTPAQMSIQLINKAVNALINDQLIMKNHLRDIMGIPYCNYSKYCYLNHTVTGKTSLPRCCLVSNGSYLNETHFSDDIEQQADNMITELLQKEYIDRQGKTPLGLVDLFVFSTSFYLISIFLHLVKIPTHRHITGKPCPKPHRLNHMGICSCGLYKHPGVPVKWKR

SEQ ID NO: 31440 - protein, 490 aa, Artificial Sequence
  derived and/or modified protein sequence (artificial) from LASV(Lassa virus/H.sapiens-wt/NGA/2016/ISTH_0009;Clade II)__AVO03571__GPCmut7
MGQIITFFQEVPHVIEEVMNIVLIALSLLAILKGIYNVATCGLLGLVSFLLLCGRSCSTTYKGVYELQTLELDMASLNMTMPLSCTKNNSHHYIMVGNETGLELTLTNTSIINHKFCNLSDAHKKNLYDHALMSIISTFHLSIPNFNQYEAMSCDFNGGRISVQYNLSHSYAVDAANHCGTIANGVLQTFMRMAWGGSYIALDSGKGSWDCIMTSYQYLIIQNTTWEDHCQFSRPSPIGYLGLLSQRTRDIYISRRLLGTFTWTLSDSEGNETPGGYCLTRWMLIEAELKCFGNTAVAKCNEKHDEEFCDMLRLFDFNKQAIRRLKTPAQMSIQLINKAVNALINDQLIMKNHLRDIMGIPYCNYSKYCYLNHTVTGKTSLPRCCLVSNGSYLNETHFSDDIEQQADNMITELLQKEYIDRQGKTPLGLVDLFVFSTSFYLISIFLHLVKIPTHRHITGKPCPKPHRLNHMGICSCGLYNHPGVPVKWKR

SEQ ID NO: 31441 - protein, 490 aa, Artificial Sequence
  derived and/or modified protein sequence (artificial) from LASV(Lassa virus/H.sapiens-wt/NGA/2016/ISTH_0017;Clade II)__AVO03567__GPCmut7
MGQIITFFQEVPHVIEEVMNIVLIALSLLAILKGIYNVATCGLFGLVSFLLLCGRSCSTTYKGVYELQTLELDMASLNMTMPLSCTKNNSHHYIMVGNETGLELTLTNTSIINHKFCNLSDAHKKNLYDHALMSIISTFHLSIPNFNQYEAMSCDFNGGKISVQYNLSHTYAIDAANHCGTIANGVLQTFMRMAWGGSYIALDSGKGSWDCIMTSYQYLIIQNTTWEDHCQFSRPSPIGYLGLLSQRTRDIYISRRLLGTFTWTLSDSEGNETPGGYCLTRWMLIEAELKCFGNTAVAKCNEKHDEEFCDMLRLFDFNKQAIRRLKTPAQMSIQLINKAVNALINDQLIMKNHLRDIMGIPYCNYSKYCYLNHTVTGKTSLPRCCLVSNGSYLNETHFSDDIEQQADNMITELLQKEYMDRQGKTPLGLVDLFVFSTSFYLISIFLHLVRIPTHRHVIGKPCPKPHRLNHMGICSCGLYKHPGVPVKWKR

SEQ ID NO: 31442 - protein, 490 aa, Artificial Sequence
  derived and/or modified protein sequence (artificial) from LASV(Lassa virus/H.sapiens-wt/NGA/2018/ISTH_0959;Clade II)__AVV65099__GPCmut7
MGQIITFFQEVPHVIEEVMNIVLIALSLLAILKGIYNVVTCGLFGLVSFLLLCGRSCSTTYKGVYELQTLELDMASLNMTMPLSCTKNNSHHYIMVGNETGLELTLTNTSIINHKFCNLSDAHKKNLYDHALMSIISTFHLSIPNFNQYEAMSCDFNGGKISVQYNLSHAYAIDAANHCGTIANGVLQTFMRMAWGGSYIALDSGKGSWDCIMTSYQYLIIQNTTWEDHCQFSRPSPIGYLGLLSQRTRDIYISRRLLGTFTWTLSDSEGNETPGGYCLTRWMLIEAELKCFGNTAVAKCNEKHDEEFCDMLRLFDFNKQAIRRLKTPAQMSIQLINKAVNALINDQLIMKNHLRDIMGIPYCNYSKYCYLNHTVTGKTSLPRCCLVSNGSYLNETHFSDDIEQQADNMITELLQKEYIDRQGKTPLGLVDLFVFSTSFYLISIFLHLVKIPTHRHVIGKPCPKPHRLNHMGICSCGLYKHPGVPVKWKR

SEQ ID NO: 31443 - protein, 490 aa, Artificial Sequence
  derived and/or modified protein sequence (artificial) from LASV(LASV003-NIG-2008;Clade II)__AIT17580__GPCmut7
MGQIITFFQEVPHVIEEVMNIVLIALSLLAILKGIYNVATCGLFGLVSFLLLCGRSCSTTYKGVYELQTLELDMASLNMTMPLSCTKNNSHHYIMVGNETGLELTLTNTSIINHKFCNLSDAHKKNLYDHALMSIISTFHLSIPNFNQYEAMSCDFNGGKISVQYNLSHTYAVDAANHCGTIANGVLQTFMRMAWGGSYIALDSGKGSWDCIMTSYQYLIIQNTTWEDHCQFSRPSPIGYLGLLSQRTRDIYISRRLLGTFTWTLSDSESNETPGGYCLTRWMLIEAELKCFGNTAVAKCNEKHDEEFCDMLRLFDFNKQAIRRLKAPAQMSIQLINKAVNALINDQLIMKNHLRDIMGIPYCNYSKYCYLNHTVTGRTSLPRCCLVSNGSYLNETHFSDDIEQQADNMITELLQKEYMDRQGKTPLGLVDLFVFSTSFYLISIFLHLVKIPTHRHVIGKPCPKPHRLNHMGICSCGLYKHPGVPVKWKR

SEQ ID NO: 31444 - protein, 490 aa, Artificial Sequence
  derived and/or modified protein sequence (artificial) from LASV(LASV035-NIG-2009;Clade II)__AIT17588__GPCmut7
MGQIITFFQEVPHVIEEVMNIVLIALSLLAILKGIYNVATCGLFGLVSFLLLCGRSCSTTYKGVYELQTLELDMASLNMTMPLSCTKNNSHHYIMVGNETGLELTLTNTSIINHKFCNLSDAHKKNLYDHALMSIISTFHLSIPNFNQYEAMSCDFNGGKISVQYNLSHAYAVDAANHCGTIANGVLQTFMRMAWGGSYIALDSGKGSWDCIMTSYQYLIIQNTTWEDHCQFSRPSPIGYLGLLSQRTRDIYISRRLLGTFTWTLSDSEGNETPGGYCLTRWMLIEAELKCFGNTAVAKCNEKHDEEFCDMLRLFDFNKQAIRRLKAPAQMSIQLINKAVNALINDQLIMKNHLRDIMGIPYCNYSKYCYLNHTVTGKTSLPRCCLVSNGSYLNETHFSDDIEQQADNMITELLQKEYIDRQGKTPLGLVDLFVFSTSFYLISIFLHLVKIPTHRHVIGKPCPKPHRLNHMGICSCGLYKHPGVPVKWKR

SEQ ID NO: 31445 - protein, 490 aa, Artificial Sequence
  derived and/or modified protein sequence (artificial) from LASV(LASV1000-NIG-2009;Clade II)__AIT17782__GPCmut7
MGQIITFFQEVPHVIEEVMNIVLIALSLLAILKGIYNVATCGLFGLVSFLLLCGRSCSTTYKGVYELQTLELDMASLNMTMPLSCTKNNSHHYIMVGNETGLELTLTNTSIINHKFCNLSDAHKKNLYDHALMSIISTFHLSIPNFNQYEAMSCDFNGGKISVQYNLSHTYAVDAANHCGTIANGVLQTFMRMAWGGSYIALDSGKGSWDCIMTSYQYLIIQNTTWEDHCQFSRPSPIGYLGLLSQRTRDIYISRRLLGTFTWTLSDSEGNETPGGYCLTRWMLIEAELKCFGNTAVAKCNEKHDEEFCDMLRLFDFNKQAIKRLKTPAQMSIQLINKAVNALINDQLIMKNHLRDIMGIPYCNYSKYCYLNHTVTGKTSLPRCCLVSNGSYLNETHFSDDIEQQADNMITELLQKEYIDRQGKTPLGLVDLFVFSTSFYLISIFLHLVKIPTHRHVVGKPCPKPHRLNHMGICSCGLYKHPGVPVKWKR

SEQ ID NO: 31446 - protein, 490 aa, Artificial Sequence
  derived and/or modified protein sequence (artificial) from LASV(LASV221-NIG-2010;Clade II)__AIT17624__GPCmut7
MGQIITFFQEVPHVIEEVMNIVLIALSLLAILKGIYNVATCGLFGLVSFLLLCGRSCSTTYKGVYELQTLELDMASLNMTMPLSCTKNNSHHYIMVGNETGLELTLTNTSIINHKFCNLSDAHKKNLYDHALMSIISTFHLSIPNFNQYEAMSCDFNGGKISVQYNLSHTYAIDAANHCGTIANGVLQTFMRMAWGGSYIALDSGKGSWDCIMTSYQYLIIQNTTWEDHCQFSRPSPIGYLGLLSQRTRDIYISRRLLGTFTWTLSDSEGNETPGGYCLTRWMLIEAELKCFGNTAVAKCNEKHDEEFCDMLRLFDFNKQAIRRLKTPAQMSIQLINKAVNALINDQLIMKNHLRDIMGIPYCNYSKYCYLNHTVTGKTSLPRCCLVSNGSYLNETHFSDDIEQQADNMITEMLQKEYMDRQGKTPLGLVDLFVFSTSFYLISIFLHLVKIPTHRHVIGKPCPKPHRLNHMGICSCGLYKHPGVPVKWKR

SEQ ID NO: 31447 - protein, 490 aa, Artificial Sequence
  derived and/or modified protein sequence (artificial) from LASV(LASV237-NIG-2010;Clade II)__AIT17638__GPCmut7
MGQIITFFQEVPHVIEEVMNIVLIALSLLAILKGIYNVATCGLFGLVSFLLLCGRSCSTTYKGVYELQTLELDMASLNMTMPLSCTKNNSHHYIMVGNETGLELTLTNTSIINHKFCNLSDAHKKDLYDHALMSIISTFHLSIPNFNQYEAMSCDFNGGKISVQYNLSHTYAVDAANHCGTIANGVLQTFMRMAWGGSYIALDSGKGSWDCIMTSYQYLIIQNTTWEDHCQFSRPSPIGYLGLLSQRTRDIYISRRLLGTFTWTLSDSEGNETPGGYCLTRWMLIEAELKCFGNTAVAKCNEKHDEEFCDMLRLFDFNKQAIRRLKTPAQMSIQLINKAVNALINDQLIMKNHLRDIMGIPYCNYSKYCYLNHTVTGKTSLPRCCLVSNGSYLNETHFSDDIEQQADNMITELLQKEYMDRQGKTPLGLVDLFVFSTSFYLISIFLHLIKIPTHRHITGKPCPKPHRLNHMGICSCGLYKHPGVPVKWKR

SEQ ID NO: 31448 - protein, 490 aa, Artificial Sequence
  derived and/or modified protein sequence (artificial) from LASV(LASV253-NIG-2011;Clade II)__AIT17670__GPCmut7
MGQIITFFQEVPHVIEEVMNIVLIALSLLAILKGIYNVATCGLFGLVSFLLLCGRSCSTTYKGVYELQTLELDMASLNMTMPLSCTKNNSHHYIMVGNETGLELTLTNTSIINHKFCNLSDAHKKNLYDHALMSIISTFHLSIPNFNQYEAMSCDFNGGKISVQYNLSHTYAVDAANHCGTIANGVLQTFMRMAWGGSYIALDSGKGSWDCIMTSYQYLIIQNTTWEDHCQFSRPSPIGYLGLLSQRTRDIYISRRLLGTFTWTLSDSEGNETPGGYCLTRWMLIEAELKCFGNTAVAKCNEKHDEEFCDMLRLFDFNKQAIRRLKAPAQMSIQLINKAVNALINDQLIMKNHLRDIMGIPYCNYSKYCYLNHTVTGRTSLPRCCLVSNGSYLNETHFSDDIEQQADNMITELLQKEYIDRQGKTPLGLVDLFVFSTSFYLISIFLHLVKIPTHRHIIGKPCPKPHRLNHMGICSCGLYKHPGVPVKWKR

SEQ ID NO: 31449 - protein, 490 aa, Artificial Sequence
  derived and/or modified protein sequence (artificial) from LASV(LASV254-NIG-2011;Clade II)__AIT17674__GPCmut7
MGQIITFFQEVPHVIEEVMNIVLIALSLLAILKGIYNVATCGLFGLVSFLLLCGRSCSTTYKGVYELQTLELDMTNLNMTMPLSCTKNNSHHYIMVGNETGLELTLTNTSIINHKFCNLSDAHKKNLYNHALMSIISTFHLSIPNFNQYEAMSCDFNGGKISVQYNLSHSYAVDAANHCGTIANGVLQTFMRMAWGGSYIALDSGKGNWDCIMTSYQYLIIQNTTWEDHCQFSRPSPIGYLGLLSQRTRDIYISRRLLGTFTWTLSDSEGNETPGGYCLTRWMLIEAELKCFGNTAVAKCNEKHDEEFCDMLRLFDFNKQAIRRLKTPAQANIQLINKAVNALINDQLIMKNHLRDIMGIPYCNYSKYCYLNHTVTGKTSLPRCCLVSNGSYLNETHFSDDIEQQADNMITELLQKEYMDRQGKTPLGLVDLFVFSTSFYLISIFLHLVKIPTHRHVIGKPCPKPHRLNHMGICSCGLYKHPGVPVKWKR

SEQ ID NO: 31450 - protein, 490 aa, Artificial Sequence
  derived and/or modified protein sequence (artificial) from LASV(Nig08-A19;Clade III)__ADU56618__GPCmut7
MGQIVTFFQEVPHVIEEVMNIVLIALSILAILKGLYNIATCGLIGLVTFLLLSGRSCSMTYKGVYELQTLELNMNTLNMTMPLSCTKNNSHHYIMVGNETGLELTLTNTSLLHHKFCNLSDAHKKNLYDHTLMSIISTFHLSIPNFNQYEAMSCDFNGGKITVQYNLSHSYAIDAANHCGTVANGVLQTFMRMAWGGSYIALDSGRGKWDCIMTSYQYLIIQNTTWEDHCQFSRPSPIGYLGLLSQRTRDIYISRRLLGTFTWTLSDSEGNETPGGYCLTRWMLIEAELKCFGNTAVAKCNEKHDEEFCDMLRLFDFNKQAIRRLKAPAQMSIQLINKAVNALINDQLIMKNHLRDIMGIPYCNYSKYCYLNHTSTGRTSLPRCCLVSNGSYLNETHFSDDIEQQADNMITEMLQKEYLDRQGKTPLGLVDLFVFSTSFYLISIFLHLVKIPTHRHIVGKPCPKPHRLNHMGICSCGLYKQPGVPVRWKR

SEQ ID NO: 31451 - protein, 491 aa, Artificial Sequence
  derived and/or modified protein sequence (artificial) from LASV(G1180-SLE-2010;Clade IV)__AIT17168__GPCmut7
MGQIVTFFQEVPHVIEEVMNIVLIALSILAVLKGLYNFATCGLVGLLTFLLLCGRSCTASRYKGVYELQTLELNMETLNMTMPLSCTKNNSHHYIMVGNETGLELTLTNTSIINHKFCNLSDAHKKNLYDHALMSIISTFHLSIPNFNQYEAMSCDFNGGKISVQYNLSHSYAGDAANHCGTVANGVLQTFMRMAWGGSYIALDSGHGSWDCIMTSYQYLIIQNTTWEDHCQFSRPSPIGYLGLLSQRTRDIYISRRLLGTFTWTLSDSEGKDTPGGYCLTRWMLIEAELKCFGNTAVAKCNEKHDEEFCDMLRLFDFNKQAIQRLKAPAQMSIQLINKAVNALINDQLIMKNHLRDIMGIPYCNYSKYCYLNHTTTGKTSLPKCCLVSNGSYLNETHFSDDIEQQADNMITEMLQKEYMERQGKTPLGLVDLFVFSTSFYLISIFLHLVKIPTHRHIVGKSCPKPHRLNHMGICSCGLYKQPGVPVKWKR

SEQ ID NO: 31452 - protein, 491 aa, Artificial Sequence
  derived and/or modified protein sequence (artificial) from LASV(G1442-SLE-2011;Clade IV)__AIT17180__GPCmut7
MGQIVTFFQEVPHVIEEVMNIVLIALSILAVLKGLYNVATCGLIGLVTFLLLCGRSCTTTLYKGVYELQTLELNMETLNMTMPLSCTKNNSHHYIRVGNETGLELTLTNTSIINHKFCNLSDAHKKNLYDHALMSIISTFHLSIPNFNQYEAMSCDFNGGKISVQYNLSHSYAGDAANHCGTVANGVLQTFMRMAWGGSYIALDSGRGNWDCIMTSYQYLIIQNTTWDDHCQFSRPSPIGYLGLLSQRTRDVYISRRLLGTFTWTLSDSEGKDTPGGYCLTRWMLIEAELKCFGNTAVAKCNEKHDEEFCDMLRLFDFNKQAIQRLKAPAQMSIQLINKAVNALINDQLIMKNHLRDIMGIPYCNYSKYCYLNNTATGKTSLPKCCLISNGSYLNETHFSDDIEQEADNMITEMLQKEYMERQGKTPLGLVDLFVFSTSFYLISIFLHLVKIPTHRHIVGKSCPKPHRLNHMGICSCGLYKQPGVPVRWKR

SEQ ID NO: 31453 - protein, 491 aa, Artificial Sequence
  derived and/or modified protein sequence (artificial) from LASV(G3010-SLE-2013;Clade IV)__AIT17344__GPCmut7
MGQIVTFFQEVPHVIEEVMNIVLIALSILAVLKGLYNFATCGLVGLVTFLLLCGRSCTTSLYKGVYELQTLELNMETLNMTMPLSCTKNNSHHYIMVGNETGLELTLTNTSIINHKFCNLSDAHKKNLYNHALMSIISTFHLSIPNFNQYEAMSCDFNGGKISVQYNLSHSYAGDAASHCGTVANGVLQTFMRMAWGGSYIALDSGYGKWDCIMTSYQYLIIQNTTWEDHCQFSRPSPIGYLGLLSQRTRDIYISRRLLGTFTWTLSDSEGKDTPGGYCLTRWMLIEAELKCFGNTAVAKCNEKHDEEFCDMLRLFDFNKQAIQRLKTPAQMSIQLINKAVNALINDQLIMKNHLRDIMGIPYCNYSKYCYLNHTTTGKTSLPKCCLVSNGSYLNETHFSDDIEQQADNMITEMLQKEYMERQGKTPLGLVDLFVFSTSFYLISIFLHLVKIPTHRHIVGKSCPKPHRLNHMGICSCGLYKQPGVPVRWKR

SEQ ID NO: 31454 - protein, 491 aa, Artificial Sequence
  derived and/or modified protein sequence (artificial) from LASV(G502-SLE-2009;Clade IV)__AIT17126__GPCmut7
MGQIVTFFQEVPHVIEEVMNIVLIALSILAVLKGLYNFATCGLVGLLTFLLLCGRSCTTGLYKGVYELQTLELNMETLNMTMPLSCTKNNSHHYIMVGNETGLELTLTNTSIINHKFCNLSDAHKKNLYDHALMSIISTFHLSIPNFNQYEAMSCDFNGGKISVQYNLSHSYAGDAADHCGTVANGVLQTFMRMAWGGSYIALDSGRGRWDCIMTSYQYLIIQNTTWEDHCQFSRPSPIGYLGLLSQRTRDIYISRRLLGTFTWTLSDSEGKDTPGGYCLTRWMLIEAELKCFGNTAVAKCNEKHDEEFCDMLRLFDFNKQAIQRLKAPAQMSIQLINKAVNALINDQLVMKNHLRDIMGIPYCNYSRYCYLNHTTTGRTSLPKCCLVSNGSYLNETHFSDDIEQQADNMITEMLQKEYMERQGKTPLGLVDLFVFSTSFYLISIFLHLVKIPTHRHIVGKSCPKPHRLNHMGICSCGLYKQPGVPVKWKR

SEQ ID NO: 31455 - protein, 491 aa, Artificial Sequence
  derived and/or modified protein sequence (artificial) from LASV(G733-SLE-2010;Clade IV)__AIT17154__GPCmut7
MGQIVTFFQEVPHVIEEVMNIVLIALSILAVLKGLYNFATCGIVGLVSFLLLCGRSCTTSLYKGVYELQTLELNMETLNMTMPLSCTKNNSHHYIMVGNETGLELTLTNTSIINHKFCNLSDAHKKNLYDHALMSIISTFHLSIPNFNQYEAMSCDFNGGKISVQYNLSHSYAGDAANHCGTIANGVLQTFMRMAWGGSYIALDSGRDRWDCIMTSYQYLIIQNTTWEDHCQFSRPSPIGYLGLLSQRTRDIYISRRLLGTFTWTLSDSEGKDTPGGYCLTRWMLIEAELKCFGNTAVAKCNEKHDEEFCDMLRLFDFNKQAIQRLKAPAQMSIQLINKAVNALINDQLIMKNHLRDIMGIPYCNYSKYCYLNHTTTGKTSLPKCCLVSNGSYLNETHFSDDIEQQADNMITEMLQKEYMERQGKTPLGLVDLFVFSTSFYLISIFLHLVKIPTHRHVVGKSCPKPHRLNHMGICSCGLYGQPGVPVKWKR

SEQ ID NO: 31456 - protein, 491 aa, Artificial Sequence
  derived and/or modified protein sequence (artificial) from MOPV/LASV reassortant(IGS-1;Clade IV)__AFY05576__GPCmut7
MGQIVTFFQEVPHVIEEVMNIVLIALSVLAVLKGLYNFATCGLVGLVTFLLLCGRSCTTSLYKGVYELQTLELNMETLNMTMPLSCTKNNSHHYIMVGNETGLELTLTNTSIINHKFCNLSDAHKKNLYDHALMSIISTFHLSIPNFNQYEAMSCDFNGGKISVQYNLSHSYAGDAANHCGTVANGVLQTFMRMAWGGSYIALDSGRGNWDCIMTSYQYLIIQNTTWEDHCQFSRPSPIGYLGLLSQRTRDIYISRRLLGTFTWTLSDSEGEDTPGGYCLTRWMLIEAELKCFGNTAVAKCNEKHDEEFCDMLRLFDFNKQAIQRLKAPAQMSIQLINKAVNALINDQLIMKNHLRDIMGIPYCNYSKYCYLNHTTTGRTSLPKCCLVSNGSYLNETHFSDDIEQQADNMITEMLQKEYMERQGKTPLGLVDLFVFSTSFYLISIFLHLVKIPTHRHIVGKSCPKPHRLNHMGICSCGLYKQPGVPVKWKR

SEQ ID NO: 31457 - protein, 491 aa, Artificial Sequence
  derived and/or modified protein sequence (artificial) from LASV(LM765-SLE-2012;Clade IV)__AIT17814__GPCmut7
MGQIVTFFQEVPHVIEEVMNIVLIALSILAVLKGLYNFATCGLVGLVTFLLLCGRSCTTSLYKGVYELQTLELNMETLNMTMPLSCTKNNSHHYIMVGNETGLELTLTNTSIIDHKFCNLSDAHRKNLYDHALMSIISTFHLSIPNFNQYEAMSCDFNGGKISVQYNLSHSYAKDAADHCGTVANGVLQTFMRMAWGGSYIALDSGRGRWDCIMTSYQYLIIQNTTWEDHCQFSRPSPIGYLGLLSQRTRDIYISRRLLGTFTWTLSDSEGKDTPGGYCLTRWMLIEAELKCFGNTAVAKCNEKHDEEFCDMLRLFDFNKQAIQRLKAPAQMSIQLINKAVNALINDQLIMKNHLRDIMGIPYCNYSKYCYLNHTTTGKTSLPKCCLVSNGSYLNETHFSDDIEQQADNMITEMLQKEYMERQGKTPLGLVDLFVFSTSFYLISIFLHLVKIPTHRHIVGKPCPKPHRLNHMGICSCGLYKQPGVPVKWKR

SEQ ID NO: 31458 - protein, 491 aa, Artificial Sequence
  derived and/or modified protein sequence (artificial) from LASV(LM776-SLE-2012;Clade IV)__AIT17824__GPCmut7
MGQIVTFFQEVPHVIEEVMNIVLIALSILAVLKGLYNFATCGLVGLVTFLLLCGRSCTTSVYKGVYELQTLELNMETLNMTMPLSCTKNNSHHYIMVGNETGLELTLTNTSIINHKFCNLSDAHKKNLYDHALMSIISTFHLSIPNFNQYEAMSCDFNGGKISVQYNLSHSYAGDAANHCGTVANGVLQTFMRMAWGGSYIALDSGHGKWDCIMTSYQYLIIQNTTWEDHCQFSRPSPIGYLGLLSQRTRDIYISRRLLGTFTWTLSDSEGKDTPGGYCLTRWMLIEAELKCFGNTAVAKCNEKHDEEFCDMLRLFDFNKQAIQRLKAPAQMSIQLINKAVNALINDQLIMKNHLRDIMGIPYCNYSKYCYLNHTTTGKTSLPKCCLVSNGSYLNETHFSDDIEQQADNMITEMLQKEYMERQGKTPLGLVDLFVFSTSFYLISIFLHLVKIPTHRHIVGKSCPKPHRLNHMGICSCGLYKQPGVPVRWKR

SEQ ID NO: 31459 - protein, 491 aa, Artificial Sequence
  derived and/or modified protein sequence (artificial) from LASV(Mad39;Clade IV)__ANH09722__GPCmut7
MGQIVTFFQEVPHVIEEVMNIVLIALSILAVLKGLYNVATCGLIGLVTFLLLCGRSCTTTLYKGVYELQALELNMETLNMTMPLSCTKNNSHHYIRVGNETGLELTLTNTSLINHKFCNLSDAHKKNLYDHALMSIISTFHLSIPNFNQYEAMSCDFNDGKISVQYNLSHTYAGDTANHCGTVANGVLQTFMRMAWGGSYIALDSGRGGWDCIMTSYQYLIIQNTTWEDHCQFSRPSPIGYLGLLSQRTRDIYISRRLLGTFTWTLSDSEGKDTPGGYCLTRWMLIEAELKCFGNTAVAKCNEKHDEEFCDMLRLFDFNKQAIQRLKAPAQMSIQLINKAVNALINDQLIMKNHLRDIMGIPYCNYSKYCYLNHTVTGKTSLPKCCLVSNGSYLNETHFSDDIEQQADNMITEMLQKEYMERQGKTPLGLVDLFVFSTSFYLISIFLHLVKIPTHRHVVGKPCPKPHRLNHMGICSCGFYKQPGVPVRWKR

SEQ ID NO: 31460 - protein, 491 aa, Artificial Sequence
  derived and/or modified protein sequence (artificial) from LASV(Z0947-SLE-2011;Clade IV)__AIT17840__GPCmut7
MGQIVTFFQEVPHVIEEVMNIVLIALSILAVLKGLYNFATCGLVGLVTFLLLCGRSCTISLYKGVYELQTLELNMETLNMTMPLSCTKNNSHHYIMVGNETGLELTLTNTSIINHKFCNLSDAHKKNLYDHALMSIISTFHLSIPNFNQYEAMSCDFNGGKISVQYNLSHSYAGDAANHCGTVANGVLQTFMRMAWGGSYIALDSGRDRWDCIMTSYQYLIIQNTTWEDHCQFSRPSPIGYLGLLSQRTRDIYISRRLLGTFTWTLSDSEGKDTPGGYCLTRWMLIEAELKCFGNTAVAKCNEKHDEEFCDMLRLFDFNKQAIQRLKAPAQMSIQLINKAVNALINDQLIMKNHLRDIMGIPYCNYSKYCYLNHTTTGKTSLPKCCLVSNGSYLNETHFSDDIEQQADNMITEMLQKEYMERQGKTPLGLVDLFVFSTSFYLISIFLHLVKIPTHRHIVGKPCPKPHRLNHMGICSCGLYKQPGVPVKWKR

SEQ ID NO: 31461 - RNA, 1476 nt, Artificial Sequence
  derived and/or modified CDS sequence (opt1) from LASV(Josiah;Clade IV)__NP_694870__GPCmut7
augggccagaucgugaccuucuuccaggaggucccccacgugaucgaggaggugaugaacaucguccugaucgcccucagcgugcuggccgugcugaaggggcucuacaacuucgcgaccugcggccuggucgggcuggugacguuccuccugcugugcggccgcuccugcaccaccagccucuacaaggggguguacgagcugcagacccuggagcucaacauggagacgcugaacaugaccaugccgcuguccugcaccaagaacaacagccaccacuacaucauggucggcaacgagaccggccucgagcugacgcugaccaacaccuccaucaucaaccacaaguucugcaaccucagcgacgcccacaagaagaaccuguacgaccacgcccugauguccaucaucagcaccuuccaccucuccauccccaacuucaaccaguacgaggccaugagcugcgacuucaacgggggcaagaucuccgugcaguacaaccugagccacuccuacgccggggacgcggccaaccacugcggcacgguggccaacgggguccugcagaccuucaugcggauggccuggggcggcagcuacaucgcgcucgacuccgggcgcggcaacugggacugcaucaugaccagcuaccaguaccugaucauccagaacaccacgugggaggaccacugccaguucucccggcccagccccaucggguaccugggccuccugucccagcgcacccgggacaucuacaucagccgccggcugcucggcaccuucaccuggacgcugagcgacuccgaggggaaggacaccccgggcggguacugccugacccgcuggaugcucaucgaggccgagcugaagugcuucggcaacaccgccguggccaagugcaacgagaagcacgacgaggaguucugcgacaugcugcggcuguucgacuucaacaagcaggccauccagcgccugaaggcgcccgcccagaugagcauccagcugaucaacaaggccgugaacgcccucaucaacgaccagcugaucaugaagaaccaccuccgggacaucauggggauccccuacugcaacuacuccaaguacugcuaccucaaccacacgaccaccggccgcaccagccugcccaagugcugccuggucuccaacggcagcuaccucaacgagacgcacuucuccgacgacaucgagcagcaggccgacaacaugaucaccgagaugcugcagaaggaguacauggagcggcaggggaagacgccccugggccucguggaccuguucguguucagcaccuccuucuaccugaucagcaucuuccugcaccucgucaagaucccgacccaccgccacaucguggggaaguccugccccaagccccaccggcugaaccacaugggcaucugcagcugcgggcuguacaagcagcccggcgugccggucaaguggaagcgcuga

SEQ ID NO: 31462 - RNA, 1473 nt, Artificial Sequence
  derived and/or modified CDS sequence (opt1) from LASV(LP;Clade I)__AAF86701__GPCmut7
augggccagaucaucaccuucuuccaggaggugccccacgucaucgaggaggugaugaacaucgugcugaucgcccucagccugcuggccauccucaaggggcuguacaacaucgcgaccugcggcaucaucgggcuggucgccuuccucuuccugugcggcaaguccugcagccugacgcucaagggcggguacgagcugcagacccuggagcucaacauggagacccugaacaugaccaugccgcuguccugcacgaagaacagcucccaccacuacauccgcgugggcaacgagaccgggcucgagcugacccugaccaacacgagcaucaucaaccacaaguucugcaaccucuccgacgcccacaagaagaaccuguacgaccacgcccugaugagcaucaucuccaccuuccaccucagcauccccaacuucaaccaguacgaggccauguccugcgacuucaacggcgggaagaucagcgugcaguacaaccugucccacagcuacgcgggcgacgccgccgagcacugcgggaccgucgccaacggcgugcugcagaccuucaugcggauggcguggggcgggcgcuacaucgcccucgacuccggcaaggggaacugggacugcaucaugacgagcuaccaguaccugaucauccagaacaccaccugggaggaccacugccaguucucccggcccagccccaucggcuaccugggccuccugucccagcgcacccgggacaucuacaucagccgccggcugcucgggacguucaccuggacccugagcgacuccgagggcaacgagacccccgggggcuacugccugacgcgcuggaugcucaucgaggccgagcugaagugcuucgggaacaccgccguggccaagugcaacgagaagcacgacgaggaguucugcgacaugcugcggcuguucgacuucaacaagcaggcgauccgccggcugaaggcccccgcccagaugagcauccagcugaucaacaaggccgucaacgcccucaucaacgaccagcugaucaugaagaaccaccuccgcgacaucaugggcauccccuacugcaacuacuccaaguacugcuaccucaaccacaccagcuccggccggaccagccugcccaagugcugccugaucuccaacgggagcuaccucaacgagacgcaguucuccgacgacaucgagcagcaggcggacaacaugaucaccgagaugcugcagaaggaguacaucgagcgccagggcaagaccccgcuggggcucguggacaucuucaucuucagcaccuccuucuaccugaucagcaucuuccugcaccugaucaagaucccgacgcaccggcacaucgugggcaagcccugccccaagccccaccgccucaaccacaugggggucugcuccugcggccuguacaagcacccgggcgugcccaccaaguggaagcgguga

SEQ ID NO: 31463 - RNA, 1473 nt, Artificial Sequence
  derived and/or modified CDS sequence (opt1) from LASV(803213;Clade II)__AAF86703__GPCmut7
augggccagaucaucaccuucuuccaggaggugccccacgucaucgaggaggugaugaacaucgugcugaucgcccucagccugcuggccauccucaaggggaucuacaacgucgcgaccugcggccuguucgggcugaucuccuuccuccugcugugcggccgcagcugcuccgugacguacaaggggguguacgagcuccagacccuggagcugaacauggccaaccucaacaugaccaugccgcugagcugcaccaagaacaacucccaccacuacaucauggucggcaacgagacgggccuggagcucacccugaccaacaccagcaucaucaaccacaaguucugcaaccuguccgacgcccacaagaagaaccucuacgaccacgcccugaugagcaucaucuccacguuccaccugagcauccccaacuucaaccaguacgaggccauguccugcgacuucaacgggggcaagaucagcgugcaguacaaccucucccacagcuucgcgguggacgccgccaaccacugcgggaccaucgccaacggcguccugcagaccuucaugcggauggcguggggcggguccuacaucgcccuggacagcggcaaggggaacugggacugcaucaugaccuccuaccaguaccucaucauccagaacacgaccugggaggaccacugccaguucagccgccccucccccaucggcuaccuggggcugcucagccagcggacccgcgacaucuacaucagccggcgccugcugggcaccuucacguggacccucuccgacagcgagggcaacgaggcccccgggggcuacugccugacccgguggaugcugaucgaggccgagcucaagugcuucgggaacaccgccguggcgaagugcaacgagaagcacgacgaggaguucugcgacaugcugcgccuguucgacuucaacaagcaggccaucaagcggcucaagacgcccgcccagauguccauccagcugaucaacaaggccgugaacgcccugaucaacgaccagcucaucaugaagaaccaccuccgcgacaucaugggcauccccuacugcaacuacagccgguacugcuaccugaaccacaccgucaccgggaagaccucccugccccgcugcugccuggugagcaacggcuccuaccugaacgagacgcacuucagcgacgacaucgagcagcaggcggacaacaugaucaccgagaugcuccagaaggaguacauggaccggcagggcaagaccccgcuggggcugguggaccucuucgucuucuccaccagcuucuaccugaucuccaucuuccugcaccuggugaagaucccgacgcaccgccacaucgugggcaagcccugccccaagccccaccggcucaaccacauggggaucugcagcugcggccuguacaagcacccggggguccccgugaaguggaagcgcuga

SEQ ID NO: 31464 - RNA, 1473 nt, Artificial Sequence
  derived and/or modified CDS sequence (opt1) from LASV(GA391;Clade III)__CAA36645__GPCmut7
augggccagaucgugaccuucuuccaggaggucccccacgugaucgaggaggugaugaacaucguccugaucgcccucagcauccuggccauccugaaggggcucuacaacguggcgaccugcggccugaucgggcuggugacguuccuccugcuguccggccgcagcugcucccucaucuacaaggggaccuacgagcugcagacccuggagcucaacauggagacccugaacaugacgaugccgcugagcugcaccaagaacaacucccaccacuacauccgggucggcaacgagaccggccucgagcugacccugacgaacaccagcauccucaaccacaaguucugcaaccuguccgacgcccacaagcgcaaccuguacgaccacagccucauguccaucaucagcaccuuccaccuguccauccccaacuucaaccaguacgaggccaugagcugcgacuucaacgggggcaagaucaccgugcaguacaaccugucccacagcuucgccguggacgccgcggggcacugcggcacgcucgccaacgggguccugcagaccuucaugcggauggccuggggcggcuccuacaucgcccuggacagcgggcgcggcaacugggacugcaucaugaccuccuaccaguaccucaucauccagaacaccacgugggacgaccacugccaguucagccggcccucccccaucggguaccugggccugcucagccagcgcacccgggacaucuacaucagccgccggcugcugggcaccuucaccuggacgcucuccgacagcgaggggaacgagaccccgggcggguacugccugacccgcuggaugcugaucgaggcggagcucaagugcuucggcaacaccgccguggccaagugcaacgagaagcacgacgaggaguucugcgacaugcugcggcuguucgacuucaacaagcaggccauccgccggcucaagacgcccgcccagauguccauccagcugaucaacaaggcggugaacgcccugaucaacgaccagcucaucaugaagaaccaccuccgcgacaucauggggauccccuacugcaacuacagccgguacugcuaccugaaccacaccuccaccggcaagaccagccugccccgcugcugccugaucuccaacggcagcuaccugaacgagacgaaguucuccgacgacaucgagcagcaggccgacaacaugaucaccgagaugcuccagaaggaguacaucgaccggcaggggaagacgccccugggccuggucgaccuguucguguucagcaccuccuucuaccucaucagcaucuuccugcaccuggugaagaucccgacccaccgccacaucgucgggaagcccugccccaagccccaccggcucaaccacaugggcaucugcuccugcgggcuguacaagcagccgggcgugcccgugcgcuggaagcgguga

SEQ ID NO: 31465 - RNA, 1476 nt, Artificial Sequence
  derived and/or modified CDS sequence (opt1) from LASV(AV;Clade V)__CCA30314__GPCmut7
augggccagaucgugaccuucuuccaggaggucccccacgugaucgaggaggugaugaacaucguccugaucgcccucagcauccuggccgugcugaaggggcucuacaacaucgcgaccugcggccugaucgggcugaucacguuccuccugcugugcggccgcuccugcagcuccaaccucuacaaggggguguacgagcugcagagccuggaccucaacauggagacccugaacaugaccaugccgcuguccugcaccaagaacaacagccaccacuacauccgggucggcaacgacacgggccucgagcugacccugaccaacaccuccauccucaaccacaaguucugcaaccugagcgacgcccacaagaaggaccuguacgaccacgcccucauguccaucaucagcacguuccaccuguccauccccaacuucaaccaguacgaggccaugagcugcgacuucaacgggggcaagaucuccgugcaguacaaccugagccacuccuacgccaucgacgcggccaaccacugcgggaccguggccaacggcauccuccagaccuucaugcgcauggccuggggcgggagcuacaucgcgcuggacuccggccgggggaacugggacugcaucaugaccagcuaccaguaccugaucauccagaacacgaccugggagaaccacugccaguucucccgccccagccccaucggcuaccucgggcugcugagccagcggacccgcgacaucuacaucucccggcgccuccugggcaccuucacguggacccugagcgacuccgagggcaacgccacccccgggggcuacugccucacccgguggaugcugaucgaggccgagcugaagugcuucgggaacacggccgucgccaagugcaacgagaagcacgacgaggaguucugcgacaugcuccgccuguucgacuucaacaagcaggcgaucagccggcugaagucccccgcccagaugagcauccagcucaucaacaaggccgugaacgcccugaucaacgaccagcugaucaugaagaaccaccuccgcgacaucaugggcauccccuacugcaacuacuccaaguacugcuaccugaaccacaccaucaccgggaagaccagccugcccaagugcugccucguguccaacggcagcuaccugaacgagacgcacuucuccgacgacaucgagcagcaggccgacaacaugaucaccgagaugcugcagaaggaguacauggagcggcagggcaagaccccgcucgggcuggucgaccuguucguguucagcaccuccuucuaccugaucagcaucuuccuccgccuggugaagaucccgacgcaccggcacaucgucggcaagcccugccccaagccccaccgccugaaccacauggggaucugcuccugcggccucuacaagcagccgggggugcccgugcgguggaagcgcuga

SEQ ID NO: 31466 - RNA, 1473 nt, Artificial Sequence
  derived and/or modified CDS sequence (opt1) from LASV(Togo/2016/7082;Clade VI)__AMR44577__GPCmut7
augggccagaucaucaccuucuuccaggaggugccccacgucaucgaggaggugaugaacaucgugcugaucgcccucagccugcuggccauccucaagggggucuacaacguggcgaccugcggcaucaucgggcuggugacguuccuguuccucugcggccgcuccugcagccugaucuacaagggguccuacgagcugcagacccucgagcugaacauggagacccugaacaugaccaugccgcucagcugcacgaagaacuccagccaccacuacauccgggucggcaacgagaccggccuggagcugacccucaccaacacguccaucaucaaccacaaguucugcaaccugagcgacgcccacaagcgcaaccuguacgaccacgcccucauguccauccugagcaccuuccaccuguccauccccaacuucaaccaguacgaggccaugagcugcgacuucaacgggggcaagaucuccgugcaguacaaccucagccacgccuacgcgguggacgccgccgagcacugcgggaccgucgccaacggcgugcugcagaccuucaugcggauggcguggggcggguccuacaucgcccuggacagcggccgcgggaacugggacugcaucaugacguccuaccaguaccucaucauccagaacaccaccugggaggaccacugccaguucagccggcccucccccaucggcuaccuggggcugcucagccagcgcacccgggacaucuacaucagccgccggcugcugggcacguucaccuggacccucuccgacagcgagggcaacgagacccccgggggcuacugccugacgcgcuggaugcugaucgaggccgagcucaagugcuucgggaacaccgccguggccaagugcaacgagaagcacgacgaggaguucugcgacaugcugcggcuguucgacuucaacaagcaggcgauccagcgccucaagucccccgcccagaugagcauccagcugaucaacaaggccgucaacgcccugaucaacgaccagcucaucaugaagaaccaccuccgggacaugaugggcauccccuacugcaacuacuccaaguacugcuaccugaaccacaccagcuccgggcgcaccagccugcccaagugcugccugguguccaacggcagcuaccugaacgagacgcacuucuccgacgacaucgagcagcaggccgacaacaugaucaccgagaugcuccagaaggaguacaucgaccggcagggcaagaccccgcuggggcugguggaccucuucgucuucagcaccuccuucuaccugaucagcaucuuccugcaccugaucaagaucccgacgcaccgccacaucgugggcaagcccugccccaagccccaccggcucaaccacauggggaucugcuccugcggccuguacaagcagccgggggugcccacccgcuggaagcgguga

SEQ ID NO: 31467 - RNA, 1473 nt, Artificial Sequence
  derived and/or modified CDS sequence (opt1) from LASV(KAK-428;Clade n.d. (VII))__ANH09740__GPCmut7
augggccagaucgugaccuucuuccaggaggucccccacgugaucgaggaggugaugaacaucguccugaucgcccucagccugcuggccauccucaaggggcuguacaacuucgcgaccugcggcgugaucgggcugaucacguuccuccugcugugcggccgcuccugcagcgccaccuacaaggggcaguacgagcuccagacccuggagcugaacauggagucccucaacaugaccaugccgcugagcugcacgaagaacaacucccaccacuacauccgggccggcaacaacaccggccuggagcucacccugaccaacacgagcaucaucucccacaaguucugcaaccugagcgacgcccacaagaagaaccucuacgaccacacccugauguccaucaucaccaccuuccaccugagcauccccaacuucaaccaguacgaggccauguccugcgacuucaacgggggcaagaucagcauccaguacaaccucucccacagcuacgcgggggacgccgcccagcacugcggcacgguggccaacgggguccugcagaccuucaugcgcauggcguggggcggcuccuaccuggcccucgacagcgggcggcgcggcugggacugcaucaucuccagcuaccaguaccugaucauccagaacaccaccugggacgaccacugccaguucucccggcccagccccaucggguaccugggcuucgugagccagaagacgcgcgacaucuacaucucccggcgccuccugggcaccuucaccuggacccugagcgacuccgaggggcacgacaugccgggcggguacugccucacgcgguggaugcugaucgaggccgaccugaagugcuucggcaacaccgccguggccaagugcaacgagaagcacgacgaggaguucugcgacauguggcgccucuucgacuucaacaagcaggcgauccagcggcugaaggcccccgcccagaugaacauccagcugaucaacaaggccgucaacgcccucaucaacgaccagcugaugaugaagaaccaccuccgcgacaucauggggauccccuacugcaacuacagcaaguucugcuaccugaacaacaccaccacgggccggaccucccugccccgcugcugccugaucagcaacggcuccuaccucaacgagacccacuucagcgacgacaucgagcagcaggcggacaacaugaucaccgagaugcugcagaaggaguacauggaccggcaggggaagacgccccugggccucguggaccuguucguguucuccaccagcuucuaccugaucaccaucuuccuccaccuggucaagaucccgacccaccgccacaucguggggaagcccugccccaagccccaccggcugaaccacaugggcaucugcuccugcgggcuguacaagcagccgggcgugcccguccgcuggaagcgguga

SEQ ID NO: 31468 - RNA, 1473 nt, Artificial Sequence; identical to SEQ ID NO: 31462
  derived and/or modified CDS sequence (opt1) from LASV(Pinneo-NIG-1969;Clade I)__AIT17836__GPCmut7

SEQ ID NO: 31469 - RNA, 1473 nt, Artificial Sequence
  derived and/or modified CDS sequence (opt1) from LASV(ISTH0009-NIG-2011;Clade II)__AIT17404__GPCmut7
augggccagaucaucaccuucuuccaggaggugccccacgucaucgaggaggugaugaacaucgugcugaucgcccucagccugcuggccauccucaaggggaucuacaacgucgcgaccugcggccuguucgggcugguguccuuccuccugcugugcggccgcagcugcuccacgaccuacaaggggguguacgagcuccagacccuggagcuggacauggccagccucaacaugaccaugccgcuguccugcacgaagaacaacagccaccacuacaucauggucggcaacgagaccggccuggagcucacccugaccaacacguccaucaucaaccacaaguucugcaaccugagcgacgcccacaagaagaaccucuacgaccacgcccugauguccaucaucagcaccuuccaccuguccauccccaacuucaaccaguacgaggccaugagcugcgacuucaacgggggcaagaucuccgugcaguacaaccucagccacgcguacgccguggacgccgccaaccacugcgggaccaucgcgaacggcguccugcagaccuucaugcggauggccuggggcggguccuacaucgcccuggacagcggcaagggguccugggacugcaucaugacgagcuaccaguaccucaucauccagaacaccaccugggaggaccacugccaguucucccgccccagccccaucggcuaccuggggcugcucagccagcggacccgcgacaucuacaucucccggcgccugcugggcacguucaccuggacccucagcgacuccgagggcaacgagacccccgggggcuacugccugacgcgguggaugcugaucgaggccgagcucaagugcuucgggaacaccgccguggcgaagugcaacgagaagcacgacgaggaguucugcgacaugcugcgccuguucgacuucaacaagcaggccauccggcgccucaagacccccgcccagaugagcauccagcugaucaacaaggccgugaacgcccugaucaacgaccagcucaucaugaagaaccaccuccgggacaucaugggcaucccguacugcaacuacuccaaguacugcuaccugaaccacaccgucacggggaagaccagccugccccgcugcugccugguguccaacggcagcuaccugaacgagacccacuucuccgacgacaucgagcagcaggcggacaacaugaucaccgagcuccugcagaaggaguacauggaccggcagggcaagacgccccuggggcucguggaccuguucgucuucagcaccuccuucuaccugaucagcaucuuccugcaccucaucaagaucccgacccaccgccacaucaccggcaagcccugccccaagccccaccggcugaaccacauggggaucugcuccugcggccuguacaagcacccgggggugcccgugaaguggaagcgcuga

SEQ ID NO: 31470 - RNA, 1473 nt, Artificial Sequence
  derived and/or modified CDS sequence (opt1) from LASV(ISTH2010-NIG-2012;Clade II)__AIT17482__GPCmut7
augggccagaucaucaccuucuuccaggaggugccccacgucaucgaggaggugaugaacaucgugcugaucgcccucagccugcuggccauccucaaggggaucuacaacgucgcgaccugcggccuguucgggcugguguccuuccuccugcugugcggccgcagcugcuccacgaccuacaaggggguguacgagcuccagacccuggagcuggacauggccagccucaacaugaccaugccgcuguccugcacgaagaacaacagccaccacuacaucauggucggcaacgagaccggccuggagcucacccugaccaacacguccaucaucaaccacaaguucugcaaccugagcgacgcccacaagaagaaccucuacgaccacgcccugauguccaucaucagcaccuuccaccuguccauccccaacuucaaccaguacgaggccaugagcugcgacuucaacgggggcaagaucuccgugcaguacaaccucagccacgcguacgccguggacgccgccaaccacugcgggaccaucgcgaacggcguccugcagaccuucaugcggauggccuggggcggguccuacaucgcccuggacagcggcaagggguccugggacugcaucaugacgagcuaccaguaccucaucauccagaacaucaccugggaggaccacugccaguucucccgccccagccccaucggcuaccuggggcugcucagccagcggacccgcgacaucuacaucucccggcgccugcugggcaccuucacguggacccucagcgacuccgagggcaacgagacccccgggggcuacugccugacccgguggaugcugaucgaggccgagcucaagugcuucgggaacacggccguggcgaagugcaacgagaagcacgacgaggaguucugcgacaugcugcgccuguucgacuucaacaagcaggccauccggcgccucaagacccccgcccagaugagcauccagcugaucaacaaggccgugaacgcccugaucaacgaccagcucaucaugaagaaccaccuccgggacaucaugggcauccccuacugcaacuacuccaaguacugcuaccugaaccacaccgucaccgggaagacgagccugccccgcugcugccugguguccaacggcagcuaccugaacgagacccacuucuccgacgacaucgagcagcaggcggacaacaugaucaccgagcuccugcagaaggaguacaucgaccggcagggcaagaccccgcuggggcucguggaccuguucgucuucagcacguccuucuaccugaucagcaucuuccugcaccucgugaagaucccgacccaccgccacguggucggcaagcccugccccaagccccaccggcugaaccacauggggaucugcuccugcggccuguacaagcacccgggggugcccgugaaguggaagcgcuga

SEQ ID NO: 31471 - RNA, 1473 nt, Artificial Sequence
  derived and/or modified CDS sequence (opt1) from LASV(Lassa virus/H.sapiens-wt/NGA/2015/ISTH_0543;Clade II)__AVO03639__GPCmut7
augggccagaucaucaccuucuuccaggaggugccccacgucaucgaggaggugaugaacaucgugcugaucgcccucagccugcuggccauccucaaggggaucuacaacgucgcgaccugcggccuguucgggcugguguccuuccuccugcugugcggccgcagcugcuccacgaccuacaaggggguguacgagcuccagacccuggagcuggacauggccaaccucaacaugaccaugccgcugagcugcacgaagaacaacucccaccacuacaucauggucggcaacgagaccggccuggagcucacccugaccaacacgagcaucaucaaccacaaguucugcaaccuguccgacgcccacaagaagaaccucuacgaccacgcccugaugagcaucaucuccaccuuccaccugagcauccccaacuucaaccaguacgaggccauguccugcgacuucaacgggggcaagaucagcgugcaguacaaccucucccacaccuacgcgguggacgccgccaaccacugcgggaccaucgccaacggcguccugcagacguucaugcggauggcguggggcgggagcuacaucgcccuggacuccggcaaggggagcugggacugcaucaugaccuccuaccaguaccucgugauccagaacaccaccugggaggaccacugccaguucagccgccccucccccaucggcuaccuggggcugcucagccagcggacgcgcgacaucuacaucagccggcgccugcugggcaccuucaccuggacccucuccgacagcgagggcaacgagacgcccgggggcuacugccugacccgguggaugcugaucgaggccgagcucaagugcuucgggaacaccgccguggccaagugcaacgagaagcacgacgaggaguucugcgacaugcugcgccuguucgacuucaacaagcaggcgauccggcgccucaagacccccgcccagauguccauccagcugaucaacaaggccgucaacgcccugaucaacgaccagcucaucaugaagaaccaccuccgggacaucaugggcauccccuacugcaacuacagcaaguacugcuaccugaaccacacggugaccgggaagaccucccugccccgcugcugccuggugagcaacggcuccuaccugaacgagacccacuucagcgacgacaucgagcagcaggccgacaacaugaucacggagcuccugcagaaggaguacaucgaccggcagggcaagaccccgcuggggcucgucgaccuguucguguucuccaccagcuucuaccugaucuccaucuuccugcaccucgugaagaucccgacccaccgccacaucacgggcaagcccugccccaagccccaccggcugaaccacauggggaucugcagcugcggccuguacaagcacccggggguccccgugaaguggaagcgcuga

SEQ ID NO: 31472 - RNA, 1473 nt, Artificial Sequence
  derived and/or modified CDS sequence (opt1) from LASV(Lassa virus/H.sapiens-wt/NGA/2016/ISTH_0009;Clade II)__AVO03571__GPCmut7
augggccagaucaucaccuucuuccaggaggugccccacgucaucgaggaggugaugaacaucgugcugaucgcccucagccugcuggccauccucaaggggaucuacaacgucgcgaccugcggccugcuggggcucguguccuuccugcugcucugcggccgcagcugcuccacgaccuacaaggggguguacgagcugcagacccuggagcucgacauggccagccugaacaugaccaugccgcuguccugcacgaagaacaacagccaccacuacaucauggucggcaacgagaccggccucgagcugacccugaccaacacguccaucaucaaccacaaguucugcaaccucagcgacgcccacaagaagaaccuguacgaccacgcccugauguccaucaucagcaccuuccaccucuccauccccaacuucaaccaguacgaggccaugagcugcgacuucaacgggggccggaucuccgugcaguacaaccugagccacuccuacgcgguggacgccgccaaccacugcgggaccaucgccaacggcguccugcagaccuucaugcgcauggcguggggcgggagcuacaucgcccucgacuccggcaaggggagcugggacugcaucaugacguccuaccaguaccugaucauccagaacaccaccugggaggaccacugccaguucagccggcccagccccaucggcuaccuggggcuccugucccagcgcacccgggacaucuacaucagccgccggcugcucggcacguucaccuggacccuguccgacagcgagggcaacgagacccccgggggcuacugccugacgcgcuggaugcucaucgaggccgagcugaagugcuucgggaacaccgccguggccaagugcaacgagaagcacgacgaggaguucugcgacaugcugcggcuguucgacuucaacaagcaggcgauccgccggcugaagacccccgcccagauguccauccagcugaucaacaaggccgugaacgcccucaucaacgaccagcugaucaugaagaaccaccuccgcgacaucaugggcaucccguacugcaacuacagcaaguacugcuaccucaaccacaccgucacggggaagaccucccugccccggugcugccuggugagcaacggcuccuaccucaacgagacccacuucagcgacgacaucgagcagcaggccgacaacaugaucaccgagcugcugcagaaggaguacaucgaccgccagggcaagacgccccucgggcugguggaccuguucgucuucuccaccagcuucuaccugaucuccaucuuccuccaccuggugaagaucccgacccaccggcacaucaccggcaagcccugccccaagccccaccgccugaaccacauggggaucugcagcugcggccucuacaaccacccgggggugcccgucaaguggaagcgguga

SEQ ID NO: 31473 - RNA, 1473 nt, Artificial Sequence
  derived and/or modified CDS sequence (opt1) from LASV(Lassa virus/H.sapiens-wt/NGA/2016/ISTH_0017;Clade II)__AVO03567__GPCmut7
augggccagaucaucaccuucuuccaggaggugccccacgucaucgaggaggugaugaacaucgugcugaucgcccucagccugcuggccauccucaaggggaucuacaacgucgcgaccugcggccuguucgggcugguguccuuccuccugcugugcggccgcagcugcuccacgaccuacaaggggguguacgagcuccagacccuggagcuggacauggccagccucaacaugaccaugccgcuguccugcacgaagaacaacagccaccacuacaucauggucggcaacgagaccggccuggagcucacccugaccaacacguccaucaucaaccacaaguucugcaaccugagcgacgcccacaagaagaaccucuacgaccacgcccugauguccaucaucagcaccuuccaccuguccauccccaacuucaaccaguacgaggccaugagcugcgacuucaacgggggcaagaucuccgugcaguacaaccucagccacaccuacgcgaucgacgccgccaaccacugcgggaccaucgccaacggcgugcugcagacguucaugcggauggcguggggcggguccuacaucgcccuggacagcggcaagggguccugggacugcaucaugaccagcuaccaguaccucaucauccagaacaccaccugggaggaccacugccaguucucccgccccagccccaucggcuaccuggggcugcucagccagcggacgcgcgacaucuacaucucccggcgccugcugggcaccuucaccuggacccucagcgacuccgagggcaacgagacgcccgggggcuacugccugacccgguggaugcugaucgaggccgagcucaagugcuucgggaacaccgccgucgccaagugcaacgagaagcacgacgaggaguucugcgacaugcugcgccuguucgacuucaacaagcaggcgauccggcgccucaagacccccgcccagaugagcauccagcugaucaacaaggccgugaacgcccugaucaacgaccagcucaucaugaagaaccaccuccgggacaucaugggcauccccuacugcaacuacuccaaguacugcuaccugaaccacacggugaccgggaagaccagccugccccgcugcugccuggucuccaacggcagcuaccugaacgagacccacuucuccgacgacaucgagcagcaggccgacaacaugaucacggagcuccugcagaaggaguacauggaccggcagggcaagaccccgcuggggcucguggaccuguucguguucagcaccuccuucuaccugaucagcaucuuccugcaccucguccgcaucccgacccaccggcacgugaucggcaagcccugccccaagccccaccgccugaaccacauggggaucugcuccugcggccuguacaagcacccgggggugcccgucaaguggaagcgguga

SEQ ID NO: 31474 - RNA, 1473 nt, Artificial Sequence
  derived and/or modified CDS sequence (opt1) from LASV(Lassa virus/H.sapiens-wt/NGA/2018/ISTH_0959;Clade II)__AVV65099__GPCmut7
augggccagaucaucaccuucuuccaggaggugccccacgucaucgaggaggugaugaacaucgugcugaucgcccucagccugcuggccauccucaaggggaucuacaacgucgugaccugcggccuguucgggcugguguccuuccuccugcugugcggccgcagcugcuccacgaccuacaagggggucuacgagcuccagacccuggagcuggacauggcgagccucaacaugaccaugccgcuguccugcacgaagaacaacagccaccacuacaucauggugggcaacgagaccggccuggagcucacccugaccaacacguccaucaucaaccacaaguucugcaaccugagcgacgcccacaagaagaaccucuacgaccacgcccugauguccaucaucagcaccuuccaccuguccauccccaacuucaaccaguacgaggccaugagcugcgacuucaacgggggcaagaucuccgugcaguacaaccucagccacgccuacgcgaucgacgccgccaaccacugcgggaccaucgccaacggcguccugcagaccuucaugcggauggcguggggcggguccuacaucgcccuggacagcggcaagggguccugggacugcaucaugacgagcuaccaguaccucaucauccagaacaccaccugggaggaccacugccaguucucccgccccagccccaucggcuaccuggggcugcucagccagcggacccgcgacaucuacaucucccggcgccugcugggcacguucaccuggacccucagcgacuccgagggcaacgagacccccgggggcuacugccugacgcgguggaugcugaucgaggccgagcucaagugcuucgggaacaccgccguggccaagugcaacgagaagcacgacgaggaguucugcgacaugcugcgccuguucgacuucaacaagcaggcgauccggcgccucaagacccccgcccagaugagcauccagcugaucaacaaggccgugaacgcccugaucaacgaccagcucaucaugaagaaccaccuccgggacaucaugggcaucccguacugcaacuacuccaaguacugcuaccugaaccacaccgucacggggaagaccagccugccccgcugcugccugguguccaacggcagcuaccugaacgagacccacuucuccgacgacaucgagcagcaggccgacaacaugaucaccgagcuccugcagaaggaguacaucgaccggcagggcaagacgccccuggggcucguggaccuguucgucuucagcaccuccuucuaccugaucagcaucuuccugcaccucgugaagaucccgacccaccgccacgugaucggcaagcccugccccaagccccaccggcugaaccacauggggaucugcuccugcggccuguacaagcacccggggguccccgugaaguggaagcgcuga

SEQ ID NO: 31475 - RNA, 1473 nt, Artificial Sequence
  derived and/or modified CDS sequence (opt1) from LASV(LASV003-NIG-2008;Clade II)__AIT17580__GPCmut7
augggccagaucaucaccuucuuccaggaggugccccacgucaucgaggaggugaugaacaucgugcugaucgcccucagccugcuggccauccucaaggggaucuacaacgucgcgaccugcggccuguucgggcugguguccuuccuccugcugugcggccgcagcugcuccacgaccuacaaggggguguacgagcuccagacccuggagcuggacauggccagccucaacaugaccaugccgcuguccugcacgaagaacaacagccaccacuacaucauggucggcaacgagaccggccuggagcucacccugaccaacacguccaucaucaaccacaaguucugcaaccugagcgacgcccacaagaagaaccucuacgaccacgcccugauguccaucaucagcaccuuccaccuguccauccccaacuucaaccaguacgaggccaugagcugcgacuucaacgggggcaagaucuccgugcaguacaaccucagccacaccuacgcgguggacgccgccaaccacugcgggaccaucgccaacggcguccugcagacguucaugcggauggcguggggcggguccuacaucgcccuggacagcggcaagggguccugggacugcaucaugaccagcuaccaguaccucaucauccagaacaccaccugggaggaccacugccaguucucccgccccagccccaucggcuaccuggggcugcucagccagcggacgcgcgacaucuacaucucccggcgccugcugggcaccuucaccuggacccucagcgacuccgagagcaacgagacgccgggcggguacugccugacccgguggaugcugaucgaggccgagcucaagugcuucggcaacaccgccguggccaagugcaacgagaagcacgacgaggaguucugcgacaugcugcgccuguucgacuucaacaagcaggcgauccggcgccucaaggcccccgcccagauguccauccagcugaucaacaaggccgugaacgcccugaucaacgaccagcucaucaugaagaaccaccuccgggacaucauggggauccccuacugcaacuacagcaaguacugcuaccugaaccacaccgucacgggccgcaccucccugccccggugcugccuggugagcaacggguccuaccugaacgagacccacuucagcgacgacaucgagcagcaggcggacaacaugaucaccgagcuccugcagaaggaguacauggaccgccagggcaagacgccccugggccucguggaccuguucgucuucuccaccagcuucuaccugaucuccaucuuccugcaccucgugaagaucccgacccaccggcacgugaucgggaagcccugccccaagccccaccgccugaaccacaugggcaucugcagcugcgggcuguacaagcacccgggcguccccgugaaguggaagcgguga

SEQ ID NO: 31476 - RNA, 1473 nt, Artificial Sequence
  derived and/or modified CDS sequence (opt1) from LASV(LASV035-NIG-2009;Clade II)__AIT17588__GPCmut7
augggccagaucaucaccuucuuccaggaggugccccacgucaucgaggaggugaugaacaucgugcugaucgcccucagccugcuggccauccucaaggggaucuacaacgucgcgaccugcggccuguucgggcugguguccuuccuccugcugugcggccgcagcugcuccacgaccuacaaggggguguacgagcuccagacccuggagcuggacauggccagccucaacaugaccaugccgcuguccugcacgaagaacaacagccaccacuacaucauggucggcaacgagaccggccuggagcucacccugaccaacacguccaucaucaaccacaaguucugcaaccugagcgacgcccacaagaagaaccucuacgaccacgcccugauguccaucaucagcaccuuccaccuguccauccccaacuucaaccaguacgaggccaugagcugcgacuucaacgggggcaagaucuccgugcaguacaaccucagccacgcguacgccguggacgccgccaaccacugcgggaccaucgcgaacggcguccugcagaccuucaugcggauggccuggggcggguccuacaucgcccuggacagcggcaagggguccugggacugcaucaugacgagcuaccaguaccucaucauccagaacaccaccugggaggaccacugccaguucucccgccccagccccaucggcuaccuggggcugcucagccagcggacccgcgacaucuacaucucccggcgccugcugggcacguucaccuggacccucagcgacuccgagggcaacgagacccccgggggcuacugccugacgcgguggaugcugaucgaggccgagcucaagugcuucgggaacaccgccguggcgaagugcaacgagaagcacgacgaggaguucugcgacaugcugcgccuguucgacuucaacaagcaggccauccggcgccucaaggcccccgcccagaugagcauccagcugaucaacaaggccgugaacgcgcugaucaacgaccagcucaucaugaagaaccaccuccgggacaucaugggcauccccuacugcaacuacuccaaguacugcuaccugaaccacaccgucaccgggaagacgagccugccccgcugcugccugguguccaacggcagcuaccugaacgagacccacuucuccgacgacaucgagcagcaggccgacaacaugaucaccgagcuccugcagaaggaguacaucgaccggcagggcaagaccccgcuggggcucguggaccuguucgucuucagcacguccuucuaccugaucagcaucuuccugcaccucgugaagaucccgacccaccgccacgugaucggcaagcccugccccaagccccaccggcugaaccacauggggaucugcuccugcggccuguacaagcacccggggguccccgugaaguggaagcgcuga

SEQ ID NO: 31477 - RNA, 1473 nt, Artificial Sequence
  derived and/or modified CDS sequence (opt1) from LASV(LASV1000-NIG-2009;Clade II)__AIT17782__GPCmut7
augggccagaucaucaccuucuuccaggaggugccccacgucaucgaggaggugaugaacaucgugcugaucgcccucagccugcuggccauccucaaggggaucuacaacgucgcgaccugcggccuguucgggcugguguccuuccuccugcugugcggccgcagcugcuccacgaccuacaaggggguguacgagcuccagacccuggagcuggacauggccagccucaacaugaccaugccgcuguccugcacgaagaacaacagccaccacuacaucauggucggcaacgagaccggccuggagcucacccugaccaacacguccaucaucaaccacaaguucugcaaccugagcgacgcccacaagaagaaccucuacgaccacgcccugauguccaucaucagcaccuuccaccuguccauccccaacuucaaccaguacgaggccaugagcugcgacuucaacgggggcaagaucuccgugcaguacaaccucagccacaccuacgcgguggacgccgccaaccacugcgggaccaucgccaacggcguccugcagacguucaugcggauggcguggggcggguccuacaucgcccuggacagcggcaagggguccugggacugcaucaugaccagcuaccaguaccucaucauccagaacaccaccugggaggaccacugccaguucucccgccccagccccaucggcuaccuggggcugcucagccagcggacgcgcgacaucuacaucucccggcgccugcugggcaccuucaccuggacccucagcgacuccgagggcaacgagacgcccgggggcuacugccugacccgguggaugcugaucgaggccgagcucaagugcuucgggaacaccgccguggccaagugcaacgagaagcacgacgaggaguucugcgacaugcugcgccuguucgacuucaacaagcaggcgaucaagcggcucaagacccccgcccagaugagcauccagcugaucaacaaggccgugaacgcccugaucaacgaccagcucaucaugaagaaccaccuccgcgacaucaugggcauccccuacugcaacuacuccaaguacugcuaccugaaccacacggucaccgggaagaccagccugccccggugcugccugguguccaacggcagcuaccugaacgagacccacuucuccgacgacaucgagcagcaggccgacaacaugaucacggagcuccugcagaaggaguacaucgaccgccagggcaagaccccgcuggggcucguggaccuguucgucuucagcaccuccuucuaccugaucagcaucuuccugcaccucgugaagaucccgacccaccggcacguggucggcaagcccugccccaagccccaccgccugaaccacauggggaucugcuccugcggccuguacaagcacccgggggugcccgugaaguggaagcgguga

SEQ ID NO: 31478 - RNA, 1473 nt, Artificial Sequence
  derived and/or modified CDS sequence (opt1) from LASV(LASV221-NIG-2010;Clade II)__AIT17624__GPCmut7
augggccagaucaucaccuucuuccaggaggugccccacgucaucgaggaggugaugaacaucgugcugaucgcccucagccugcuggccauccucaaggggaucuacaacgucgcgaccugcggccuguucgggcugguguccuuccuccugcugugcggccgcagcugcuccacgaccuacaaggggguguacgagcuccagacccuggagcuggacauggccagccucaacaugaccaugccgcuguccugcacgaagaacaacagccaccacuacaucauggucggcaacgagaccggccuggagcucacccugaccaacacguccaucaucaaccacaaguucugcaaccugagcgacgcccacaagaagaaccucuacgaccacgcccugauguccaucaucagcaccuuccaccuguccauccccaacuucaaccaguacgaggccaugagcugcgacuucaacgggggcaagaucuccgugcaguacaaccucagccacaccuacgcgaucgacgccgccaaccacugcgggaccaucgccaacggcgugcugcagacguucaugcggauggcguggggcggguccuacaucgcccuggacagcggcaagggguccugggacugcaucaugaccagcuaccaguaccucaucauccagaacaccaccugggaggaccacugccaguucucccgccccagccccaucggcuaccuggggcugcucagccagcggacgcgcgacaucuacaucucccggcgccugcugggcaccuucaccuggacccucagcgacuccgagggcaacgagacgcccgggggcuacugccugacccgguggaugcugaucgaggccgagcucaagugcuucgggaacaccgccgucgccaagugcaacgagaagcacgacgaggaguucugcgacaugcugcgccuguucgacuucaacaagcaggcgauccggcgccucaagacccccgcccagaugagcauccagcugaucaacaaggccgugaacgcccugaucaacgaccagcucaucaugaagaaccaccuccgggacaucaugggcauccccuacugcaacuacuccaaguacugcuaccugaaccacacggugaccgggaagaccagccugccccgcugcugccuggucuccaacggcagcuaccugaacgagacccacuucuccgacgacaucgagcagcaggccgacaacaugaucacggagaugcuccagaaggaguacauggaccggcagggcaagaccccgcuggggcugguggaccucuucguguucagcaccuccuucuaccugaucagcaucuuccugcaccuggucaagaucccgacccaccgccacgugaucggcaagcccugccccaagccccaccggcucaaccacauggggaucugcuccugcggccuguacaagcacccgggggugcccgucaaguggaagcgcuga

SEQ ID NO: 31479 - RNA, 1473 nt, Artificial Sequence
  derived and/or modified CDS sequence (opt1) from LASV(LASV237-NIG-2010;Clade II)__AIT17638__GPCmut7
augggccagaucaucaccuucuuccaggaggugccccacgucaucgaggaggugaugaacaucgugcugaucgcccucagccugcuggccauccucaaggggaucuacaacgucgcgaccugcggccuguucgggcugguguccuuccuccugcugugcggccgcagcugcuccacgaccuacaaggggguguacgagcuccagacccuggagcuggacauggccagccucaacaugaccaugccgcuguccugcacgaagaacaacagccaccacuacaucauggucggcaacgagaccggccuggagcucacccugaccaacacguccaucaucaaccacaaguucugcaaccugagcgacgcccacaagaaggaccucuacgaccacgcccugauguccaucaucagcaccuuccaccuguccauccccaacuucaaccaguacgaggccaugagcugcgacuucaacgggggcaagaucuccgugcaguacaaccucagccacaccuacgcgguggacgccgccaaccacugcgggaccaucgccaacggcguccugcagacguucaugcggauggcguggggcggguccuacaucgcccuggacagcggcaagggguccugggacugcaucaugaccagcuaccaguaccucaucauccagaacaccaccugggaggaccacugccaguucucccgccccagccccaucggcuaccuggggcugcucagccagcggacgcgcgacaucuacaucucccggcgccugcugggcaccuucaccuggacccucagcgacuccgagggcaacgagacgcccgggggcuacugccugacccgguggaugcugaucgaggccgagcucaagugcuucgggaacaccgccguggccaagugcaacgagaagcacgacgaggaguucugcgacaugcugcgccuguucgacuucaacaagcaggcgauccggcgccucaagacccccgcccagaugagcauccagcugaucaacaaggccgugaacgcccugaucaacgaccagcucaucaugaagaaccaccuccgggacaucaugggcauccccuacugcaacuacuccaaguacugcuaccugaaccacacggucaccgggaagaccagccugccccgcugcugccugguguccaacggcagcuaccugaacgagacccacuucuccgacgacaucgagcagcaggccgacaacaugaucacggagcuccugcagaaggaguacauggaccggcagggcaagaccccgcuggggcucguggaccuguucgucuucagcaccuccuucuaccugaucagcaucuuccugcaccucaucaagaucccgacccaccgccacaucacgggcaagcccugccccaagccccaccggcugaaccacauggggaucugcuccugcggccuguacaagcacccgggggugcccgugaaguggaagcgcuga

SEQ ID NO: 31480 - RNA, 1473 nt, Artificial Sequence
  derived and/or modified CDS sequence (opt1) from LASV(LASV253-NIG-2011;Clade II)__AIT17670__GPCmut7
augggccagaucaucaccuucuuccaggaggugccccacgucaucgaggaggugaugaacaucgugcugaucgcccucagccugcuggccauccucaaggggaucuacaacgucgcgaccugcggccuguucgggcugguguccuuccuccugcugugcggccgcagcugcuccacgaccuacaaggggguguacgagcuccagacccuggagcuggacauggccagccucaacaugaccaugccgcuguccugcacgaagaacaacagccaccacuacaucauggucggcaacgagaccggccuggagcucacccugaccaacacguccaucaucaaccacaaguucugcaaccugagcgacgcccacaagaagaaccucuacgaccacgcccugauguccaucaucagcaccuuccaccuguccauccccaacuucaaccaguacgaggccaugagcugcgacuucaacgggggcaagaucuccgugcaguacaaccucagccacaccuacgcgguggacgccgccaaccacugcgggaccaucgccaacggcguccugcagacguucaugcggauggcguggggcggguccuacaucgcccuggacagcggcaagggguccugggacugcaucaugaccagcuaccaguaccucaucauccagaacaccaccugggaggaccacugccaguucucccgccccagccccaucggcuaccuggggcugcucagccagcggacgcgcgacaucuacaucucccggcgccugcugggcaccuucaccuggacccucagcgacuccgagggcaacgagacgcccgggggcuacugccugacccgguggaugcugaucgaggccgagcucaagugcuucgggaacaccgccguggccaagugcaacgagaagcacgacgaggaguucugcgacaugcugcgccuguucgacuucaacaagcaggcgauccggcgccucaaggcccccgcccagaugagcauccagcugaucaacaaggccgugaacgcccugaucaacgaccagcucaucaugaagaaccaccuccgggacaucaugggcaucccguacugcaacuacuccaaguacugcuaccugaaccacaccgucacggggcgcaccagccugccccggugcugccugguguccaacggcagcuaccugaacgagacccacuucuccgacgacaucgagcagcaggcggacaacaugaucaccgagcuccugcagaaggaguacaucgaccgccagggcaagacgccccuggggcucguggaccuguucgucuucagcaccuccuucuaccugaucagcaucuuccugcaccucgugaagaucccgacccaccggcacaucaucggcaagcccugccccaagccccaccgccugaaccacauggggaucugcuccugcggccuguacaagcacccgggggugcccgucaaguggaagcgguga

SEQ ID NO: 31481 - RNA, 1473 nt, Artificial Sequence
  derived and/or modified CDS sequence (opt1) from LASV(LASV254-NIG-2011;Clade II)__AIT17674__GPCmut7
augggccagaucaucaccuucuuccaggaggugccccacgucaucgaggaggugaugaacaucgugcugaucgcccucagccugcuggccauccucaaggggaucuacaacgucgcgaccugcggccuguucgggcugguguccuuccuccugcugugcggccgcagcugcuccacgaccuacaaggggguguacgagcuccagacccuggagcuggacaugaccaaccucaacaugacgaugccgcugagcugcaccaagaacaacucccaccacuacaucauggucggcaacgagaccggccuggagcucacccugacgaacaccagcaucaucaaccacaaguucugcaaccuguccgacgcccacaagaagaaccucuacaaccacgcccugaugagcaucaucuccaccuuccaccugagcauccccaacuucaaccaguacgaggccauguccugcgacuucaacgggggcaagaucagcgugcaguacaaccucucccacagcuacgccguggacgcggccaaccacugcgggaccaucgccaacggcguccugcagacguucaugcggauggccuggggcggguccuacaucgcgcuggacagcggcaaggggaacugggacugcaucaugaccuccuaccaguaccucaucauccagaacaccaccugggaggaccacugccaguucagccgccccucccccaucggcuaccuggggcugcucagccagcggacgcgcgacaucuacaucagccggcgccugcugggcaccuucaccuggacccucuccgacagcgagggcaacgagacgcccgggggcuacugccugacccgguggaugcugaucgaggccgagcucaagugcuucgggaacaccgccguggccaagugcaacgagaagcacgacgaggaguucugcgacaugcugcgccuguucgacuucaacaagcaggccauccggcgccucaagacccccgcgcaggccaacauccagcugaucaacaaggccgugaacgcccugaucaacgaccagcucaucaugaagaaccaccuccgggacaucaugggcauccccuacugcaacuacuccaaguacugcuaccugaaccacacggucaccgggaagaccagccugccccgcugcugccugguguccaacggcagcuaccugaacgagacccacuucuccgacgacaucgagcagcaggccgacaacaugaucacggagcuccugcagaaggaguacauggaccggcagggcaagaccccgcuggggcucguggaccuguucgucuucagcaccuccuucuaccugaucagcaucuuccugcaccucgugaagaucccgacccaccgccacgugaucggcaagcccugccccaagccccaccggcugaaccacauggggaucugcuccugcggccuguacaagcacccggggguccccgugaaguggaagcgcuga

SEQ ID NO: 31482 - RNA, 1473 nt, Artificial Sequence
  derived and/or modified CDS sequence (opt1) from LASV(Nig08-A19;Clade III)__ADU56618__GPCmut7
augggccagaucgugaccuucuuccaggaggucccccacgugaucgaggaggugaugaacaucguccugaucgcccucagcauccuggccauccugaaggggcucuacaacaucgcgaccugcggccugaucgggcuggugacguuccuccugcuguccggccgcagcugcuccaugaccuacaaggggguguacgagcuccagacccuggagcugaacaugaacacccucaacaugacgaugccgcugagcugcaccaagaacaacucccaccacuacaucauggucggcaacgagaccggccuggagcucacccugacgaacaccagccugcuccaccacaaguucugcaaccuguccgacgcccacaagaagaaccuguacgaccacacccucaugagcaucaucuccaccuuccaccugagcauccccaacuucaaccaguacgaggccauguccugcgacuucaacgggggcaagaucacggugcaguacaaccugagccacuccuacgccaucgacgccgcgaaccacugcgggaccguggccaacggcguccuccagaccuucaugcggauggccuggggcgggagcuacaucgcccuggacuccggccgcgggaagugggacugcaucaugaccagcuaccaguaccugaucauccagaacacgaccugggaggaccacugccaguucucccggcccagccccaucggcuaccucgggcugcugucccagcgcacccgggacaucuacaucagccgccggcuccugggcaccuucacguggacccugagcgacuccgagggcaacgagacccccgggggcuacugccucacccgcuggaugcugaucgaggcggagcugaagugcuucgggaacacggccguggccaagugcaacgagaagcacgacgaggaguucugcgacaugcuccggcuguucgacuucaacaagcaggccauccgccggcugaaggcccccgcgcagaugagcauccagcucaucaacaaggccgugaacgcccugaucaacgaccagcugaucaugaagaaccaccuccgcgacaucaugggcauccccuacugcaacuacuccaaguacugcuaccugaaccacaccagcaccgggcggaccucccugccccgcugcugccucgucagcaacggcuccuaccugaacgagacgcacuucagcgacgacaucgagcagcaggccgacaacaugaucaccgagaugcugcagaaggaguaccucgaccggcagggcaagaccccgcuggggcugguggaccuguucguguucuccaccagcuucuaccucaucuccaucuuccugcaccuggucaagaucccgacgcaccgccacaucgugggcaagcccugccccaagccccaccggcucaaccacauggggaucugcagcugcggccuguacaagcagccgggggugcccguccgcuggaagcgguga

SEQ ID NO: 31483 - RNA, 1476 nt, Artificial Sequence
  derived and/or modified CDS sequence (opt1) from LASV(G1180-SLE-2010;Clade IV)__AIT17168__GPCmut7
augggccagaucgugaccuucuuccaggaggucccccacgugaucgaggaggugaugaacaucguccugaucgcccucagcauccuggccgugcugaaggggcucuacaacuucgcgaccugcggccugguggggcugcucaccuuccugcugcucugcggccgcuccugcaccgccagccgguacaagggggucuacgagcugcagacccuggagcucaacauggagacccugaacaugacgaugccgcuguccugcaccaagaacaacagccaccacuacaucauggugggcaacgagaccggccucgagcugacccugacgaacaccuccaucaucaaccacaaguucugcaaccucagcgacgcccacaagaagaaccuguacgaccacgcccugauguccaucaucagcaccuuccaccucuccauccccaacuucaaccaguacgaggccaugagcugcgacuucaacgggggcaagaucuccgugcaguacaaccugagccacuccuacgcgggggacgccgccaaccacugcggcaccgucgccaacggggugcugcagacguucaugcgcauggcguggggcggcagcuacaucgcccucgacuccgggcacggcagcugggacugcaucaugaccuccuaccaguaccugaucauccagaacaccaccugggaggaccacugccaguucagccggcccucccccaucggguaccugggccuccugagccagcgcacgcgggacaucuacaucagccgccggcugcucggcaccuucaccuggacccuguccgacagcgaggggaaggacacgccgggcggguacugccugacccgcuggaugcucaucgaggccgagcugaagugcuucggcaacaccgccguggccaagugcaacgagaagcacgacgaggaguucugcgacaugcugcggcuguucgacuucaacaagcaggcgauccagcgccugaaggcccccgcccagauguccauccagcugaucaacaaggccgucaacgcccucaucaacgaccagcugaucaugaagaaccaccuccgggacaucauggggauccccuacugcaacuacagcaaguacugcuaccucaaccacaccacgaccggcaagaccucccugcccaagugcugccuggugagcaacggcuccuaccucaacgagacccacuucagcgacgacaucgagcagcaggcggacaacaugaucacggagaugcugcagaaggaguacauggagcgccaggggaagacgccccugggccucguggaccuguucgucuucuccaccagcuucuaccugaucuccaucuuccugcaccucgugaagaucccgacccaccggcacaucgugggcaagagcugccccaagccccaccgccugaaccacauggggaucugcuccugcgggcuguacaagcagcccggcgucccggugaaguggaagcgguga

SEQ ID NO: 31484 - RNA, 1476 nt, Artificial Sequence
  derived and/or modified CDS sequence (opt1) from LASV(G1442-SLE-2011;Clade IV)__AIT17180__GPCmut7
augggccagaucgugaccuucuuccaggaggucccccacgugaucgaggaggugaugaacaucguccugaucgcccucagcauccuggccgugcugaaggggcucuacaacguggcgaccugcggccugaucgggcuggucacguuccuccugcugugcggccgcuccugcaccaccacccucuacaaggggguguacgagcugcagacgcuggagcucaacauggagacccugaacaugaccaugccgcugagcugcaccaagaacaacucccaccacuacauccgggugggcaacgagacgggccucgagcugacccugaccaacaccagcaucaucaaccacaaguucugcaaccucuccgacgcccacaagaagaaccuguacgaccacgcccugaugagcaucaucuccacguuccaccucagcauccccaacuucaaccaguacgaggccauguccugcgacuucaacgggggcaagaucagcguccaguacaaccugucccacagcuacgccggggacgcggccaaccacugcggcaccguggccaacggggugcugcagaccuucaugcgcauggccuggggcggcuccuacaucgcgcucgacagcgggcggggcaacugggacugcaucaugaccuccuaccaguaccugaucauccagaacacgaccugggacgaccacugccaguucagccgccccucccccaucggguaccugggccuccugagccagcggacccgcgacgucuacaucucccggcgccugcucggcaccuucacguggacccugagcgacagcgaggggaaggacaccccgggcggguacugccugacccgguggaugcucaucgaggccgagcugaagugcuucggcaacacggccguggccaagugcaacgagaagcacgacgaggaguucugcgacaugcugcgccucuucgacuucaacaagcaggccauccagcggcugaaggcgcccgcccagauguccauccagcugaucaacaaggccgugaacgcccucaucaacgaccagcugaucaugaagaaccaccuccgcgacaucauggggauccccuacugcaacuacagcaaguacugcuaccugaacaacaccgccaccggcaagaccucccugcccaagugcugccugaucagcaacggcuccuaccucaacgagacgcacuucagcgacgacaucgagcaggaggcggacaacaugaucaccgagaugcugcagaaggaguacauggagcggcaggggaagacgccccugggccucgucgaccuguucguguucuccaccagcuucuaccugaucuccaucuuccugcaccucgugaagaucccgacccaccgccacaucgucggcaagagcugccccaagccccaccggcugaaccacauggggaucugcuccugcgggcuguacaagcagcccggcgugccggugcgcuggaagcgguga

SEQ ID NO: 31485 - RNA, 1476 nt, Artificial Sequence
  derived and/or modified CDS sequence (opt1) from LASV(G3010-SLE-2013;Clade IV)__AIT17344__GPCmut7
augggccagaucgugaccuucuuccaggaggucccccacgugaucgaggaggugaugaacaucguccugaucgcccucagcauccuggccgugcugaaggggcucuacaacuucgcgaccugcggccugguggggcuggucacguuccuccugcugugcggccgcuccugcaccaccagccucuacaaggggguguacgagcugcagacccuggagcucaacauggagacgcugaacaugaccaugccgcuguccugcaccaagaacaacagccaccacuacaucauggugggcaacgagaccggccucgagcugacgcugaccaacaccuccaucaucaaccacaaguucugcaaccucagcgacgcccacaagaagaaccuguacaaccacgcccugauguccaucaucagcaccuuccaccucuccauccccaacuucaaccaguacgaggccaugagcugcgacuucaacgggggcaagaucuccguccaguacaaccugagccacuccuacgccggggacgcggccagccacugcggcacgguggccaacggggugcugcagaccuucaugcggauggccuggggcggcuccuacaucgcgcucgacagcggguacggcaagugggacugcaucaugaccuccuaccaguaccugaucauccagaacaccacgugggaggaccacugccaguucagccgccccucccccaucggguaccugggccuccugagccagcggacccgcgacaucuacaucagccggcgccugcucggcaccuucaccuggacgcuguccgacagcgaggggaaggacaccccgggcggguacugccugacccgguggaugcucaucgaggccgagcugaagugcuucggcaacaccgccgucgccaagugcaacgagaagcacgacgaggaguucugcgacaugcugcgccucuucgacuucaacaagcaggccauccagcggcugaagacgcccgcgcagauguccauccagcugaucaacaaggccgugaacgcccucaucaacgaccagcugaucaugaagaaccaccuccgcgacaucauggggauccccuacugcaacuacagcaaguacugcuaccugaaccacaccaccaccggcaagacgucccugcccaagugcugccuggugagcaacggcuccuaccucaacgagacccacuucagcgacgacaucgagcagcaggccgacaacaugaucaccgagaugcugcagaaggaguacauggagcggcaggggaagacgccccugggccucgucgaccuguucguguucuccaccagcuucuaccugaucuccaucuuccugcaccucgugaagaucccgacccaccgccacaucgucggcaagagcugccccaagccccaccggcugaaccacauggggaucugcuccugcgggcuguacaagcagcccggcgugccggugcgcuggaagcgguga

SEQ ID NO: 31486 - RNA, 1476 nt, Artificial Sequence
  derived and/or modified CDS sequence (opt1) from LASV(G502-SLE-2009;Clade IV)__AIT17126__GPCmut7
augggccagaucgugaccuucuuccaggaggucccccacgugaucgaggaggugaugaacaucguccugaucgcccucagcauccuggccgugcugaaggggcucuacaacuucgcgaccugcggccugguggggcugcucacguuccugcugcucugcggccgcuccugcaccaccgggcuguacaagggcgucuacgagcugcagacccucgagcugaacauggagacgcugaacaugaccaugccgcucagcugcaccaagaacaacucccaccacuacaucauggugggcaacgagaccgggcuggagcugacgcucaccaacaccagcaucaucaaccacaaguucugcaaccuguccgacgcccacaagaagaaccuguacgaccacgcccucaugagcaucaucuccaccuuccaccugagcauccccaacuucaaccaguacgaggccauguccugcgacuucaacggcgggaagaucagcgugcaguacaaccugucccacagcuacgccggcgacgcggccgaccacugcgggacggucgccaacggcgugcuccagaccuucaugcggauggccuggggcggguccuacaucgcgcuggacagcggccgcgggcggugggacugcaucaugaccuccuaccaguaccugaucauccagaacaccacgugggaggaccacugccaguucagccgccccucccccaucggcuaccucggccugcugagccagcggacccgcgacaucuacaucucccggcgccuccuggggaccuucaccuggacgcugagcgacagcgagggcaaggacacccccgggggcuacugccucacccgguggaugcugaucgaggccgagcugaagugcuucgggaacaccgccguggccaagugcaacgagaagcacgacgaggaguucugcgacaugcuccgccuguucgacuucaacaagcaggccauccagcggcugaaggcgcccgcccagauguccauccagcucaucaacaaggccgucaacgcccugaucaacgaccagcuggugaugaagaaccaccuccgcgacaucaugggcauccccuacugcaacuacagccgguacugcuaccugaaccacacgaccaccggccgcaccucccugcccaagugcugccucgugagcaacggguccuaccugaacgagacgcacuucagcgacgacaucgagcagcaggccgacaacaugaucaccgagaugcugcagaaggaguacauggagcggcagggcaagaccccgcucgggcuggucgaccuguucguguucuccaccagcuucuaccugaucuccaucuuccuccaccuggugaagaucccgacgcaccgccacaucgucggcaagagcugccccaagccccaccggcugaaccacauggggaucugcuccugcggccucuacaagcagcccggcgugccggugaaguggaagcgcuga

SEQ ID NO: 31487 - RNA, 1476 nt, Artificial Sequence
  derived and/or modified CDS sequence (opt1) from LASV(G733-SLE-2010;Clade IV)__AIT17154__GPCmut7
augggccagaucgugaccuucuuccaggaggucccccacgugaucgaggaggugaugaacaucguccugaucgcccucagcauccuggccgugcugaaggggcucuacaacuucgcgaccugcggcaucguggggcuggucuccuuccugcuccugugcggccgcagcugcacgaccucccuguacaaggggguguacgagcuccagacccuggagcugaacauggagacccucaacaugacgaugccgcugagcugcaccaagaacaacucccaccacuacaucauggugggcaacgagaccggccuggagcucacccugacgaacaccagcaucaucaaccacaaguucugcaaccuguccgacgcccacaagaagaaccucuacgaccacgcccugaugagcaucaucuccaccuuccaccugagcauccccaacuucaaccaguacgaggccauguccugcgacuucaacgggggcaagaucagcguccaguacaaccucucccacagcuacgccggggacgcggccaaccacugcggcaccaucgccaacggggugcugcagacguucaugcggauggccuggggcggcuccuacaucgcgcuggacagcgggcgcgaccggugggacugcaucaugaccuccuaccaguaccucaucauccagaacaccaccugggaggaccacugccaguucagccgccccucccccaucggcuaccuggggcugcucagccagcggacgcgcgacaucuacaucagccggcgccugcugggcaccuucaccuggacccucuccgacagcgagggcaaggacacgcccgggggcuacugccugacccgguggaugcugaucgaggccgagcucaagugcuucgggaacaccgccguggccaagugcaacgagaagcacgacgaggaguucugcgacaugcugcgccuguucgacuucaacaagcaggccauccagcggcucaaggcgcccgcccagauguccauccagcugaucaacaaggccgucaacgcccugaucaacgaccagcucaucaugaagaaccaccuccgcgacaucaugggcauccccuacugcaacuacagcaaguacugcuaccugaaccacaccacgaccgggaagaccucccugcccaagugcugccuggugagcaacggcuccuaccugaacgagacccacuucagcgacgacaucgagcagcaggccgacaacaugaucacggagaugcuccagaaggaguacauggagcggcagggcaagaccccgcuggggcugguggaccucuucgucuucuccaccagcuucuaccugaucuccaucuuccugcaccuggugaagaucccgacccaccgccacguggucggcaagagcugccccaagccccaccggcucaaccacauggggaucugcuccugcggccuguacgggcagcccggcgugccggugaaguggaagcgcuga

SEQ ID NO: 31488 - RNA, 1476 nt, Artificial Sequence
  derived and/or modified CDS sequence (opt1) from MOPV/LASV reassortant(IGS-1;Clade IV)__AFY05576__GPCmut7
augggccagaucgugaccuucuuccaggaggucccccacgugaucgaggaggugaugaacaucguccugaucgcccucagcgugcuggccgugcugaaggggcucuacaacuucgcgaccugcggccuggucgggcuggugacguuccuccugcugugcggccgcuccugcaccaccagccucuacaaggggguguacgagcugcagacccuggagcucaacauggagacgcugaacaugaccaugccgcuguccugcaccaagaacaacagccaccacuacaucauggucggcaacgagaccggccucgagcugacgcugaccaacaccuccaucaucaaccacaaguucugcaaccucagcgacgcccacaagaagaaccuguacgaccacgcccugauguccaucaucagcaccuuccaccucuccauccccaacuucaaccaguacgaggccaugagcugcgacuucaacgggggcaagaucuccgugcaguacaaccugagccacuccuacgccggggacgcggccaaccacugcggcacgguggccaacgggguccugcagaccuucaugcggauggccuggggcggcagcuacaucgcgcucgacuccgggcgcggcaacugggacugcaucaugaccagcuaccaguaccugaucauccagaacaccacgugggaggaccacugccaguucucccggcccagccccaucggguaccugggccuccugucccagcgcacccgggacaucuacaucagccgccggcugcucggcaccuucaccuggacgcugagcgacuccgagggggaggacaccccgggcggguacugccugacccgcuggaugcucaucgaggccgagcugaagugcuucggcaacaccgccguggccaagugcaacgagaagcacgacgaggaguucugcgacaugcugcggcuguucgacuucaacaagcaggccauccagcgccugaaggcgcccgcccagaugagcauccagcugaucaacaaggccgugaacgcccucaucaacgaccagcugaucaugaagaaccaccuccgggacaucauggggauccccuacugcaacuacuccaaguacugcuaccucaaccacacgaccaccggccgcaccagccugcccaagugcugccuggucuccaacggcagcuaccucaacgagacgcacuucuccgacgacaucgagcagcaggccgacaacaugaucaccgagaugcugcagaaggaguacauggagcggcaggggaagacgccccugggccucguggaccuguucguguucagcaccuccuucuaccugaucagcaucuuccugcaccucgucaagaucccgacccaccgccacaucguggggaaguccugccccaagccccaccggcugaaccacaugggcaucugcagcugcgggcuguacaagcagcccggcgugccggucaaguggaagcgcuga

SEQ ID NO: 31489 - RNA, 1476 nt, Artificial Sequence
  derived and/or modified CDS sequence (opt1) from LASV(LM765-SLE-2012;Clade IV)__AIT17814__GPCmut7
augggccagaucgugaccuucuuccaggaggucccccacgugaucgaggaggugaugaacaucguccugaucgcccucagcauccuggccgugcugaaggggcucuacaacuucgcgaccugcggccugguggggcuggucacguuccuccugcugugcggccgcuccugcaccaccagccucuacaaggggguguacgagcugcagacccuggagcucaacauggagacgcugaacaugaccaugccgcuguccugcaccaagaacaacagccaccacuacaucauggugggcaacgagaccggccucgagcugacgcugaccaacaccuccaucaucgaccacaaguucugcaaccucagcgacgcccaccggaagaaccuguacgaccacgcccugauguccaucaucagcaccuuccaccucuccauccccaacuucaaccaguacgaggccaugagcugcgacuucaacgggggcaagaucuccguccaguacaaccugagccacuccuacgccaaggacgcggccgaccacugcgggacgguggccaacggcgugcugcagaccuucaugcgcauggccuggggcgggagcuacaucgcgcucgacuccggccgggggcgcugggacugcaucaugaccagcuaccaguaccugaucauccagaacaccacgugggaggaccacugccaguucucccggcccagccccaucggcuaccuggggcuccugucccagcgcacccgggacaucuacaucagccgccggcugcucggcaccuucaccuggacgcugagcgacuccgagggcaaggacacccccgggggcuacugccugacccgcuggaugcucaucgaggccgagcugaagugcuucgggaacaccgccgucgccaagugcaacgagaagcacgacgaggaguucugcgacaugcugcggcuguucgacuucaacaagcaggccauccagcgccugaaggcgcccgcccagaugagcauccagcugaucaacaaggccgugaacgcccucaucaacgaccagcugaucaugaagaaccaccuccgggacaucaugggcauccccuacugcaacuacuccaaguacugcuaccucaaccacacgaccaccgggaagaccagccugcccaagugcugccugguguccaacggcagcuaccucaacgagacgcacuucuccgacgacaucgagcagcaggccgacaacaugaucaccgagaugcugcagaaggaguacauggagcgccagggcaagaccccgcuggggcucgucgaccuguucguguucagcaccuccuucuaccugaucagcaucuuccugcaccucgugaagaucccgacgcaccggcacaucgucggcaagcccugccccaagccccaccgccugaaccacauggggaucugcuccugcggccuguacaagcagccgggggugcccgugaaguggaagcgguga

SEQ ID NO: 31490 - RNA, 1476 nt, Artificial Sequence
  derived and/or modified CDS sequence (opt1) from LASV(LM776-SLE-2012;Clade IV)__AIT17824__GPCmut7
augggccagaucgugaccuucuuccaggaggucccccacgugaucgaggaggugaugaacaucguccugaucgcccucagcauccuggccgugcugaaggggcucuacaacuucgcgaccugcggccugguggggcuggucacguuccuccugcugugcggccgcuccugcaccaccagcguguacaaggggguguacgagcuccagacccuggagcugaacauggagacgcucaacaugaccaugccgcuguccugcaccaagaacaacagccaccacuacaucauggucggcaacgagaccggccuggagcucacgcugaccaacaccuccaucaucaaccacaaguucugcaaccugagcgacgcccacaagaagaaccucuacgaccacgcccugauguccaucaucagcaccuuccaccuguccauccccaacuucaaccaguacgaggccaugagcugcgacuucaacgggggcaagaucuccgugcaguacaaccucagccacuccuacgccggggacgcggccaaccacugcggcacgguggccaacgggguccugcagaccuucaugcggauggccuggggcggcagcuacaucgcgcuggacuccgggcacggcaagugggacugcaucaugaccagcuaccaguaccucaucauccagaacaccacgugggaggaccacugccaguucucccgccccagccccaucggguaccugggccugcucucccagcggacccgcgacaucuacaucagccggcgccugcugggcaccuucaccuggacgcucagcgacuccgaggggaaggacaccccgggcggguacugccugacccgguggaugcugaucgaggccgagcucaagugcuucggcaacaccgccguggccaagugcaacgagaagcacgacgaggaguucugcgacaugcugcgccuguucgacuucaacaagcaggccauccagcggcucaaggcgcccgcccagaugagcauccagcugaucaacaaggccgugaacgcccugaucaacgaccagcucaucaugaagaaccaccuccgcgacaucauggggauccccuacugcaacuacuccaaguacugcuaccugaaccacacgaccaccggcaagaccagccugcccaagugcugccuggucuccaacggcagcuaccugaacgagacgcacuucuccgacgacaucgagcagcaggccgacaacaugaucaccgagaugcuccagaaggaguacauggagcggcaggggaagacgccccugggccugguggaccucuucguguucagcaccuccuucuaccugaucagcaucuuccugcaccuggucaagaucccgacccaccgccacaucguggggaaguccugccccaagccccaccggcucaaccacaugggcaucugcagcugcgggcuguacaagcagcccggcgugccgguccgcuggaagcgguga

SEQ ID NO: 31491 - RNA, 1476 nt, Artificial Sequence
  derived and/or modified CDS sequence (opt1) from LASV(Mad39;Clade IV)__ANH09722__GPCmut7
augggccagaucgugaccuucuuccaggaggucccccacgugaucgaggaggugaugaacaucguccugaucgcccucagcauccuggccgugcugaaggggcucuacaacguggcgaccugcggccugaucgggcuggucacguuccuccugcugugcggccgcuccugcaccaccacccucuacaaggggguguacgagcugcaggcccuggagcucaacauggagacgcugaacaugaccaugccgcugagcugcaccaagaacaacucccaccacuacauccgggugggcaacgagaccggccucgagcugacgcugaccaacaccagccucaucaaccacaaguucugcaaccuguccgacgcccacaagaagaaccuguacgaccacgcccucaugagcaucaucuccaccuuccaccugagcauccccaacuucaaccaguacgaggccauguccugcgacuucaacgacgggaagaucagcguccaguacaaccugucccacacguacgcgggcgacaccgccaaccacugcgggaccguggccaacggcgugcuccagaccuucaugcgcauggccuggggcgggagcuacaucgcgcuggacuccggccgcgggggcugggacugcaucaugacgagcuaccaguaccugaucauccagaacaccaccugggaggaccacugccaguucucccggcccagccccaucggguaccucggccugcugucccagcggacccgcgacaucuacaucagccggcgccuccugggcacguucaccuggacccuguccgacagcgaggggaaggacaccccgggcggguacugccucacgcgguggaugcugaucgaggccgagcugaagugcuucggcaacaccgccgucgccaagugcaacgagaagcacgacgaggaguucugcgacaugcuccgccuguucgacuucaacaagcaggccauccagcggcugaaggcgcccgcccagaugagcauccagcucaucaacaaggccgugaacgcccugaucaacgaccagcugaucaugaagaaccaccuccgcgacaucauggggauccccuacugcaacuacuccaaguacugcuaccugaaccacaccgugaccggcaagacgagccugcccaagugcugccucgucuccaacggcagcuaccugaacgagacccacuucuccgacgacaucgagcagcaggccgacaacaugaucaccgagaugcugcagaaggaguacauggagcggcaggggaagacgccccucggccugguggaccuguucguguucagcaccuccuucuaccugaucagcaucuuccuccaccuggucaagaucccgacccaccgccacgugguggggaagcccugccccaagccccaccggcugaaccacaugggcaucugcuccugcggguucuacaagcagccgggcguccccgugcgcuggaagcgguga

SEQ ID NO: 31492 - RNA, 1476 nt, Artificial Sequence
  derived and/or modified CDS sequence (opt1) from LASV(Z0947-SLE-2011;Clade IV)__AIT17840__GPCmut7
augggccagaucgugaccuucuuccaggaggucccccacgugaucgaggaggugaugaacaucguccugaucgcccucagcauccuggccgugcugaaggggcucuacaacuucgcgaccugcggccugguggggcuggucacguuccuccugcugugcggccgcuccugcaccaucagccucuacaaggggguguacgagcugcagacccuggagcucaacauggagacccugaacaugacgaugccgcuguccugcaccaagaacaacagccaccacuacaucauggugggcaacgagaccggccucgagcugacccugacgaacaccuccaucaucaaccacaaguucugcaaccucagcgacgcccacaagaagaaccuguacgaccacgcccugauguccaucaucagcaccuuccaccucuccauccccaacuucaaccaguacgaggccaugagcugcgacuucaacgggggcaagaucuccguccaguacaaccugagccacuccuacgccggggacgcggccaaccacugcggcaccguggccaacggggugcugcagacguucaugcggauggccuggggcggcagcuacaucgcgcucgacuccgggcgcgaccggugggacugcaucaugaccagcuaccaguaccugaucauccagaacaccaccugggaggaccacugccaguucucccgccccagccccaucggcuaccuggggcuccugucccagcggacgcgcgacaucuacaucagccggcgccugcucggcaccuucaccuggacccugagcgacuccgagggcaaggacacgcccgggggcuacugccugacccgguggaugcucaucgaggccgagcugaagugcuucgggaacaccgccgucgccaagugcaacgagaagcacgacgaggaguucugcgacaugcugcgccucuucgacuucaacaagcaggccauccagcggcugaaggcgcccgcccagaugagcauccagcugaucaacaaggccgugaacgcccucaucaacgaccagcugaucaugaagaaccaccuccgcgacaucaugggcauccccuacugcaacuacuccaaguacugcuaccugaaccacaccacgaccgggaagaccagccugcccaagugcugccugguguccaacggcagcuaccucaacgagacccacuucuccgacgacaucgagcagcaggccgacaacaugaucacggagaugcugcagaaggaguacauggagcggcagggcaagaccccgcuggggcucgucgaccuguucguguucagcaccuccuucuaccugaucagcaucuuccugcaccucgugaagaucccgacccaccgccacaucgucggcaagcccugccccaagccccaccggcugaaccacauggggaucugcuccugcggccuguacaagcagccgggggugcccgugaaguggaagcgcuga

SEQ ID NO: 31493 - RNA, 1476 nt, Artificial Sequence
  derived and/or modified CDS sequence (opt1) from LASV(Josiah;Clade IV)__NP_694870__GPCmut7
augggccagaucgugaccuucuuccaggaggucccccacgugaucgaggaggugaugaacaucguccugaucgcccucagcgugcuggccgugcugaaggggcucuacaacuucgcgaccugcggccuggucgggcuggugacguuccuccugcugugcggccgcuccugcaccaccagccucuacaaggggguguacgagcugcagacccuggagcucaacauggagacgcugaacaugaccaugccgcuguccugcaccaagaacaacagccaccacuacaucauggucggcaacgagaccggccucgagcugacgcugaccaacaccuccaucaucaaccacaaguucugcaaccucagcgacgcccacaagaagaaccuguacgaccacgcccugauguccaucaucagcaccuuccaccucuccauccccaacuucaaccaguacgaggccaugagcugcgacuucaacgggggcaagaucuccgugcaguacaaccugagccacuccuacgccggggacgcggccaaccacugcggcacgguggccaacgggguccugcagaccuucaugcggauggccuggggcggcagcuacaucgcgcucgacuccgggcgcggcaacugggacugcaucaugaccagcuaccaguaccugaucauccagaacaccacgugggaggaccacugccaguucucccggcccagccccaucggguaccugggccuccugucccagcgcacccgggacaucuacaucagccgccggcugcucggcaccuucaccuggacgcugagcgacuccgaggggaaggacaccccgggcggguacugccugacccgcuggaugcucaucgaggccgagcugaagugcuucggcaacaccgccguggccaagugcaacgagaagcacgacgaggaguucugcgacaugcugcggcuguucgacuucaacaagcaggccauccagcgccugaaggcgcccgcccagaugagcauccagcugaucaacaaggccgugaacgcccucaucaacgaccagcugaucaugaagaaccaccuccgggacaucauggggauccccuacugcaacuacuccaaguacugcuaccucaaccacacgaccaccggccgcaccagccugcccaagugcugccuggucuccaacggcagcuaccucaacgagacgcacuucuccgacgacaucgagcagcaggccgacaacaugaucaccgagaugcugcagaaggaguacauggagcggcaggggaagaccccgcugggccugguggaccucuucguguucagcaccuccuucuaccugaucagcaucuuccugcaccucgucaagauccccacgcaccgccacaucguggggaaguccugccccaagccccaccggcugaaccacaugggcaucugcagcugcgggcuguacaagcagccgggcgugcccgucaaguggaagcgcuga

SEQ ID NO: 31494 - RNA, 1473 nt, Artificial Sequence
  derived and/or modified CDS sequence (opt1) from LASV(LP;Clade I)__AAF86701__GPCmut7
augggccagaucaucaccuucuuccaggaggugccccacgucaucgaggaggugaugaacaucgugcugaucgcccucagccugcuggccauccucaaggggcuguacaacaucgcgaccugcggcaucaucgggcuggucgccuuccucuuccugugcggcaaguccugcagccugacgcucaagggcggguacgagcugcagacccuggagcucaacauggagacccugaacaugaccaugccgcuguccugcacgaagaacagcucccaccacuacauccgcgugggcaacgagaccgggcucgagcugacccugaccaacacgagcaucaucaaccacaaguucugcaaccucuccgacgcccacaagaagaaccuguacgaccacgcccugaugagcaucaucuccaccuuccaccucagcauccccaacuucaaccaguacgaggccauguccugcgacuucaacggcgggaagaucagcgugcaguacaaccugucccacagcuacgcgggcgacgccgccgagcacugcgggaccgucgccaacggcgugcugcagaccuucaugcggauggcguggggcgggcgcuacaucgcccucgacuccggcaaggggaacugggacugcaucaugacgagcuaccaguaccugaucauccagaacaccaccugggaggaccacugccaguucucccggcccagccccaucggcuaccugggccuccugucccagcgcacccgggacaucuacaucagccgccggcugcucgggacguucaccuggacccugagcgacuccgagggcaacgagacccccgggggcuacugccugacgcgcuggaugcucaucgaggccgagcugaagugcuucgggaacaccgccguggccaagugcaacgagaagcacgacgaggaguucugcgacaugcugcggcuguucgacuucaacaagcaggcgauccgccggcugaaggccccggcccagaugagcauccagcugaucaacaaggccgucaacgcccucaucaacgaccagcugaucaugaagaaccaccuccgcgacaucaugggcauccccuacugcaacuacuccaaguacugcuaccucaaccacaccagcuccggccggaccagccugcccaagugcugccugaucuccaacgggagcuaccucaacgagacgcaguucuccgacgacaucgagcagcaggcggacaacaugaucaccgagaugcugcagaaggaguacaucgagcgccagggcaagaccccgcuggggcugguggacaucuucaucuucagcaccuccuucuaccucaucagcaucuuccugcaccugaucaagauccccacgcaccggcacaucgugggcaagcccugccccaagccgcaccgccucaaccacaugggggucugcuccugcggccuguacaagcaccccggcgugcccaccaaguggaagcgguga

SEQ ID NO: 31495 - RNA, 1473 nt, Artificial Sequence
  derived and/or modified CDS sequence (opt1) from LASV(803213;Clade II)__AAF86703__GPCmut7
augggccagaucaucaccuucuuccaggaggugccccacgucaucgaggaggugaugaacaucgugcugaucgcccucagccugcuggccauccucaaggggaucuacaacgucgcgaccugcggccuguucgggcugaucuccuuccuccugcugugcggccgcagcugcuccgugacguacaaggggguguacgagcuccagacccuggagcugaacauggccaaccucaacaugaccaugccgcugagcugcaccaagaacaacucccaccacuacaucauggucggcaacgagacgggccuggagcucacccugaccaacaccagcaucaucaaccacaaguucugcaaccuguccgacgcccacaagaagaaccucuacgaccacgcccugaugagcaucaucuccacguuccaccugagcauccccaacuucaaccaguacgaggccauguccugcgacuucaacgggggcaagaucagcgugcaguacaaccucucccacagcuucgcgguggacgccgccaaccacugcgggaccaucgccaacggcguccugcagaccuucaugcggauggcguggggcggguccuacaucgcccuggacagcggcaaggggaacugggacugcaucaugaccuccuaccaguaccucaucauccagaacacgaccugggaggaccacugccaguucagccgccccucccccaucggcuaccuggggcugcucagccagcggacccgcgacaucuacaucagccggcgccugcugggcaccuucacguggacccucuccgacagcgagggcaacgaggcccccgggggcuacugccugacccgguggaugcugaucgaggccgagcucaagugcuucgggaacaccgccguggcgaagugcaacgagaagcacgacgaggaguucugcgacaugcugcgccuguucgacuucaacaagcaggccaucaagcggcucaagacgccggcccagauguccauccagcugaucaacaaggccgugaacgcccugaucaacgaccagcucaucaugaagaaccaccuccgcgacaucaugggcauccccuacugcaacuacagccgguacugcuaccugaaccacaccgucaccgggaagaccucccugccccgcugcugccuggugagcaacggcuccuaccugaacgagacgcacuucagcgacgacaucgagcagcaggcggacaacaugaucaccgagaugcuccagaaggaguacauggaccggcagggcaagaccccgcuggggcugguggaccuguucgucuucuccaccagcuucuaccucaucuccaucuuccugcaccuggugaagauccccacgcaccgccacaucgugggcaagcccugccccaagccgcaccggcucaaccacauggggaucugcagcugcggccuguacaagcaccccgggguccccgugaaguggaagcgcuga

SEQ ID NO: 31496 - RNA, 1473 nt, Artificial Sequence
  derived and/or modified CDS sequence (opt1) from LASV(GA391;Clade III)__CAA36645__GPCmut7
augggccagaucgugaccuucuuccaggaggucccccacgugaucgaggaggugaugaacaucguccugaucgcccucagcauccuggccauccugaaggggcucuacaacguggcgaccugcggccugaucgggcuggugacguuccuccugcuguccggccgcagcugcucccucaucuacaaggggaccuacgagcugcagacccuggagcucaacauggagacccugaacaugacgaugccgcugagcugcaccaagaacaacucccaccacuacauccgggucggcaacgagaccggccucgagcugacccugacgaacaccagcauccucaaccacaaguucugcaaccuguccgacgcccacaagcgcaaccuguacgaccacagccucauguccaucaucagcaccuuccaccuguccauccccaacuucaaccaguacgaggccaugagcugcgacuucaacgggggcaagaucaccgugcaguacaaccugucccacagcuucgccguggacgccgcggggcacugcggcacgcucgccaacgggguccugcagaccuucaugcggauggccuggggcggcuccuacaucgcccuggacagcgggcgcggcaacugggacugcaucaugaccuccuaccaguaccucaucauccagaacaccacgugggacgaccacugccaguucagccggcccucccccaucggguaccugggccugcucagccagcgcacccgggacaucuacaucagccgccggcugcugggcaccuucaccuggacgcucuccgacagcgaggggaacgagaccccgggcggguacugccugacccgcuggaugcugaucgaggcggagcucaagugcuucggcaacaccgccguggccaagugcaacgagaagcacgacgaggaguucugcgacaugcugcggcuguucgacuucaacaagcaggccauccgccggcucaagacgcccgcccagauguccauccagcugaucaacaaggcggugaacgcccugaucaacgaccagcucaucaugaagaaccaccuccgcgacaucauggggauccccuacugcaacuacagccgguacugcuaccugaaccacaccuccaccggcaagaccagccugccccgcugcugccugaucuccaacggcagcuaccugaacgagacgaaguucuccgacgacaucgagcagcaggccgacaacaugaucaccgagaugcugcagaaggaguacaucgaccggcaggggaagaccccgcucggccuggucgaccuguucguguucagcaccuccuucuaccucaucagcaucuuccugcaccuggugaagauccccacgcaccgccacaucgucgggaagcccugccccaagccgcaccggcucaaccacaugggcaucugcuccugcgggcuguacaagcagcccggcgugcccgugcgcuggaagcgguga

SEQ ID NO: 31497 - RNA, 1476 nt, Artificial Sequence
  derived and/or modified CDS sequence (opt1) from LASV(AV;Clade V)__CCA30314__GPCmut7
augggccagaucgugaccuucuuccaggaggucccccacgugaucgaggaggugaugaacaucguccugaucgcccucagcauccuggccgugcugaaggggcucuacaacaucgcgaccugcggccugaucgggcugaucacguuccuccugcugugcggccgcuccugcagcuccaaccucuacaaggggguguacgagcugcagagccuggaccucaacauggagacccugaacaugaccaugccgcuguccugcaccaagaacaacagccaccacuacauccgggucggcaacgacacgggccucgagcugacccugaccaacaccuccauccucaaccacaaguucugcaaccugagcgacgcccacaagaaggaccuguacgaccacgcccucauguccaucaucagcacguuccaccuguccauccccaacuucaaccaguacgaggccaugagcugcgacuucaacgggggcaagaucuccgugcaguacaaccugagccacuccuacgccaucgacgcggccaaccacugcgggaccguggccaacggcauccuccagaccuucaugcgcauggccuggggcgggagcuacaucgcgcuggacuccggccgggggaacugggacugcaucaugaccagcuaccaguaccugaucauccagaacacgaccugggagaaccacugccaguucucccgccccagccccaucggcuaccucgggcugcugagccagcggacccgcgacaucuacaucucccggcgccuccugggcaccuucacguggacccugagcgacuccgagggcaacgccacccccgggggcuacugccucacccgguggaugcugaucgaggccgagcugaagugcuucgggaacacggccgucgccaagugcaacgagaagcacgacgaggaguucugcgacaugcuccgccuguucgacuucaacaagcaggcgaucagccggcugaaguccccggcccagaugagcauccagcucaucaacaaggccgugaacgcccugaucaacgaccagcugaucaugaagaaccaccuccgcgacaucaugggcauccccuacugcaacuacuccaaguacugcuaccugaaccacaccaucaccgggaagaccagccugcccaagugcugccucguguccaacggcagcuaccugaacgagacgcacuucuccgacgacaucgagcagcaggccgacaacaugaucaccgagaugcugcagaaggaguacauggagcggcagggcaagaccccgcuggggcucgucgaccuguucguguucagcaccuccuucuaccugaucagcaucuuccuccgccuggugaagauccccacgcaccggcacaucgucggcaagcccugccccaagccgcaccgccugaaccacauggggaucugcuccugcggccucuacaagcagcccggggugcccgugcgguggaagcgcuga

SEQ ID NO: 31498 - RNA, 1473 nt, Artificial Sequence
  derived and/or modified CDS sequence (opt1) from LASV(Togo/2016/7082;Clade VI)__AMR44577__GPCmut7
augggccagaucaucaccuucuuccaggaggugccccacgucaucgaggaggugaugaacaucgugcugaucgcccucagccugcuggccauccucaagggggucuacaacguggcgaccugcggcaucaucgggcuggugacguuccuguuccucugcggccgcuccugcagccugaucuacaagggguccuacgagcugcagacccucgagcugaacauggagacccugaacaugaccaugccgcucagcugcacgaagaacuccagccaccacuacauccgggucggcaacgagaccggccuggagcugacccucaccaacacguccaucaucaaccacaaguucugcaaccugagcgacgcccacaagcgcaaccuguacgaccacgcccucauguccauccugagcaccuuccaccuguccauccccaacuucaaccaguacgaggccaugagcugcgacuucaacgggggcaagaucuccgugcaguacaaccucagccacgccuacgcgguggacgccgccgagcacugcgggaccgucgccaacggcgugcugcagaccuucaugcggauggcguggggcggguccuacaucgcccuggacagcggccgcgggaacugggacugcaucaugacguccuaccaguaccucaucauccagaacaccaccugggaggaccacugccaguucagccggcccucccccaucggcuaccuggggcugcucagccagcgcacccgggacaucuacaucagccgccggcugcugggcacguucaccuggacccucuccgacagcgagggcaacgagacccccgggggcuacugccugacgcgcuggaugcugaucgaggccgagcucaagugcuucgggaacaccgccguggccaagugcaacgagaagcacgacgaggaguucugcgacaugcugcggcuguucgacuucaacaagcaggcgauccagcgccucaaguccccggcccagaugagcauccagcugaucaacaaggccgucaacgcccugaucaacgaccagcucaucaugaagaaccaccuccgggacaugaugggcauccccuacugcaacuacuccaaguacugcuaccugaaccacaccagcuccgggcgcaccagccugcccaagugcugccugguguccaacggcagcuaccugaacgagacgcacuucuccgacgacaucgagcagcaggccgacaacaugaucaccgagaugcuccagaaggaguacaucgaccggcagggcaagaccccgcuggggcugguggaccuguucgucuucagcaccuccuucuaccucaucagcaucuuccugcaccugaucaagauccccacgcaccgccacaucgugggcaagcccugccccaagccgcaccggcucaaccacauggggaucugcuccugcggccuguacaagcagcccggggugcccacccgcuggaagcgguga

SEQ ID NO: 31499 - RNA, 1473 nt, Artificial Sequence
  derived and/or modified CDS sequence (opt1) from LASV(KAK-428;Clade n.d. (VII))__ANH09740__GPCmut7
augggccagaucgugaccuucuuccaggaggucccccacgugaucgaggaggugaugaacaucguccugaucgcccucagccugcuggccauccucaaggggcuguacaacuucgcgaccugcggcgugaucgggcugaucacguuccuccugcugugcggccgcuccugcagcgccaccuacaaggggcaguacgagcuccagacccuggagcugaacauggagucccucaacaugaccaugccgcugagcugcacgaagaacaacucccaccacuacauccgggccggcaacaacaccggccuggagcucacccugaccaacacgagcaucaucucccacaaguucugcaaccugagcgacgcccacaagaagaaccucuacgaccacacccugauguccaucaucaccaccuuccaccugagcauccccaacuucaaccaguacgaggccauguccugcgacuucaacgggggcaagaucagcauccaguacaaccucucccacagcuacgcgggggacgccgcccagcacugcggcacgguggccaacgggguccugcagaccuucaugcgcauggcguggggcggcuccuaccuggcccucgacagcgggcggcgcggcugggacugcaucaucuccagcuaccaguaccugaucauccagaacaccaccugggacgaccacugccaguucucccggcccagccccaucggguaccugggcuucgugagccagaagacgcgcgacaucuacaucucccggcgccuccugggcaccuucaccuggacccugagcgacuccgaggggcacgacaugccgggcggguacugccucacgcgguggaugcugaucgaggccgaccugaagugcuucggcaacaccgccguggccaagugcaacgagaagcacgacgaggaguucugcgacauguggcgccucuucgacuucaacaagcaggcgauccagcggcugaaggcccccgcccagaugaacauccagcugaucaacaaggccgucaacgcccucaucaacgaccagcugaugaugaagaaccaccuccgcgacaucauggggauccccuacugcaacuacagcaaguucugcuaccugaacaacaccaccacgggccggaccucccugccccgcugcugccugaucagcaacggcuccuaccucaacgagacccacuucagcgacgacaucgagcagcaggcggacaacaugaucaccgagaugcugcagaaggaguacauggaccggcaggggaagacgccgcugggccucguggaccuguucguguucuccaccagcuucuaccugaucaccaucuuccugcaccucgucaagauccccacccaccgccacaucguggggaagcccugccccaagccgcaccggcugaaccacaugggcaucugcuccugcgggcuguacaagcagcccggcgugcccguccgcuggaagcgguga

SEQ ID NO: 31500 - RNA, 1473 nt, Artificial Sequence; identical to SEQ ID NO: 31494
  derived and/or modified CDS sequence (opt1) from LASV(Pinneo-NIG-1969;Clade I)__AIT17836__GPCmut7

SEQ ID NO: 31501 - RNA, 1473 nt, Artificial Sequence
  derived and/or modified CDS sequence (opt1) from LASV(ISTH0009-NIG-2011;Clade II)__AIT17404__GPCmut7
augggccagaucaucaccuucuuccaggaggugccccacgucaucgaggaggugaugaacaucgugcugaucgcccucagccugcuggccauccucaaggggaucuacaacgucgcgaccugcggccuguucgggcugguguccuuccuccugcugugcggccgcagcugcuccacgaccuacaaggggguguacgagcuccagacccuggagcuggacauggccagccucaacaugaccaugccgcuguccugcacgaagaacaacagccaccacuacaucauggucggcaacgagaccggccuggagcucacccugaccaacacguccaucaucaaccacaaguucugcaaccugagcgacgcccacaagaagaaccucuacgaccacgcccugauguccaucaucagcaccuuccaccuguccauccccaacuucaaccaguacgaggccaugagcugcgacuucaacgggggcaagaucuccgugcaguacaaccucagccacgcguacgccguggacgccgccaaccacugcgggaccaucgcgaacggcguccugcagaccuucaugcggauggccuggggcggguccuacaucgcccuggacagcggcaagggguccugggacugcaucaugacgagcuaccaguaccucaucauccagaacaccaccugggaggaccacugccaguucucccgccccagccccaucggcuaccuggggcugcucagccagcggacccgcgacaucuacaucucccggcgccugcugggcacguucaccuggacccucagcgacuccgagggcaacgagacccccgggggcuacugccugacgcgguggaugcugaucgaggccgagcucaagugcuucgggaacaccgccguggcgaagugcaacgagaagcacgacgaggaguucugcgacaugcugcgccuguucgacuucaacaagcaggccauccggcgccucaagaccccggcccagaugagcauccagcugaucaacaaggccgugaacgcccugaucaacgaccagcucaucaugaagaaccaccuccgggacaucaugggcauccccuacugcaacuacuccaaguacugcuaccugaaccacaccgucacggggaagaccagccugccccgcugcugccugguguccaacggcagcuaccugaacgagacccacuucuccgacgacaucgagcagcaggcggacaacaugaucaccgagcuccugcagaaggaguacauggaccggcagggcaagacgccgcuggggcugguggaccucuucgucuucagcaccuccuucuaccugaucagcaucuuccugcaccucaucaagauccccacccaccgccacaucaccggcaagcccugccccaagccgcaccggcugaaccacauggggaucugcuccugcggccuguacaagcaccccggggugcccgugaaguggaagcgcuga

SEQ ID NO: 31502 - RNA, 1473 nt, Artificial Sequence
  derived and/or modified CDS sequence (opt1) from LASV(ISTH2010-NIG-2012;Clade II)__AIT17482__GPCmut7
augggccagaucaucaccuucuuccaggaggugccccacgucaucgaggaggugaugaacaucgugcugaucgcccucagccugcuggccauccucaaggggaucuacaacgucgcgaccugcggccuguucgggcugguguccuuccuccugcugugcggccgcagcugcuccacgaccuacaaggggguguacgagcuccagacccuggagcuggacauggccagccucaacaugaccaugccgcuguccugcacgaagaacaacagccaccacuacaucauggucggcaacgagaccggccuggagcucacccugaccaacacguccaucaucaaccacaaguucugcaaccugagcgacgcccacaagaagaaccucuacgaccacgcccugauguccaucaucagcaccuuccaccuguccauccccaacuucaaccaguacgaggccaugagcugcgacuucaacgggggcaagaucuccgugcaguacaaccucagccacgcguacgccguggacgccgccaaccacugcgggaccaucgcgaacggcguccugcagaccuucaugcggauggccuggggcggguccuacaucgcccuggacagcggcaagggguccugggacugcaucaugacgagcuaccaguaccucaucauccagaacaucaccugggaggaccacugccaguucucccgccccagccccaucggcuaccuggggcugcucagccagcggacccgcgacaucuacaucucccggcgccugcugggcaccuucacguggacccucagcgacuccgagggcaacgagacccccgggggcuacugccugacccgguggaugcugaucgaggccgagcucaagugcuucgggaacacggccguggcgaagugcaacgagaagcacgacgaggaguucugcgacaugcugcgccuguucgacuucaacaagcaggccauccggcgccucaagaccccggcccagaugagcauccagcugaucaacaaggccgugaacgcccugaucaacgaccagcucaucaugaagaaccaccuccgggacaucaugggcauccccuacugcaacuacuccaaguacugcuaccugaaccacaccgucaccgggaagacgagccugccccgcugcugccugguguccaacggcagcuaccugaacgagacccacuucuccgacgacaucgagcagcaggcggacaacaugaucaccgagcuccugcagaaggaguacaucgaccggcagggcaagaccccgcuggggcugguggaccucuucgucuucagcacguccuucuaccugaucagcaucuuccugcaccucgugaagauccccacccaccgccacguggucggcaagcccugccccaagccgcaccggcugaaccacauggggaucugcuccugcggccuguacaagcaccccggggugcccgugaaguggaagcgcuga

SEQ ID NO: 31503 - RNA, 1473 nt, Artificial Sequence
  derived and/or modified CDS sequence (opt1) from LASV(Lassa virus/H.sapiens-wt/NGA/2015/ISTH_0543;Clade II)__AVO03639__GPCmut7
augggccagaucaucaccuucuuccaggaggugccccacgucaucgaggaggugaugaacaucgugcugaucgcccucagccugcuggccauccucaaggggaucuacaacgucgcgaccugcggccuguucgggcugguguccuuccuccugcugugcggccgcagcugcuccacgaccuacaaggggguguacgagcuccagacccuggagcuggacauggccaaccucaacaugaccaugccgcugagcugcacgaagaacaacucccaccacuacaucauggucggcaacgagaccggccuggagcucacccugaccaacacgagcaucaucaaccacaaguucugcaaccuguccgacgcccacaagaagaaccucuacgaccacgcccugaugagcaucaucuccaccuuccaccugagcauccccaacuucaaccaguacgaggccauguccugcgacuucaacgggggcaagaucagcgugcaguacaaccucucccacaccuacgcgguggacgccgccaaccacugcgggaccaucgccaacggcguccugcagacguucaugcggauggcguggggcgggagcuacaucgcccuggacuccggcaaggggagcugggacugcaucaugaccuccuaccaguaccucgugauccagaacaccaccugggaggaccacugccaguucagccgccccucccccaucggcuaccuggggcugcucagccagcggacgcgcgacaucuacaucagccggcgccugcugggcaccuucaccuggacccucuccgacagcgagggcaacgagacgcccgggggcuacugccugacccgguggaugcugaucgaggccgagcucaagugcuucgggaacaccgccguggccaagugcaacgagaagcacgacgaggaguucugcgacaugcugcgccuguucgacuucaacaagcaggcgauccggcgccucaagaccccggcccagauguccauccagcugaucaacaaggccgucaacgcccugaucaacgaccagcucaucaugaagaaccaccuccgggacaucaugggcauccccuacugcaacuacagcaaguacugcuaccugaaccacacggugaccgggaagaccucccugccccgcugcugccuggugagcaacggcuccuaccugaacgagacccacuucagcgacgacaucgagcagcaggccgacaacaugaucacggagcuccugcagaaggaguacaucgaccggcagggcaagaccccgcuggggcuggucgaccucuucguguucuccaccagcuucuaccugaucuccaucuuccugcaccucgugaagauccccacccaccgccacaucacgggcaagcccugccccaagccgcaccggcugaaccacauggggaucugcagcugcggccuguacaagcaccccgggguccccgugaaguggaagcgcuga

SEQ ID NO: 31504 - RNA, 1473 nt, Artificial Sequence
  derived and/or modified CDS sequence (opt1) from LASV(Lassa virus/H.sapiens-wt/NGA/2016/ISTH_0009;Clade II)__AVO03571__GPCmut7
augggccagaucaucaccuucuuccaggaggugccccacgucaucgaggaggugaugaacaucgugcugaucgcccucagccugcuggccauccucaaggggaucuacaacgucgcgaccugcggccugcuggggcucguguccuuccugcugcucugcggccgcagcugcuccacgaccuacaaggggguguacgagcugcagacccuggagcucgacauggccagccugaacaugaccaugccgcuguccugcacgaagaacaacagccaccacuacaucauggucggcaacgagaccggccucgagcugacccugaccaacacguccaucaucaaccacaaguucugcaaccucagcgacgcccacaagaagaaccuguacgaccacgcccugauguccaucaucagcaccuuccaccucuccauccccaacuucaaccaguacgaggccaugagcugcgacuucaacgggggccggaucuccgugcaguacaaccugagccacuccuacgcgguggacgccgccaaccacugcgggaccaucgccaacggcguccugcagaccuucaugcgcauggcguggggcgggagcuacaucgcccucgacuccggcaaggggagcugggacugcaucaugacguccuaccaguaccugaucauccagaacaccaccugggaggaccacugccaguucagccggcccagccccaucggcuaccuggggcuccugucccagcgcacccgggacaucuacaucagccgccggcugcucggcacguucaccuggacccuguccgacagcgagggcaacgagacccccgggggcuacugccugacgcgcuggaugcucaucgaggccgagcugaagugcuucgggaacaccgccguggccaagugcaacgagaagcacgacgaggaguucugcgacaugcugcggcuguucgacuucaacaagcaggcgauccgccggcugaagaccccggcccagauguccauccagcugaucaacaaggccgugaacgcccucaucaacgaccagcugaucaugaagaaccaccuccgcgacaucaugggcauccccuacugcaacuacagcaaguacugcuaccucaaccacaccgucacggggaagaccucccugccccggugcugccuggugagcaacggcuccuaccucaacgagacccacuucagcgacgacaucgagcagcaggccgacaacaugaucaccgagcugcugcagaaggaguacaucgaccgccagggcaagacgccgcuggggcucguggaccuguucgucuucuccaccagcuucuaccugaucuccaucuuccuccaccuggugaagauccccacccaccggcacaucaccggcaagcccugccccaagccgcaccgccugaaccacauggggaucugcagcugcggccucuacaaccaccccggggugcccgucaaguggaagcgguga

SEQ ID NO: 31505 - RNA, 1473 nt, Artificial Sequence
  derived and/or modified CDS sequence (opt1) from LASV(Lassa virus/H.sapiens-wt/NGA/2016/ISTH_0017;Clade II)__AVO03567__GPCmut7
augggccagaucaucaccuucuuccaggaggugccccacgucaucgaggaggugaugaacaucgugcugaucgcccucagccugcuggccauccucaaggggaucuacaacgucgcgaccugcggccuguucgggcugguguccuuccuccugcugugcggccgcagcugcuccacgaccuacaaggggguguacgagcuccagacccuggagcuggacauggccagccucaacaugaccaugccgcuguccugcacgaagaacaacagccaccacuacaucauggucggcaacgagaccggccuggagcucacccugaccaacacguccaucaucaaccacaaguucugcaaccugagcgacgcccacaagaagaaccucuacgaccacgcccugauguccaucaucagcaccuuccaccuguccauccccaacuucaaccaguacgaggccaugagcugcgacuucaacgggggcaagaucuccgugcaguacaaccucagccacaccuacgcgaucgacgccgccaaccacugcgggaccaucgccaacggcgugcugcagacguucaugcggauggcguggggcggguccuacaucgcccuggacagcggcaagggguccugggacugcaucaugaccagcuaccaguaccucaucauccagaacaccaccugggaggaccacugccaguucucccgccccagccccaucggcuaccuggggcugcucagccagcggacgcgcgacaucuacaucucccggcgccugcugggcaccuucaccuggacccucagcgacuccgagggcaacgagacgcccgggggcuacugccugacccgguggaugcugaucgaggccgagcucaagugcuucgggaacaccgccgucgccaagugcaacgagaagcacgacgaggaguucugcgacaugcugcgccuguucgacuucaacaagcaggcgauccggcgccucaagaccccggcccagaugagcauccagcugaucaacaaggccgugaacgcccugaucaacgaccagcucaucaugaagaaccaccuccgggacaucaugggcauccccuacugcaacuacuccaaguacugcuaccugaaccacacggugaccgggaagaccagccugccccgcugcugccuggucuccaacggcagcuaccugaacgagacccacuucuccgacgacaucgagcagcaggccgacaacaugaucacggagcuccugcagaaggaguacauggaccggcagggcaagaccccgcuggggcugguggaccucuucguguucagcaccuccuucuaccugaucagcaucuuccugcaccucguccgcauccccacccaccggcacgugaucggcaagcccugccccaagccgcaccgccugaaccacauggggaucugcuccugcggccuguacaagcaccccggggugcccgucaaguggaagcgguga

SEQ ID NO: 31506 - RNA, 1473 nt, Artificial Sequence
  derived and/or modified CDS sequence (opt1) from LASV(Lassa virus/H.sapiens-wt/NGA/2018/ISTH_0959;Clade II)__AVV65099__GPCmut7
augggccagaucaucaccuucuuccaggaggugccccacgucaucgaggaggugaugaacaucgugcugaucgcccucagccugcuggccauccucaaggggaucuacaacgucgugaccugcggccuguucgggcugguguccuuccuccugcugugcggccgcagcugcuccacgaccuacaagggggucuacgagcuccagacccuggagcuggacauggcgagccucaacaugaccaugccgcuguccugcacgaagaacaacagccaccacuacaucauggugggcaacgagaccggccuggagcucacccugaccaacacguccaucaucaaccacaaguucugcaaccugagcgacgcccacaagaagaaccucuacgaccacgcccugauguccaucaucagcaccuuccaccuguccauccccaacuucaaccaguacgaggccaugagcugcgacuucaacgggggcaagaucuccgugcaguacaaccucagccacgccuacgcgaucgacgccgccaaccacugcgggaccaucgccaacggcguccugcagaccuucaugcggauggcguggggcggguccuacaucgcccuggacagcggcaagggguccugggacugcaucaugacgagcuaccaguaccucaucauccagaacaccaccugggaggaccacugccaguucucccgccccagccccaucggcuaccuggggcugcucagccagcggacccgcgacaucuacaucucccggcgccugcugggcacguucaccuggacccucagcgacuccgagggcaacgagacccccgggggcuacugccugacgcgguggaugcugaucgaggccgagcucaagugcuucgggaacaccgccguggccaagugcaacgagaagcacgacgaggaguucugcgacaugcugcgccuguucgacuucaacaagcaggcgauccggcgccucaagaccccggcccagaugagcauccagcugaucaacaaggccgugaacgcccugaucaacgaccagcucaucaugaagaaccaccuccgggacaucaugggcauccccuacugcaacuacuccaaguacugcuaccugaaccacaccgucacggggaagaccagccugccccgcugcugccugguguccaacggcagcuaccugaacgagacccacuucuccgacgacaucgagcagcaggccgacaacaugaucaccgagcuccugcagaaggaguacaucgaccggcagggcaagacgccgcuggggcugguggaccucuucgucuucagcaccuccuucuaccugaucagcaucuuccugcaccucgugaagauccccacccaccgccacgugaucggcaagcccugccccaagccgcaccggcugaaccacauggggaucugcuccugcggccuguacaagcaccccgggguccccgugaaguggaagcgcuga

SEQ ID NO: 31507 - RNA, 1473 nt, Artificial Sequence
  derived and/or modified CDS sequence (opt1) from LASV(LASV003-NIG-2008;Clade II)__AIT17580__GPCmut7
augggccagaucaucaccuucuuccaggaggugccccacgucaucgaggaggugaugaacaucgugcugaucgcccucagccugcuggccauccucaaggggaucuacaacgucgcgaccugcggccuguucgggcugguguccuuccuccugcugugcggccgcagcugcuccacgaccuacaaggggguguacgagcuccagacccuggagcuggacauggccagccucaacaugaccaugccgcuguccugcacgaagaacaacagccaccacuacaucauggucggcaacgagaccggccuggagcucacccugaccaacacguccaucaucaaccacaaguucugcaaccugagcgacgcccacaagaagaaccucuacgaccacgcccugauguccaucaucagcaccuuccaccuguccauccccaacuucaaccaguacgaggccaugagcugcgacuucaacgggggcaagaucuccgugcaguacaaccucagccacaccuacgcgguggacgccgccaaccacugcgggaccaucgccaacggcguccugcagacguucaugcggauggcguggggcggguccuacaucgcccuggacagcggcaagggguccugggacugcaucaugaccagcuaccaguaccucaucauccagaacaccaccugggaggaccacugccaguucucccgccccagccccaucggcuaccuggggcugcucagccagcggacgcgcgacaucuacaucucccggcgccugcugggcaccuucaccuggacccucagcgacuccgagagcaacgagacgccgggcggguacugccugacccgguggaugcugaucgaggccgagcucaagugcuucggcaacaccgccguggccaagugcaacgagaagcacgacgaggaguucugcgacaugcugcgccuguucgacuucaacaagcaggcgauccggcgccucaaggcccccgcccagauguccauccagcugaucaacaaggccgugaacgcccugaucaacgaccagcucaucaugaagaaccaccuccgggacaucauggggauccccuacugcaacuacagcaaguacugcuaccugaaccacaccgucacgggccgcaccucccugccccggugcugccuggugagcaacggguccuaccugaacgagacccacuucagcgacgacaucgagcagcaggcggacaacaugaucaccgagcuccugcagaaggaguacauggaccgccagggcaagacgccgcugggccugguggaccucuucgucuucuccaccagcuucuaccugaucuccaucuuccugcaccucgugaagauccccacccaccggcacgugaucgggaagcccugccccaagccgcaccgccugaaccacaugggcaucugcagcugcgggcuguacaagcaccccggcguccccgugaaguggaagcgguga

SEQ ID NO: 31508 - RNA, 1473 nt, Artificial Sequence
  derived and/or modified CDS sequence (opt1) from LASV(LASV035-NIG-2009;Clade II)__AIT17588__GPCmut7
augggccagaucaucaccuucuuccaggaggugccccacgucaucgaggaggugaugaacaucgugcugaucgcccucagccugcuggccauccucaaggggaucuacaacgucgcgaccugcggccuguucgggcugguguccuuccuccugcugugcggccgcagcugcuccacgaccuacaaggggguguacgagcuccagacccuggagcuggacauggccagccucaacaugaccaugccgcuguccugcacgaagaacaacagccaccacuacaucauggucggcaacgagaccggccuggagcucacccugaccaacacguccaucaucaaccacaaguucugcaaccugagcgacgcccacaagaagaaccucuacgaccacgcccugauguccaucaucagcaccuuccaccuguccauccccaacuucaaccaguacgaggccaugagcugcgacuucaacgggggcaagaucuccgugcaguacaaccucagccacgcguacgccguggacgccgccaaccacugcgggaccaucgcgaacggcguccugcagaccuucaugcggauggccuggggcggguccuacaucgcccuggacagcggcaagggguccugggacugcaucaugacgagcuaccaguaccucaucauccagaacaccaccugggaggaccacugccaguucucccgccccagccccaucggcuaccuggggcugcucagccagcggacccgcgacaucuacaucucccggcgccugcugggcacguucaccuggacccucagcgacuccgagggcaacgagacccccgggggcuacugccugacgcgguggaugcugaucgaggccgagcucaagugcuucgggaacaccgccguggcgaagugcaacgagaagcacgacgaggaguucugcgacaugcugcgccuguucgacuucaacaagcaggccauccggcgccucaaggccccggcccagaugagcauccagcugaucaacaaggccgugaacgcgcugaucaacgaccagcucaucaugaagaaccaccuccgggacaucaugggcauccccuacugcaacuacuccaaguacugcuaccugaaccacaccgucaccgggaagacgagccugccccgcugcugccugguguccaacggcagcuaccugaacgagacccacuucuccgacgacaucgagcagcaggccgacaacaugaucaccgagcuccugcagaaggaguacaucgaccggcagggcaagaccccgcuggggcugguggaccucuucgucuucagcacguccuucuaccugaucagcaucuuccugcaccucgugaagauccccacccaccgccacgugaucggcaagcccugccccaagccgcaccggcugaaccacauggggaucugcuccugcggccuguacaagcaccccgggguccccgugaaguggaagcgcuga

SEQ ID NO: 31509 - RNA, 1473 nt, Artificial Sequence
  derived and/or modified CDS sequence (opt1) from LASV(LASV1000-NIG-2009;Clade II)__AIT17782__GPCmut7
augggccagaucaucaccuucuuccaggaggugccccacgucaucgaggaggugaugaacaucgugcugaucgcccucagccugcuggccauccucaaggggaucuacaacgucgcgaccugcggccuguucgggcugguguccuuccuccugcugugcggccgcagcugcuccacgaccuacaaggggguguacgagcuccagacccuggagcuggacauggccagccucaacaugaccaugccgcuguccugcacgaagaacaacagccaccacuacaucauggucggcaacgagaccggccuggagcucacccugaccaacacguccaucaucaaccacaaguucugcaaccugagcgacgcccacaagaagaaccucuacgaccacgcccugauguccaucaucagcaccuuccaccuguccauccccaacuucaaccaguacgaggccaugagcugcgacuucaacgggggcaagaucuccgugcaguacaaccucagccacaccuacgcgguggacgccgccaaccacugcgggaccaucgccaacggcguccugcagacguucaugcggauggcguggggcggguccuacaucgcccuggacagcggcaagggguccugggacugcaucaugaccagcuaccaguaccucaucauccagaacaccaccugggaggaccacugccaguucucccgccccagccccaucggcuaccuggggcugcucagccagcggacgcgcgacaucuacaucucccggcgccugcugggcaccuucaccuggacccucagcgacuccgagggcaacgagacgcccgggggcuacugccugacccgguggaugcugaucgaggccgagcucaagugcuucgggaacaccgccguggccaagugcaacgagaagcacgacgaggaguucugcgacaugcugcgccuguucgacuucaacaagcaggcgaucaagcggcucaagaccccggcccagaugagcauccagcugaucaacaaggccgugaacgcccugaucaacgaccagcucaucaugaagaaccaccuccgcgacaucaugggcauccccuacugcaacuacuccaaguacugcuaccugaaccacacggucaccgggaagaccagccugccccggugcugccugguguccaacggcagcuaccugaacgagacccacuucuccgacgacaucgagcagcaggccgacaacaugaucacggagcuccugcagaaggaguacaucgaccgccagggcaagaccccgcuggggcugguggaccucuucgucuucagcaccuccuucuaccugaucagcaucuuccugcaccucgugaagauccccacccaccggcacguggucggcaagcccugccccaagccgcaccgccugaaccacauggggaucugcuccugcggccuguacaagcaccccggggugcccgugaaguggaagcgguga

SEQ ID NO: 31510 - RNA, 1473 nt, Artificial Sequence
  derived and/or modified CDS sequence (opt1) from LASV(LASV221-NIG-2010;Clade II)__AIT17624__GPCmut7
augggccagaucaucaccuucuuccaggaggugccccacgucaucgaggaggugaugaacaucgugcugaucgcccucagccugcuggccauccucaaggggaucuacaacgucgcgaccugcggccuguucgggcugguguccuuccuccugcugugcggccgcagcugcuccacgaccuacaaggggguguacgagcuccagacccuggagcuggacauggccagccucaacaugaccaugccgcuguccugcacgaagaacaacagccaccacuacaucauggucggcaacgagaccggccuggagcucacccugaccaacacguccaucaucaaccacaaguucugcaaccugagcgacgcccacaagaagaaccucuacgaccacgcccugauguccaucaucagcaccuuccaccuguccauccccaacuucaaccaguacgaggccaugagcugcgacuucaacgggggcaagaucuccgugcaguacaaccucagccacaccuacgcgaucgacgccgccaaccacugcgggaccaucgccaacggcgugcugcagacguucaugcggauggcguggggcggguccuacaucgcccuggacagcggcaagggguccugggacugcaucaugaccagcuaccaguaccucaucauccagaacaccaccugggaggaccacugccaguucucccgccccagccccaucggcuaccuggggcugcucagccagcggacgcgcgacaucuacaucucccggcgccugcugggcaccuucaccuggacccucagcgacuccgagggcaacgagacgcccgggggcuacugccugacccgguggaugcugaucgaggccgagcucaagugcuucgggaacaccgccgucgccaagugcaacgagaagcacgacgaggaguucugcgacaugcugcgccuguucgacuucaacaagcaggcgauccggcgccucaagaccccggcccagaugagcauccagcugaucaacaaggccgugaacgcccugaucaacgaccagcucaucaugaagaaccaccuccgggacaucaugggcauccccuacugcaacuacuccaaguacugcuaccugaaccacacggugaccgggaagaccagccugccccgcugcugccuggucuccaacggcagcuaccugaacgagacccacuucuccgacgacaucgagcagcaggccgacaacaugaucacggagaugcuccagaaggaguacauggaccggcagggcaagaccccgcuggggcugguggaccuguucguguucagcaccuccuucuaccucaucagcaucuuccugcaccuggucaagauccccacccaccgccacgugaucggcaagcccugccccaagccgcaccggcucaaccacauggggaucugcuccugcggccuguacaagcaccccggggugcccgucaaguggaagcgcuga

SEQ ID NO: 31511 - RNA, 1473 nt, Artificial Sequence
  derived and/or modified CDS sequence (opt1) from LASV(LASV237-NIG-2010;Clade II)__AIT17638__GPCmut7
augggccagaucaucaccuucuuccaggaggugccccacgucaucgaggaggugaugaacaucgugcugaucgcccucagccugcuggccauccucaaggggaucuacaacgucgcgaccugcggccuguucgggcugguguccuuccuccugcugugcggccgcagcugcuccacgaccuacaaggggguguacgagcuccagacccuggagcuggacauggccagccucaacaugaccaugccgcuguccugcacgaagaacaacagccaccacuacaucauggucggcaacgagaccggccuggagcucacccugaccaacacguccaucaucaaccacaaguucugcaaccugagcgacgcccacaagaaggaccucuacgaccacgcccugauguccaucaucagcaccuuccaccuguccauccccaacuucaaccaguacgaggccaugagcugcgacuucaacgggggcaagaucuccgugcaguacaaccucagccacaccuacgcgguggacgccgccaaccacugcgggaccaucgccaacggcguccugcagacguucaugcggauggcguggggcggguccuacaucgcccuggacagcggcaagggguccugggacugcaucaugaccagcuaccaguaccucaucauccagaacaccaccugggaggaccacugccaguucucccgccccagccccaucggcuaccuggggcugcucagccagcggacgcgcgacaucuacaucucccggcgccugcugggcaccuucaccuggacccucagcgacuccgagggcaacgagacgcccgggggcuacugccugacccgguggaugcugaucgaggccgagcucaagugcuucgggaacaccgccguggccaagugcaacgagaagcacgacgaggaguucugcgacaugcugcgccuguucgacuucaacaagcaggcgauccggcgccucaagaccccggcccagaugagcauccagcugaucaacaaggccgugaacgcccugaucaacgaccagcucaucaugaagaaccaccuccgggacaucaugggcauccccuacugcaacuacuccaaguacugcuaccugaaccacacggucaccgggaagaccagccugccccgcugcugccugguguccaacggcagcuaccugaacgagacccacuucuccgacgacaucgagcagcaggccgacaacaugaucacggagcuccugcagaaggaguacauggaccggcagggcaagaccccgcuggggcugguggaccucuucgucuucagcaccuccuucuaccugaucagcaucuuccugcaccucaucaagauccccacccaccgccacaucacgggcaagcccugccccaagccgcaccggcugaaccacauggggaucugcuccugcggccuguacaagcaccccggggugcccgugaaguggaagcgcuga

SEQ ID NO: 31512 - RNA, 1473 nt, Artificial Sequence
  derived and/or modified CDS sequence (opt1) from LASV(LASV253-NIG-2011;Clade II)__AIT17670__GPCmut7
augggccagaucaucaccuucuuccaggaggugccccacgucaucgaggaggugaugaacaucgugcugaucgcccucagccugcuggccauccucaaggggaucuacaacgucgcgaccugcggccuguucgggcugguguccuuccuccugcugugcggccgcagcugcuccacgaccuacaaggggguguacgagcuccagacccuggagcuggacauggccagccucaacaugaccaugccgcuguccugcacgaagaacaacagccaccacuacaucauggucggcaacgagaccggccuggagcucacccugaccaacacguccaucaucaaccacaaguucugcaaccugagcgacgcccacaagaagaaccucuacgaccacgcccugauguccaucaucagcaccuuccaccuguccauccccaacuucaaccaguacgaggccaugagcugcgacuucaacgggggcaagaucuccgugcaguacaaccucagccacaccuacgcgguggacgccgccaaccacugcgggaccaucgccaacggcguccugcagacguucaugcggauggcguggggcggguccuacaucgcccuggacagcggcaagggguccugggacugcaucaugaccagcuaccaguaccucaucauccagaacaccaccugggaggaccacugccaguucucccgccccagccccaucggcuaccuggggcugcucagccagcggacgcgcgacaucuacaucucccggcgccugcugggcaccuucaccuggacccucagcgacuccgagggcaacgagacgcccgggggcuacugccugacccgguggaugcugaucgaggccgagcucaagugcuucgggaacaccgccguggccaagugcaacgagaagcacgacgaggaguucugcgacaugcugcgccuguucgacuucaacaagcaggcgauccggcgccucaaggccccggcccagaugagcauccagcugaucaacaaggccgugaacgcccugaucaacgaccagcucaucaugaagaaccaccuccgggacaucaugggcauccccuacugcaacuacuccaaguacugcuaccugaaccacaccgucacggggcgcaccagccugccccggugcugccugguguccaacggcagcuaccugaacgagacccacuucuccgacgacaucgagcagcaggcggacaacaugaucaccgagcuccugcagaaggaguacaucgaccgccagggcaagacgccgcuggggcugguggaccucuucgucuucagcaccuccuucuaccugaucagcaucuuccugcaccucgugaagauccccacccaccggcacaucaucggcaagcccugccccaagccgcaccgccugaaccacauggggaucugcuccugcggccuguacaagcaccccggggugcccgucaaguggaagcgguga

SEQ ID NO: 31513 - RNA, 1473 nt, Artificial Sequence
  derived and/or modified CDS sequence (opt1) from LASV(LASV254-NIG-2011;Clade II)__AIT17674__GPCmut7
augggccagaucaucaccuucuuccaggaggugccccacgucaucgaggaggugaugaacaucgugcugaucgcccucagccugcuggccauccucaaggggaucuacaacgucgcgaccugcggccuguucgggcugguguccuuccuccugcugugcggccgcagcugcuccacgaccuacaaggggguguacgagcuccagacccuggagcuggacaugaccaaccucaacaugacgaugccgcugagcugcaccaagaacaacucccaccacuacaucauggucggcaacgagaccggccuggagcucacccugacgaacaccagcaucaucaaccacaaguucugcaaccuguccgacgcccacaagaagaaccucuacaaccacgcccugaugagcaucaucuccaccuuccaccugagcauccccaacuucaaccaguacgaggccauguccugcgacuucaacgggggcaagaucagcgugcaguacaaccucucccacagcuacgccguggacgcggccaaccacugcgggaccaucgccaacggcguccugcagacguucaugcggauggccuggggcggguccuacaucgcgcuggacagcggcaaggggaacugggacugcaucaugaccuccuaccaguaccucaucauccagaacaccaccugggaggaccacugccaguucagccgccccucccccaucggcuaccuggggcugcucagccagcggacgcgcgacaucuacaucagccggcgccugcugggcaccuucaccuggacccucuccgacagcgagggcaacgagacgcccgggggcuacugccugacccgguggaugcugaucgaggccgagcucaagugcuucgggaacaccgccguggccaagugcaacgagaagcacgacgaggaguucugcgacaugcugcgccuguucgacuucaacaagcaggccauccggcgccucaagaccccggcgcaggccaacauccagcugaucaacaaggccgugaacgcccugaucaacgaccagcucaucaugaagaaccaccuccgggacaucaugggcauccccuacugcaacuacuccaaguacugcuaccugaaccacacggucaccgggaagaccagccugccccgcugcugccugguguccaacggcagcuaccugaacgagacccacuucuccgacgacaucgagcagcaggccgacaacaugaucacggagcuccugcagaaggaguacauggaccggcagggcaagaccccgcuggggcugguggaccucuucgucuucagcaccuccuucuaccugaucagcaucuuccugcaccucgugaagauccccacccaccgccacgugaucggcaagcccugccccaagccgcaccggcugaaccacauggggaucugcuccugcggccuguacaagcaccccgggguccccgugaaguggaagcgcuga

SEQ ID NO: 31514 - RNA, 1473 nt, Artificial Sequence
  derived and/or modified CDS sequence (opt1) from LASV(Nig08-A19;Clade III)__ADU56618__GPCmut7
augggccagaucgugaccuucuuccaggaggucccccacgugaucgaggaggugaugaacaucguccugaucgcccucagcauccuggccauccugaaggggcucuacaacaucgcgaccugcggccugaucgggcuggugacguuccuccugcuguccggccgcagcugcuccaugaccuacaaggggguguacgagcuccagacccuggagcugaacaugaacacccucaacaugacgaugccgcugagcugcaccaagaacaacucccaccacuacaucauggucggcaacgagaccggccuggagcucacccugacgaacaccagccugcuccaccacaaguucugcaaccuguccgacgcccacaagaagaaccuguacgaccacacccucaugagcaucaucuccaccuuccaccugagcauccccaacuucaaccaguacgaggccauguccugcgacuucaacgggggcaagaucacggugcaguacaaccugagccacuccuacgccaucgacgccgcgaaccacugcgggaccguggccaacggcguccuccagaccuucaugcggauggccuggggcgggagcuacaucgcccuggacuccggccgcgggaagugggacugcaucaugaccagcuaccaguaccugaucauccagaacacgaccugggaggaccacugccaguucucccggcccagccccaucggcuaccucgggcugcugucccagcgcacccgggacaucuacaucagccgccggcuccugggcaccuucacguggacccugagcgacuccgagggcaacgagacccccgggggcuacugccucacccgcuggaugcugaucgaggcggagcugaagugcuucgggaacacggccguggccaagugcaacgagaagcacgacgaggaguucugcgacaugcuccggcuguucgacuucaacaagcaggccauccgccggcugaaggccccggcgcagaugagcauccagcucaucaacaaggccgugaacgcccugaucaacgaccagcugaucaugaagaaccaccuccgcgacaucaugggcauccccuacugcaacuacuccaaguacugcuaccugaaccacaccagcaccgggcggaccucccugccccgcugcugccucgucagcaacggcuccuaccugaacgagacgcacuucagcgacgacaucgagcagcaggccgacaacaugaucaccgagaugcugcagaaggaguaccuggaccggcagggcaagaccccgcucgggcugguggaccuguucguguucuccaccagcuucuaccucaucuccaucuuccugcaccuggucaagauccccacgcaccgccacaucgugggcaagcccugccccaagccgcaccggcucaaccacauggggaucugcagcugcggccuguacaagcagcccggggugcccguccgcuggaagcgguga

SEQ ID NO: 31515 - RNA, 1476 nt, Artificial Sequence
  derived and/or modified CDS sequence (opt1) from LASV(G1180-SLE-2010;Clade IV)__AIT17168__GPCmut7
augggccagaucgugaccuucuuccaggaggucccccacgugaucgaggaggugaugaacaucguccugaucgcccucagcauccuggccgugcugaaggggcucuacaacuucgcgaccugcggccugguggggcugcucacguuccugcugcucugcggccgcuccugcaccgccagccgguacaagggggucuacgagcugcagacccuggagcucaacauggagacccugaacaugacgaugccgcuguccugcaccaagaacaacagccaccacuacaucauggugggcaacgagaccggccucgagcugacccugacgaacaccuccaucaucaaccacaaguucugcaaccucagcgacgcccacaagaagaaccuguacgaccacgcccugauguccaucaucagcaccuuccaccucuccauccccaacuucaaccaguacgaggccaugagcugcgacuucaacgggggcaagaucuccgugcaguacaaccugagccacuccuacgcgggggacgccgccaaccacugcggcaccgucgccaacggggugcugcagacguucaugcgcauggcguggggcggcagcuacaucgcccucgacuccgggcacggcagcugggacugcaucaugaccuccuaccaguaccugaucauccagaacaccaccugggaggaccacugccaguucagccggcccucccccaucggguaccugggccuccugagccagcgcacgcgggacaucuacaucagccgccggcugcucggcaccuucaccuggacccuguccgacagcgaggggaaggacacgccgggcggguacugccugacccgcuggaugcucaucgaggccgagcugaagugcuucggcaacaccgccguggccaagugcaacgagaagcacgacgaggaguucugcgacaugcugcggcuguucgacuucaacaagcaggcgauccagcgccugaaggcccccgcccagauguccauccagcugaucaacaaggccgucaacgcccucaucaacgaccagcugaucaugaagaaccaccuccgggacaucauggggauccccuacugcaacuacagcaaguacugcuaccucaaccacaccacgaccggcaagaccucccugcccaagugcugccuggugagcaacggcuccuaccucaacgagacccacuucagcgacgacaucgagcagcaggcggacaacaugaucacggagaugcugcagaaggaguacauggagcgccaggggaagaccccgcugggccugguggaccucuucgucuucuccaccagcuucuaccugaucuccaucuuccugcaccucgugaagauccccacccaccggcacaucgugggcaagagcugccccaagccccaccgccugaaccacauggggaucugcuccugcgggcuguacaagcagccgggcguccccgugaaguggaagcgguga

SEQ ID NO: 31516 - RNA, 1476 nt, Artificial Sequence
  derived and/or modified CDS sequence (opt1) from LASV(G1442-SLE-2011;Clade IV)__AIT17180__GPCmut7
augggccagaucgugaccuucuuccaggaggucccccacgugaucgaggaggugaugaacaucguccugaucgcccucagcauccuggccgugcugaaggggcucuacaacguggcgaccugcggccugaucgggcuggucacguuccuccugcugugcggccgcuccugcaccaccacccucuacaaggggguguacgagcugcagacgcuggagcucaacauggagacccugaacaugaccaugccgcugagcugcaccaagaacaacucccaccacuacauccgggugggcaacgagacgggccucgagcugacccugaccaacaccagcaucaucaaccacaaguucugcaaccucuccgacgcccacaagaagaaccuguacgaccacgcccugaugagcaucaucuccacguuccaccucagcauccccaacuucaaccaguacgaggccauguccugcgacuucaacgggggcaagaucagcguccaguacaaccugucccacagcuacgccggggacgcggccaaccacugcggcaccguggccaacggggugcugcagaccuucaugcgcauggccuggggcggcuccuacaucgcgcucgacagcgggcggggcaacugggacugcaucaugaccuccuaccaguaccugaucauccagaacacgaccugggacgaccacugccaguucagccgccccucccccaucggguaccugggccuccugagccagcggacccgcgacgucuacaucucccggcgccugcucggcaccuucacguggacccugagcgacagcgaggggaaggacaccccgggcggguacugccugacccgguggaugcucaucgaggccgagcugaagugcuucggcaacacggccguggccaagugcaacgagaagcacgacgaggaguucugcgacaugcugcgccucuucgacuucaacaagcaggccauccagcggcugaaggcgcccgcccagauguccauccagcugaucaacaaggccgugaacgcccucaucaacgaccagcugaucaugaagaaccaccuccgcgacaucauggggauccccuacugcaacuacagcaaguacugcuaccugaacaacaccgccaccggcaagaccucccugcccaagugcugccugaucagcaacggcuccuaccucaacgagacgcacuucagcgacgacaucgagcaggaggcggacaacaugaucaccgagaugcugcagaaggaguacauggagcggcaggggaagaccccgcugggccuggucgaccucuucguguucuccaccagcuucuaccugaucuccaucuuccugcaccucgugaagauccccacgcaccgccacaucgucggcaagagcugccccaagccccaccggcugaaccacauggggaucugcuccugcgggcuguacaagcagccgggcgugcccgugcgcuggaagcgguga

SEQ ID NO: 31517 - RNA, 1476 nt, Artificial Sequence
  derived and/or modified CDS sequence (opt1) from LASV(G3010-SLE-2013;Clade IV)__AIT17344__GPCmut7
augggccagaucgugaccuucuuccaggaggucccccacgugaucgaggaggugaugaacaucguccugaucgcccucagcauccuggccgugcugaaggggcucuacaacuucgcgaccugcggccugguggggcuggucacguuccuccugcugugcggccgcuccugcaccaccagccucuacaaggggguguacgagcugcagacccuggagcucaacauggagacgcugaacaugaccaugccgcuguccugcaccaagaacaacagccaccacuacaucauggugggcaacgagaccggccucgagcugacgcugaccaacaccuccaucaucaaccacaaguucugcaaccucagcgacgcccacaagaagaaccuguacaaccacgcccugauguccaucaucagcaccuuccaccucuccauccccaacuucaaccaguacgaggccaugagcugcgacuucaacgggggcaagaucuccguccaguacaaccugagccacuccuacgccggggacgcggccagccacugcggcacgguggccaacggggugcugcagaccuucaugcggauggccuggggcggcuccuacaucgcgcucgacagcggguacggcaagugggacugcaucaugaccuccuaccaguaccugaucauccagaacaccacgugggaggaccacugccaguucagccgccccucccccaucggguaccugggccuccugagccagcggacccgcgacaucuacaucagccggcgccugcucggcaccuucaccuggacgcuguccgacagcgaggggaaggacaccccgggcggguacugccugacccgguggaugcucaucgaggccgagcugaagugcuucggcaacaccgccgucgccaagugcaacgagaagcacgacgaggaguucugcgacaugcugcgccucuucgacuucaacaagcaggccauccagcggcugaagacgcccgcgcagauguccauccagcugaucaacaaggccgugaacgcccucaucaacgaccagcugaucaugaagaaccaccuccgcgacaucauggggauccccuacugcaacuacagcaaguacugcuaccugaaccacaccaccaccggcaagacgucccugcccaagugcugccuggugagcaacggcuccuaccucaacgagacccacuucagcgacgacaucgagcagcaggccgacaacaugaucaccgagaugcugcagaaggaguacauggagcggcaggggaagaccccgcugggccuggucgaccucuucguguucuccacgagcuucuaccugaucuccaucuuccugcaccucgugaagauccccacccaccgccacaucgucggcaagagcugccccaagccccaccggcugaaccacauggggaucugcuccugcgggcuguacaagcagccgggcgugcccgugcgcuggaagcgguga

SEQ ID NO: 31518 - RNA, 1476 nt, Artificial Sequence
  derived and/or modified CDS sequence (opt1) from LASV(G502-SLE-2009;Clade IV)__AIT17126__GPCmut7
augggccagaucgugaccuucuuccaggaggucccccacgugaucgaggaggugaugaacaucguccugaucgcccucagcauccuggccgugcugaaggggcucuacaacuucgcgaccugcggccugguggggcugcucacguuccugcugcucugcggccgcuccugcaccaccgggcuguacaagggcgucuacgagcugcagacccucgagcugaacauggagacgcugaacaugaccaugccgcucagcugcaccaagaacaacucccaccacuacaucauggugggcaacgagaccgggcuggagcugacgcucaccaacaccagcaucaucaaccacaaguucugcaaccuguccgacgcccacaagaagaaccuguacgaccacgcccucaugagcaucaucuccaccuuccaccugagcauccccaacuucaaccaguacgaggccauguccugcgacuucaacggcgggaagaucagcgugcaguacaaccugucccacagcuacgccggcgacgcggccgaccacugcgggacggucgccaacggcgugcuccagaccuucaugcggauggccuggggcggguccuacaucgcgcuggacagcggccgcgggcggugggacugcaucaugaccuccuaccaguaccugaucauccagaacaccacgugggaggaccacugccaguucagccgccccucccccaucggcuaccucggccugcugagccagcggacccgcgacaucuacaucucccggcgccuccuggggaccuucaccuggacgcugagcgacagcgagggcaaggacacccccgggggcuacugccucacccgguggaugcugaucgaggccgagcugaagugcuucgggaacaccgccguggccaagugcaacgagaagcacgacgaggaguucugcgacaugcuccgccuguucgacuucaacaagcaggccauccagcggcugaaggcgccggcccagauguccauccagcucaucaacaaggccgucaacgcccugaucaacgaccagcuggugaugaagaaccaccuccgcgacaucaugggcauccccuacugcaacuacagccgguacugcuaccugaaccacacgaccaccggccgcaccucccugcccaagugcugccucgugagcaacggguccuaccugaacgagacgcacuucagcgacgacaucgagcagcaggccgacaacaugaucaccgagaugcugcagaaggaguacauggagcggcagggcaagaccccgcuggggcucgucgaccuguucguguucuccaccagcuucuaccugaucuccaucuuccuccaccuggugaagauccccacgcaccgccacaucgucggcaagagcugccccaagccccaccggcugaaccacauggggaucugcuccugcggccucuacaagcagccgggcgugcccgugaaguggaagcgcuga

SEQ ID NO: 31519 - RNA, 1476 nt, Artificial Sequence
  derived and/or modified CDS sequence (opt1) from LASV(G733-SLE-2010;Clade IV)__AIT17154__GPCmut7
augggccagaucgugaccuucuuccaggaggucccccacgugaucgaggaggugaugaacaucguccugaucgcccucagcauccuggccgugcugaaggggcucuacaacuucgcgaccugcggcaucguggggcuggucuccuuccugcuccugugcggccgcagcugcacgaccucccuguacaaggggguguacgagcuccagacccuggagcugaacauggagacccucaacaugacgaugccgcugagcugcaccaagaacaacucccaccacuacaucauggugggcaacgagaccggccuggagcucacccugacgaacaccagcaucaucaaccacaaguucugcaaccuguccgacgcccacaagaagaaccucuacgaccacgcccugaugagcaucaucuccaccuuccaccugagcauccccaacuucaaccaguacgaggccauguccugcgacuucaacgggggcaagaucagcguccaguacaaccucucccacagcuacgccggggacgcggccaaccacugcggcaccaucgccaacggggugcugcagacguucaugcggauggccuggggcggcuccuacaucgcgcuggacagcgggcgcgaccggugggacugcaucaugaccuccuaccaguaccucaucauccagaacaccaccugggaggaccacugccaguucagccgccccucccccaucggcuaccuggggcugcucagccagcggacgcgcgacaucuacaucagccggcgccugcugggcaccuucaccuggacccucuccgacagcgagggcaaggacacgcccgggggcuacugccugacccgguggaugcugaucgaggccgagcucaagugcuucgggaacaccgccguggccaagugcaacgagaagcacgacgaggaguucugcgacaugcugcgccuguucgacuucaacaagcaggccauccagcggcucaaggcgccggcccagauguccauccagcugaucaacaaggccgucaacgcccugaucaacgaccagcucaucaugaagaaccaccuccgcgacaucaugggcauccccuacugcaacuacagcaaguacugcuaccugaaccacaccacgaccgggaagaccucccugcccaagugcugccuggugagcaacggcuccuaccugaacgagacccacuucagcgacgacaucgagcagcaggccgacaacaugaucacggagaugcuccagaaggaguacauggagcggcagggcaagaccccgcuggggcugguggaccuguucgucuucuccaccagcuucuaccucaucuccaucuuccugcaccuggugaagauccccacccaccgccacguggucggcaagagcugccccaagccccaccggcucaaccacauggggaucugcuccugcggccuguacgggcagccgggcgugcccgugaaguggaagcgcuga

SEQ ID NO: 31520 - RNA, 1476 nt, Artificial Sequence
  derived and/or modified CDS sequence (opt1) from MOPV/LASV reassortant(IGS-1;Clade IV)__AFY05576__GPCmut7
augggccagaucgugaccuucuuccaggaggucccccacgugaucgaggaggugaugaacaucguccugaucgcccucagcgugcuggccgugcugaaggggcucuacaacuucgcgaccugcggccuggucgggcuggugacguuccuccugcugugcggccgcuccugcaccaccagccucuacaaggggguguacgagcugcagacccuggagcucaacauggagacgcugaacaugaccaugccgcuguccugcaccaagaacaacagccaccacuacaucauggucggcaacgagaccggccucgagcugacgcugaccaacaccuccaucaucaaccacaaguucugcaaccucagcgacgcccacaagaagaaccuguacgaccacgcccugauguccaucaucagcaccuuccaccucuccauccccaacuucaaccaguacgaggccaugagcugcgacuucaacgggggcaagaucuccgugcaguacaaccugagccacuccuacgccggggacgcggccaaccacugcggcacgguggccaacgggguccugcagaccuucaugcggauggccuggggcggcagcuacaucgcgcucgacuccgggcgcggcaacugggacugcaucaugaccagcuaccaguaccugaucauccagaacaccacgugggaggaccacugccaguucucccggcccagccccaucggguaccugggccuccugucccagcgcacccgggacaucuacaucagccgccggcugcucggcaccuucaccuggacgcugagcgacuccgagggggaggacaccccgggcggguacugccugacccgcuggaugcucaucgaggccgagcugaagugcuucggcaacaccgccguggccaagugcaacgagaagcacgacgaggaguucugcgacaugcugcggcuguucgacuucaacaagcaggccauccagcgccugaaggcgcccgcccagaugagcauccagcugaucaacaaggccgugaacgcccucaucaacgaccagcugaucaugaagaaccaccuccgggacaucauggggauccccuacugcaacuacuccaaguacugcuaccucaaccacacgaccaccggccgcaccagccugcccaagugcugccuggucuccaacggcagcuaccucaacgagacgcacuucuccgacgacaucgagcagcaggccgacaacaugaucaccgagaugcugcagaaggaguacauggagcggcaggggaagaccccgcugggccugguggaccucuucguguucagcaccuccuucuaccugaucagcaucuuccugcaccucgucaagauccccacgcaccgccacaucguggggaaguccugccccaagccccaccggcugaaccacaugggcaucugcagcugcgggcuguacaagcagccgggcgugcccgucaaguggaagcgcuga

SEQ ID NO: 31521 - RNA, 1476 nt, Artificial Sequence
  derived and/or modified CDS sequence (opt1) from LASV(LM765-SLE-2012;Clade IV)__AIT17814__GPCmut7
augggccagaucgugaccuucuuccaggaggucccccacgugaucgaggaggugaugaacaucguccugaucgcccucagcauccuggccgugcugaaggggcucuacaacuucgcgaccugcggccugguggggcuggucacguuccuccugcugugcggccgcuccugcaccaccagccucuacaaggggguguacgagcugcagacccuggagcucaacauggagacgcugaacaugaccaugccgcuguccugcaccaagaacaacagccaccacuacaucauggugggcaacgagaccggccucgagcugacgcugaccaacaccuccaucaucgaccacaaguucugcaaccucagcgacgcccaccggaagaaccuguacgaccacgcccugauguccaucaucagcaccuuccaccucuccauccccaacuucaaccaguacgaggccaugagcugcgacuucaacgggggcaagaucuccguccaguacaaccugagccacuccuacgccaaggacgcggccgaccacugcgggacgguggccaacggcgugcugcagaccuucaugcgcauggccuggggcgggagcuacaucgcgcucgacuccggccgggggcgcugggacugcaucaugaccagcuaccaguaccugaucauccagaacaccacgugggaggaccacugccaguucucccggcccagccccaucggcuaccuggggcuccugucccagcgcacccgggacaucuacaucagccgccggcugcucggcaccuucaccuggacgcugagcgacuccgagggcaaggacacccccgggggcuacugccugacccgcuggaugcucaucgaggccgagcugaagugcuucgggaacaccgccgucgccaagugcaacgagaagcacgacgaggaguucugcgacaugcugcggcuguucgacuucaacaagcaggccauccagcgccugaaggcgccggcccagaugagcauccagcugaucaacaaggccgugaacgcccucaucaacgaccagcugaucaugaagaaccaccuccgggacaucaugggcauccccuacugcaacuacuccaaguacugcuaccucaaccacacgaccaccgggaagaccagccugcccaagugcugccugguguccaacggcagcuaccucaacgagacgcacuucuccgacgacaucgagcagcaggccgacaacaugaucaccgagaugcugcagaaggaguacauggagcgccagggcaagaccccgcuggggcuggucgaccucuucguguucagcaccuccuucuaccugaucagcaucuuccugcaccucgugaagauccccacgcaccggcacaucgucggcaagcccugccccaagccgcaccgccugaaccacauggggaucugcuccugcggccuguacaagcagcccggggugcccgugaaguggaagcgguga

SEQ ID NO: 31522 - RNA, 1476 nt, Artificial Sequence
  derived and/or modified CDS sequence (opt1) from LASV(LM776-SLE-2012;Clade IV)__AIT17824__GPCmut7
augggccagaucgugaccuucuuccaggaggucccccacgugaucgaggaggugaugaacaucguccugaucgcccucagcauccuggccgugcugaaggggcucuacaacuucgcgaccugcggccugguggggcuggucacguuccuccugcugugcggccgcuccugcaccaccagcguguacaaggggguguacgagcuccagacccuggagcugaacauggagacgcucaacaugaccaugccgcuguccugcaccaagaacaacagccaccacuacaucauggucggcaacgagaccggccuggagcucacgcugaccaacaccuccaucaucaaccacaaguucugcaaccugagcgacgcccacaagaagaaccucuacgaccacgcccugauguccaucaucagcaccuuccaccuguccauccccaacuucaaccaguacgaggccaugagcugcgacuucaacgggggcaagaucuccgugcaguacaaccucagccacuccuacgccggggacgcggccaaccacugcggcacgguggccaacgggguccugcagaccuucaugcggauggccuggggcggcagcuacaucgcgcuggacuccgggcacggcaagugggacugcaucaugaccagcuaccaguaccucaucauccagaacaccacgugggaggaccacugccaguucucccgccccagccccaucggguaccugggccugcucucccagcggacccgcgacaucuacaucagccggcgccugcugggcaccuucaccuggacgcucagcgacuccgaggggaaggacaccccgggcggguacugccugacccgguggaugcugaucgaggccgagcucaagugcuucggcaacaccgccguggccaagugcaacgagaagcacgacgaggaguucugcgacaugcugcgccuguucgacuucaacaagcaggccauccagcggcucaaggcgcccgcccagaugagcauccagcugaucaacaaggccgugaacgcccugaucaacgaccagcucaucaugaagaaccaccuccgcgacaucauggggauccccuacugcaacuacuccaaguacugcuaccugaaccacacgaccaccggcaagaccagccugcccaagugcugccuggucuccaacggcagcuaccugaacgagacgcacuucuccgacgacaucgagcagcaggccgacaacaugaucaccgagaugcuccagaaggaguacauggagcggcaggggaagaccccgcugggccugguggaccuguucguguucagcaccuccuucuaccucaucagcaucuuccugcaccuggucaagauccccacgcaccgccacaucguggggaaguccugccccaagccccaccggcucaaccacaugggcaucugcagcugcgggcuguacaagcagccgggcgugcccguccgcuggaagcgguga

SEQ ID NO: 31523 - RNA, 1476 nt, Artificial Sequence
  derived and/or modified CDS sequence (opt1) from LASV(Mad39;Clade IV)__ANH09722__GPCmut7
augggccagaucgugaccuucuuccaggaggucccccacgugaucgaggaggugaugaacaucguccugaucgcccucagcauccuggccgugcugaaggggcucuacaacguggcgaccugcggccugaucgggcuggucacguuccuccugcugugcggccgcuccugcaccaccacccucuacaaggggguguacgagcugcaggcccuggagcucaacauggagacgcugaacaugaccaugccgcugagcugcaccaagaacaacucccaccacuacauccgggugggcaacgagaccggccucgagcugacgcugaccaacaccagccucaucaaccacaaguucugcaaccuguccgacgcccacaagaagaaccuguacgaccacgcccucaugagcaucaucuccaccuuccaccugagcauccccaacuucaaccaguacgaggccauguccugcgacuucaacgacgggaagaucagcguccaguacaaccugucccacacguacgcgggcgacaccgccaaccacugcgggaccguggccaacggcgugcuccagaccuucaugcgcauggccuggggcgggagcuacaucgcgcuggacuccggccgcgggggcugggacugcaucaugacgagcuaccaguaccugaucauccagaacaccaccugggaggaccacugccaguucucccggcccagccccaucggguaccucggccugcugucccagcggacccgcgacaucuacaucagccggcgccuccugggcacguucaccuggacccuguccgacagcgaggggaaggacaccccgggcggguacugccucacgcgguggaugcugaucgaggccgagcugaagugcuucggcaacaccgccgucgccaagugcaacgagaagcacgacgaggaguucugcgacaugcuccgccuguucgacuucaacaagcaggccauccagcggcugaaggcgcccgcccagaugagcauccagcucaucaacaaggccgugaacgcccugaucaacgaccagcugaucaugaagaaccaccuccgcgacaucauggggauccccuacugcaacuacuccaaguacugcuaccugaaccacaccgugaccggcaagacgagccugcccaagugcugccucgucuccaacggcagcuaccugaacgagacccacuucuccgacgacaucgagcagcaggccgacaacaugaucaccgagaugcugcagaaggaguacauggagcggcaggggaagaccccgcugggccucguggaccuguucguguucagcacguccuucuaccugaucagcaucuuccuccaccuggucaagauccccacccaccgccacgugguggggaagcccugccccaagccgcaccggcugaaccacaugggcaucugcuccugcggguucuacaagcagcccggcguccccgugcgcuggaagcgguga

SEQ ID NO: 31524 - RNA, 1476 nt, Artificial Sequence
  derived and/or modified CDS sequence (opt1) from LASV(Z0947-SLE-2011;Clade IV)__AIT17840__GPCmut7
augggccagaucgugaccuucuuccaggaggucccccacgugaucgaggaggugaugaacaucguccugaucgcccucagcauccuggccgugcugaaggggcucuacaacuucgcgaccugcggccugguggggcuggucacguuccuccugcugugcggccgcuccugcaccaucagccucuacaaggggguguacgagcugcagacccuggagcucaacauggagacccugaacaugacgaugccgcuguccugcaccaagaacaacagccaccacuacaucauggugggcaacgagaccggccucgagcugacccugacgaacaccuccaucaucaaccacaaguucugcaaccucagcgacgcccacaagaagaaccuguacgaccacgcccugauguccaucaucagcaccuuccaccucuccauccccaacuucaaccaguacgaggccaugagcugcgacuucaacgggggcaagaucuccguccaguacaaccugagccacuccuacgccggggacgcggccaaccacugcggcaccguggccaacggggugcugcagacguucaugcggauggccuggggcggcagcuacaucgcgcucgacuccgggcgcgaccggugggacugcaucaugaccagcuaccaguaccugaucauccagaacaccaccugggaggaccacugccaguucucccgccccagccccaucggcuaccuggggcuccugucccagcggacgcgcgacaucuacaucagccggcgccugcucggcaccuucaccuggacccugagcgacuccgagggcaaggacacgcccgggggcuacugccugacccgguggaugcucaucgaggccgagcugaagugcuucgggaacaccgccgucgccaagugcaacgagaagcacgacgaggaguucugcgacaugcugcgccucuucgacuucaacaagcaggccauccagcggcugaaggcgccggcccagaugagcauccagcugaucaacaaggccgugaacgcccucaucaacgaccagcugaucaugaagaaccaccuccgcgacaucaugggcauccccuacugcaacuacuccaaguacugcuaccugaaccacaccacgaccgggaagaccagccugcccaagugcugccugguguccaacggcagcuaccucaacgagacccacuucuccgacgacaucgagcagcaggccgacaacaugaucacggagaugcugcagaaggaguacauggagcggcagggcaagaccccgcuggggcuggucgaccucuucguguucagcaccuccuucuaccugaucagcaucuuccugcaccucgugaagauccccacccaccgccacaucgucggcaagcccugccccaagccgcaccggcugaaccacauggggaucugcuccugcggccuguacaagcagcccggggugcccgugaaguggaagcgcuga

SEQ ID NO: 31525 - RNA, 1476 nt, Artificial Sequence
  derived and/or modified CDS sequence (opt4) from LASV(Josiah;Clade IV)__NP_694870__GPCmut7
augggccagaucgugaccuucuuccaggaggugccccacgugaucgaggaggugaugaacaucgugcugaucgcccugagcgugcuggccgugcugaagggccuguacaacuucgccaccugcggccuggugggccuggugaccuuccugcugcugugcggcagaagcugcaccaccagccuguacaagggcguguacgagcugcagacccuggagcugaacauggagacccugaacaugaccaugccccugagcugcaccaagaacaacagccaccacuacaucauggugggcaacgagaccggccuggagcugacccugaccaacaccagcaucaucaaccacaaguucugcaaccugagcgacgcccacaagaagaaccuguacgaccacgcccugaugagcaucaucagcaccuuccaccugagcauccccaacuucaaccaguacgaggccaugagcugcgacuucaacggcggcaagaucagcgugcaguacaaccugagccacagcuacgccggcgacgccgccaaccacugcggcaccguggccaacggcgugcugcagaccuucaugagaauggccuggggcggcagcuacaucgcccuggacagcggcagaggcaacugggacugcaucaugaccagcuaccaguaccugaucauccagaacaccaccugggaggaccacugccaguucagcagacccagccccaucggcuaccugggccugcugagccagagaaccagagacaucuacaucagcagaagacugcugggcaccuucaccuggacccugagcgacagcgagggcaaggacacccccggcggcuacugccugaccagauggaugcugaucgaggccgagcugaagugcuucggcaacaccgccguggccaagugcaacgagaagcacgacgaggaguucugcgacaugcugagacuguucgacuucaacaagcaggccauccagagacugaaggcccccgcccagaugagcauccagcugaucaacaaggccgugaacgcccugaucaacgaccagcugaucaugaagaaccaccugagagacaucaugggcauccccuacugcaacuacagcaaguacugcuaccugaaccacaccaccaccggcagaaccagccugcccaagugcugccuggugagcaacggcagcuaccugaacgagacccacuucagcgacgacaucgagcagcaggccgacaacaugaucaccgagaugcugcagaaggaguacauggagagacagggcaagaccccccugggccugguggaccuguucguguucagcaccagcuucuaccugaucagcaucuuccugcaccuggugaagauccccacccacagacacaucgugggcaagagcugccccaagccccacagacugaaccacaugggcaucugcagcugcggccuguacaagcagcccggcgugcccgugaaguggaagagauga

SEQ ID NO: 31526 - RNA, 1473 nt, Artificial Sequence
  derived and/or modified CDS sequence (opt4) from LASV(LP;Clade I)__AAF86701__GPCmut7
augggccagaucaucaccuucuuccaggaggugccccacgugaucgaggaggugaugaacaucgugcugaucgcccugagccugcuggccauccugaagggccuguacaacaucgccaccugcggcaucaucggccugguggccuuccuguuccugugcggcaagagcugcagccugacccugaagggcggcuacgagcugcagacccuggagcugaacauggagacccugaacaugaccaugccccugagcugcaccaagaacagcagccaccacuacaucagagugggcaacgagaccggccuggagcugacccugaccaacaccagcaucaucaaccacaaguucugcaaccugagcgacgcccacaagaagaaccuguacgaccacgcccugaugagcaucaucagcaccuuccaccugagcauccccaacuucaaccaguacgaggccaugagcugcgacuucaacggcggcaagaucagcgugcaguacaaccugagccacagcuacgccggcgacgccgccgagcacugcggcaccguggccaacggcgugcugcagaccuucaugagaauggccuggggcggcagauacaucgcccuggacagcggcaagggcaacugggacugcaucaugaccagcuaccaguaccugaucauccagaacaccaccugggaggaccacugccaguucagcagacccagccccaucggcuaccugggccugcugagccagagaaccagagacaucuacaucagcagaagacugcugggcaccuucaccuggacccugagcgacagcgagggcaacgagacccccggcggcuacugccugaccagauggaugcugaucgaggccgagcugaagugcuucggcaacaccgccguggccaagugcaacgagaagcacgacgaggaguucugcgacaugcugagacuguucgacuucaacaagcaggccaucagaagacugaaggcccccgcccagaugagcauccagcugaucaacaaggccgugaacgcccugaucaacgaccagcugaucaugaagaaccaccugagagacaucaugggcauccccuacugcaacuacagcaaguacugcuaccugaaccacaccagcagcggcagaaccagccugcccaagugcugccugaucagcaacggcagcuaccugaacgagacccaguucagcgacgacaucgagcagcaggccgacaacaugaucaccgagaugcugcagaaggaguacaucgagagacagggcaagaccccccugggccugguggacaucuucaucuucagcaccagcuucuaccugaucagcaucuuccugcaccugaucaagauccccacccacagacacaucgugggcaagcccugccccaagccccacagacugaaccacaugggcgugugcagcugcggccuguacaagcaccccggcgugcccaccaaguggaagagauga

SEQ ID NO: 31527 - RNA, 1473 nt, Artificial Sequence
  derived and/or modified CDS sequence (opt4) from LASV(803213;Clade II)__AAF86703__GPCmut7
augggccagaucaucaccuucuuccaggaggugccccacgugaucgaggaggugaugaacaucgugcugaucgcccugagccugcuggccauccugaagggcaucuacaacguggccaccugcggccuguucggccugaucagcuuccugcugcugugcggcagaagcugcagcgugaccuacaagggcguguacgagcugcagacccuggagcugaacauggccaaccugaacaugaccaugccccugagcugcaccaagaacaacagccaccacuacaucauggugggcaacgagaccggccuggagcugacccugaccaacaccagcaucaucaaccacaaguucugcaaccugagcgacgcccacaagaagaaccuguacgaccacgcccugaugagcaucaucagcaccuuccaccugagcauccccaacuucaaccaguacgaggccaugagcugcgacuucaacggcggcaagaucagcgugcaguacaaccugagccacagcuucgccguggacgccgccaaccacugcggcaccaucgccaacggcgugcugcagaccuucaugagaauggccuggggcggcagcuacaucgcccuggacagcggcaagggcaacugggacugcaucaugaccagcuaccaguaccugaucauccagaacaccaccugggaggaccacugccaguucagcagacccagccccaucggcuaccugggccugcugagccagagaaccagagacaucuacaucagcagaagacugcugggcaccuucaccuggacccugagcgacagcgagggcaacgaggcccccggcggcuacugccugaccagauggaugcugaucgaggccgagcugaagugcuucggcaacaccgccguggccaagugcaacgagaagcacgacgaggaguucugcgacaugcugagacuguucgacuucaacaagcaggccaucaagagacugaagacccccgcccagaugagcauccagcugaucaacaaggccgugaacgcccugaucaacgaccagcugaucaugaagaaccaccugagagacaucaugggcauccccuacugcaacuacagcagauacugcuaccugaaccacaccgugaccggcaagaccagccugcccagaugcugccuggugagcaacggcagcuaccugaacgagacccacuucagcgacgacaucgagcagcaggccgacaacaugaucaccgagaugcugcagaaggaguacauggacagacagggcaagaccccccugggccugguggaccuguucguguucagcaccagcuucuaccugaucagcaucuuccugcaccuggugaagauccccacccacagacacaucgugggcaagcccugccccaagccccacagacugaaccacaugggcaucugcagcugcggccuguacaagcaccccggcgugcccgugaaguggaagagauga

SEQ ID NO: 31528 - RNA, 1473 nt, Artificial Sequence
  derived and/or modified CDS sequence (opt4) from LASV(GA391;Clade III)__CAA36645__GPCmut7
augggccagaucgugaccuucuuccaggaggugccccacgugaucgaggaggugaugaacaucgugcugaucgcccugagcauccuggccauccugaagggccuguacaacguggccaccugcggccugaucggccuggugaccuuccugcugcugagcggcagaagcugcagccugaucuacaagggcaccuacgagcugcagacccuggagcugaacauggagacccugaacaugaccaugccccugagcugcaccaagaacaacagccaccacuacaucagagugggcaacgagaccggccuggagcugacccugaccaacaccagcauccugaaccacaaguucugcaaccugagcgacgcccacaagagaaaccuguacgaccacagccugaugagcaucaucagcaccuuccaccugagcauccccaacuucaaccaguacgaggccaugagcugcgacuucaacggcggcaagaucaccgugcaguacaaccugagccacagcuucgccguggacgccgccggccacugcggcacccuggccaacggcgugcugcagaccuucaugagaauggccuggggcggcagcuacaucgcccuggacagcggcagaggcaacugggacugcaucaugaccagcuaccaguaccugaucauccagaacaccaccugggacgaccacugccaguucagcagacccagccccaucggcuaccugggccugcugagccagagaaccagagacaucuacaucagcagaagacugcugggcaccuucaccuggacccugagcgacagcgagggcaacgagacccccggcggcuacugccugaccagauggaugcugaucgaggccgagcugaagugcuucggcaacaccgccguggccaagugcaacgagaagcacgacgaggaguucugcgacaugcugagacuguucgacuucaacaagcaggccaucagaagacugaagacccccgcccagaugagcauccagcugaucaacaaggccgugaacgcccugaucaacgaccagcugaucaugaagaaccaccugagagacaucaugggcauccccuacugcaacuacagcagauacugcuaccugaaccacaccagcaccggcaagaccagccugcccagaugcugccugaucagcaacggcagcuaccugaacgagaccaaguucagcgacgacaucgagcagcaggccgacaacaugaucaccgagaugcugcagaaggaguacaucgacagacagggcaagaccccccugggccugguggaccuguucguguucagcaccagcuucuaccugaucagcaucuuccugcaccuggugaagauccccacccacagacacaucgugggcaagcccugccccaagccccacagacugaaccacaugggcaucugcagcugcggccuguacaagcagcccggcgugcccgugagauggaagagauga

SEQ ID NO: 31529 - RNA, 1476 nt, Artificial Sequence
  derived and/or modified CDS sequence (opt4) from LASV(AV;Clade V)__CCA30314__GPCmut7
augggccagaucgugaccuucuuccaggaggugccccacgugaucgaggaggugaugaacaucgugcugaucgcccugagcauccuggccgugcugaagggccuguacaacaucgccaccugcggccugaucggccugaucaccuuccugcugcugugcggcagaagcugcagcagcaaccuguacaagggcguguacgagcugcagagccuggaccugaacauggagacccugaacaugaccaugccccugagcugcaccaagaacaacagccaccacuacaucagagugggcaacgacaccggccuggagcugacccugaccaacaccagcauccugaaccacaaguucugcaaccugagcgacgcccacaagaaggaccuguacgaccacgcccugaugagcaucaucagcaccuuccaccugagcauccccaacuucaaccaguacgaggccaugagcugcgacuucaacggcggcaagaucagcgugcaguacaaccugagccacagcuacgccaucgacgccgccaaccacugcggcaccguggccaacggcauccugcagaccuucaugagaauggccuggggcggcagcuacaucgcccuggacagcggcagaggcaacugggacugcaucaugaccagcuaccaguaccugaucauccagaacaccaccugggagaaccacugccaguucagcagacccagccccaucggcuaccugggccugcugagccagagaaccagagacaucuacaucagcagaagacugcugggcaccuucaccuggacccugagcgacagcgagggcaacgccacccccggcggcuacugccugaccagauggaugcugaucgaggccgagcugaagugcuucggcaacaccgccguggccaagugcaacgagaagcacgacgaggaguucugcgacaugcugagacuguucgacuucaacaagcaggccaucagcagacugaagagccccgcccagaugagcauccagcugaucaacaaggccgugaacgcccugaucaacgaccagcugaucaugaagaaccaccugagagacaucaugggcauccccuacugcaacuacagcaaguacugcuaccugaaccacaccaucaccggcaagaccagccugcccaagugcugccuggugagcaacggcagcuaccugaacgagacccacuucagcgacgacaucgagcagcaggccgacaacaugaucaccgagaugcugcagaaggaguacauggagagacagggcaagaccccccugggccugguggaccuguucguguucagcaccagcuucuaccugaucagcaucuuccugagacuggugaagauccccacccacagacacaucgugggcaagcccugccccaagccccacagacugaaccacaugggcaucugcagcugcggccuguacaagcagcccggcgugcccgugagauggaagagauga

SEQ ID NO: 31530 - RNA, 1473 nt, Artificial Sequence
  derived and/or modified CDS sequence (opt4) from LASV(Togo/2016/7082;Clade VI)__AMR44577__GPCmut7
augggccagaucaucaccuucuuccaggaggugccccacgugaucgaggaggugaugaacaucgugcugaucgcccugagccugcuggccauccugaagggcguguacaacguggccaccugcggcaucaucggccuggugaccuuccuguuccugugcggcagaagcugcagccugaucuacaagggcagcuacgagcugcagacccuggagcugaacauggagacccugaacaugaccaugccccugagcugcaccaagaacagcagccaccacuacaucagagugggcaacgagaccggccuggagcugacccugaccaacaccagcaucaucaaccacaaguucugcaaccugagcgacgcccacaagagaaaccuguacgaccacgcccugaugagcauccugagcaccuuccaccugagcauccccaacuucaaccaguacgaggccaugagcugcgacuucaacggcggcaagaucagcgugcaguacaaccugagccacgccuacgccguggacgccgccgagcacugcggcaccguggccaacggcgugcugcagaccuucaugagaauggccuggggcggcagcuacaucgcccuggacagcggcagaggcaacugggacugcaucaugaccagcuaccaguaccugaucauccagaacaccaccugggaggaccacugccaguucagcagacccagccccaucggcuaccugggccugcugagccagagaaccagagacaucuacaucagcagaagacugcugggcaccuucaccuggacccugagcgacagcgagggcaacgagacccccggcggcuacugccugaccagauggaugcugaucgaggccgagcugaagugcuucggcaacaccgccguggccaagugcaacgagaagcacgacgaggaguucugcgacaugcugagacuguucgacuucaacaagcaggccauccagagacugaagagccccgcccagaugagcauccagcugaucaacaaggccgugaacgcccugaucaacgaccagcugaucaugaagaaccaccugagagacaugaugggcauccccuacugcaacuacagcaaguacugcuaccugaaccacaccagcagcggcagaaccagccugcccaagugcugccuggugagcaacggcagcuaccugaacgagacccacuucagcgacgacaucgagcagcaggccgacaacaugaucaccgagaugcugcagaaggaguacaucgacagacagggcaagaccccccugggccugguggaccuguucguguucagcaccagcuucuaccugaucagcaucuuccugcaccugaucaagauccccacccacagacacaucgugggcaagcccugccccaagccccacagacugaaccacaugggcaucugcagcugcggccuguacaagcagcccggcgugcccaccagauggaagagauga

SEQ ID NO: 31531 - RNA, 1473 nt, Artificial Sequence
  derived and/or modified CDS sequence (opt4) from LASV(KAK-428;Clade n.d. (VII))__ANH09740__GPCmut7
augggccagaucgugaccuucuuccaggaggugccccacgugaucgaggaggugaugaacaucgugcugaucgcccugagccugcuggccauccugaagggccuguacaacuucgccaccugcggcgugaucggccugaucaccuuccugcugcugugcggcagaagcugcagcgccaccuacaagggccaguacgagcugcagacccuggagcugaacauggagagccugaacaugaccaugccccugagcugcaccaagaacaacagccaccacuacaucagagccggcaacaacaccggccuggagcugacccugaccaacaccagcaucaucagccacaaguucugcaaccugagcgacgcccacaagaagaaccuguacgaccacacccugaugagcaucaucaccaccuuccaccugagcauccccaacuucaaccaguacgaggccaugagcugcgacuucaacggcggcaagaucagcauccaguacaaccugagccacagcuacgccggcgacgccgcccagcacugcggcaccguggccaacggcgugcugcagaccuucaugagaauggccuggggcggcagcuaccuggcccuggacagcggcagaagaggcugggacugcaucaucagcagcuaccaguaccugaucauccagaacaccaccugggacgaccacugccaguucagcagacccagccccaucggcuaccugggcuucgugagccagaagaccagagacaucuacaucagcagaagacugcugggcaccuucaccuggacccugagcgacagcgagggccacgacaugcccggcggcuacugccugaccagauggaugcugaucgaggccgaccugaagugcuucggcaacaccgccguggccaagugcaacgagaagcacgacgaggaguucugcgacauguggagacuguucgacuucaacaagcaggccauccagagacugaaggcccccgcccagaugaacauccagcugaucaacaaggccgugaacgcccugaucaacgaccagcugaugaugaagaaccaccugagagacaucaugggcauccccuacugcaacuacagcaaguucugcuaccugaacaacaccaccaccggcagaaccagccugcccagaugcugccugaucagcaacggcagcuaccugaacgagacccacuucagcgacgacaucgagcagcaggccgacaacaugaucaccgagaugcugcagaaggaguacauggacagacagggcaagaccccccugggccugguggaccuguucguguucagcaccagcuucuaccugaucaccaucuuccugcaccuggugaagauccccacccacagacacaucgugggcaagcccugccccaagccccacagacugaaccacaugggcaucugcagcugcggccuguacaagcagcccggcgugcccgugagauggaagagauga

SEQ ID NO: 31532 - RNA, 1473 nt, Artificial Sequence; identical to SEQ ID NO: 31526
  derived and/or modified CDS sequence (opt4) from LASV(Pinneo-NIG-1969;Clade I)__AIT17836__GPCmut7

SEQ ID NO: 31533 - RNA, 1473 nt, Artificial Sequence
  derived and/or modified CDS sequence (opt4) from LASV(ISTH0009-NIG-2011;Clade II)__AIT17404__GPCmut7
augggccagaucaucaccuucuuccaggaggugccccacgugaucgaggaggugaugaacaucgugcugaucgcccugagccugcuggccauccugaagggcaucuacaacguggccaccugcggccuguucggccuggugagcuuccugcugcugugcggcagaagcugcagcaccaccuacaagggcguguacgagcugcagacccuggagcuggacauggccagccugaacaugaccaugccccugagcugcaccaagaacaacagccaccacuacaucauggugggcaacgagaccggccuggagcugacccugaccaacaccagcaucaucaaccacaaguucugcaaccugagcgacgcccacaagaagaaccuguacgaccacgcccugaugagcaucaucagcaccuuccaccugagcauccccaacuucaaccaguacgaggccaugagcugcgacuucaacggcggcaagaucagcgugcaguacaaccugagccacgccuacgccguggacgccgccaaccacugcggcaccaucgccaacggcgugcugcagaccuucaugagaauggccuggggcggcagcuacaucgcccuggacagcggcaagggcagcugggacugcaucaugaccagcuaccaguaccugaucauccagaacaccaccugggaggaccacugccaguucagcagacccagccccaucggcuaccugggccugcugagccagagaaccagagacaucuacaucagcagaagacugcugggcaccuucaccuggacccugagcgacagcgagggcaacgagacccccggcggcuacugccugaccagauggaugcugaucgaggccgagcugaagugcuucggcaacaccgccguggccaagugcaacgagaagcacgacgaggaguucugcgacaugcugagacuguucgacuucaacaagcaggccaucagaagacugaagacccccgcccagaugagcauccagcugaucaacaaggccgugaacgcccugaucaacgaccagcugaucaugaagaaccaccugagagacaucaugggcauccccuacugcaacuacagcaaguacugcuaccugaaccacaccgugaccggcaagaccagccugcccagaugcugccuggugagcaacggcagcuaccugaacgagacccacuucagcgacgacaucgagcagcaggccgacaacaugaucaccgagcugcugcagaaggaguacauggacagacagggcaagaccccccugggccugguggaccuguucguguucagcaccagcuucuaccugaucagcaucuuccugcaccugaucaagauccccacccacagacacaucaccggcaagcccugccccaagccccacagacugaaccacaugggcaucugcagcugcggccuguacaagcaccccggcgugcccgugaaguggaagagauga

SEQ ID NO: 31534 - RNA, 1473 nt, Artificial Sequence
  derived and/or modified CDS sequence (opt4) from LASV(ISTH2010-NIG-2012;Clade II)__AIT17482__GPCmut7
augggccagaucaucaccuucuuccaggaggugccccacgugaucgaggaggugaugaacaucgugcugaucgcccugagccugcuggccauccugaagggcaucuacaacguggccaccugcggccuguucggccuggugagcuuccugcugcugugcggcagaagcugcagcaccaccuacaagggcguguacgagcugcagacccuggagcuggacauggccagccugaacaugaccaugccccugagcugcaccaagaacaacagccaccacuacaucauggugggcaacgagaccggccuggagcugacccugaccaacaccagcaucaucaaccacaaguucugcaaccugagcgacgcccacaagaagaaccuguacgaccacgcccugaugagcaucaucagcaccuuccaccugagcauccccaacuucaaccaguacgaggccaugagcugcgacuucaacggcggcaagaucagcgugcaguacaaccugagccacgccuacgccguggacgccgccaaccacugcggcaccaucgccaacggcgugcugcagaccuucaugagaauggccuggggcggcagcuacaucgcccuggacagcggcaagggcagcugggacugcaucaugaccagcuaccaguaccugaucauccagaacaucaccugggaggaccacugccaguucagcagacccagccccaucggcuaccugggccugcugagccagagaaccagagacaucuacaucagcagaagacugcugggcaccuucaccuggacccugagcgacagcgagggcaacgagacccccggcggcuacugccugaccagauggaugcugaucgaggccgagcugaagugcuucggcaacaccgccguggccaagugcaacgagaagcacgacgaggaguucugcgacaugcugagacuguucgacuucaacaagcaggccaucagaagacugaagacccccgcccagaugagcauccagcugaucaacaaggccgugaacgcccugaucaacgaccagcugaucaugaagaaccaccugagagacaucaugggcauccccuacugcaacuacagcaaguacugcuaccugaaccacaccgugaccggcaagaccagccugcccagaugcugccuggugagcaacggcagcuaccugaacgagacccacuucagcgacgacaucgagcagcaggccgacaacaugaucaccgagcugcugcagaaggaguacaucgacagacagggcaagaccccccugggccugguggaccuguucguguucagcaccagcuucuaccugaucagcaucuuccugcaccuggugaagauccccacccacagacacguggugggcaagcccugccccaagccccacagacugaaccacaugggcaucugcagcugcggccuguacaagcaccccggcgugcccgugaaguggaagagauga

SEQ ID NO: 31535 - RNA, 1473 nt, Artificial Sequence
  derived and/or modified CDS sequence (opt4) from LASV(Lassa virus/H.sapiens-wt/NGA/2015/ISTH_0543;Clade II)__AVO03639__GPCmut7
augggccagaucaucaccuucuuccaggaggugccccacgugaucgaggaggugaugaacaucgugcugaucgcccugagccugcuggccauccugaagggcaucuacaacguggccaccugcggccuguucggccuggugagcuuccugcugcugugcggcagaagcugcagcaccaccuacaagggcguguacgagcugcagacccuggagcuggacauggccaaccugaacaugaccaugccccugagcugcaccaagaacaacagccaccacuacaucauggugggcaacgagaccggccuggagcugacccugaccaacaccagcaucaucaaccacaaguucugcaaccugagcgacgcccacaagaagaaccuguacgaccacgcccugaugagcaucaucagcaccuuccaccugagcauccccaacuucaaccaguacgaggccaugagcugcgacuucaacggcggcaagaucagcgugcaguacaaccugagccacaccuacgccguggacgccgccaaccacugcggcaccaucgccaacggcgugcugcagaccuucaugagaauggccuggggcggcagcuacaucgcccuggacagcggcaagggcagcugggacugcaucaugaccagcuaccaguaccuggugauccagaacaccaccugggaggaccacugccaguucagcagacccagccccaucggcuaccugggccugcugagccagagaaccagagacaucuacaucagcagaagacugcugggcaccuucaccuggacccugagcgacagcgagggcaacgagacccccggcggcuacugccugaccagauggaugcugaucgaggccgagcugaagugcuucggcaacaccgccguggccaagugcaacgagaagcacgacgaggaguucugcgacaugcugagacuguucgacuucaacaagcaggccaucagaagacugaagacccccgcccagaugagcauccagcugaucaacaaggccgugaacgcccugaucaacgaccagcugaucaugaagaaccaccugagagacaucaugggcauccccuacugcaacuacagcaaguacugcuaccugaaccacaccgugaccggcaagaccagccugcccagaugcugccuggugagcaacggcagcuaccugaacgagacccacuucagcgacgacaucgagcagcaggccgacaacaugaucaccgagcugcugcagaaggaguacaucgacagacagggcaagaccccccugggccugguggaccuguucguguucagcaccagcuucuaccugaucagcaucuuccugcaccuggugaagauccccacccacagacacaucaccggcaagcccugccccaagccccacagacugaaccacaugggcaucugcagcugcggccuguacaagcaccccggcgugcccgugaaguggaagagauga

SEQ ID NO: 31536 - RNA, 1473 nt, Artificial Sequence
  derived and/or modified CDS sequence (opt4) from LASV(Lassa virus/H.sapiens-wt/NGA/2016/ISTH_0009;Clade II)__AVO03571__GPCmut7
augggccagaucaucaccuucuuccaggaggugccccacgugaucgaggaggugaugaacaucgugcugaucgcccugagccugcuggccauccugaagggcaucuacaacguggccaccugcggccugcugggccuggugagcuuccugcugcugugcggcagaagcugcagcaccaccuacaagggcguguacgagcugcagacccuggagcuggacauggccagccugaacaugaccaugccccugagcugcaccaagaacaacagccaccacuacaucauggugggcaacgagaccggccuggagcugacccugaccaacaccagcaucaucaaccacaaguucugcaaccugagcgacgcccacaagaagaaccuguacgaccacgcccugaugagcaucaucagcaccuuccaccugagcauccccaacuucaaccaguacgaggccaugagcugcgacuucaacggcggcagaaucagcgugcaguacaaccugagccacagcuacgccguggacgccgccaaccacugcggcaccaucgccaacggcgugcugcagaccuucaugagaauggccuggggcggcagcuacaucgcccuggacagcggcaagggcagcugggacugcaucaugaccagcuaccaguaccugaucauccagaacaccaccugggaggaccacugccaguucagcagacccagccccaucggcuaccugggccugcugagccagagaaccagagacaucuacaucagcagaagacugcugggcaccuucaccuggacccugagcgacagcgagggcaacgagacccccggcggcuacugccugaccagauggaugcugaucgaggccgagcugaagugcuucggcaacaccgccguggccaagugcaacgagaagcacgacgaggaguucugcgacaugcugagacuguucgacuucaacaagcaggccaucagaagacugaagacccccgcccagaugagcauccagcugaucaacaaggccgugaacgcccugaucaacgaccagcugaucaugaagaaccaccugagagacaucaugggcauccccuacugcaacuacagcaaguacugcuaccugaaccacaccgugaccggcaagaccagccugcccagaugcugccuggugagcaacggcagcuaccugaacgagacccacuucagcgacgacaucgagcagcaggccgacaacaugaucaccgagcugcugcagaaggaguacaucgacagacagggcaagaccccccugggccugguggaccuguucguguucagcaccagcuucuaccugaucagcaucuuccugcaccuggugaagauccccacccacagacacaucaccggcaagcccugccccaagccccacagacugaaccacaugggcaucugcagcugcggccuguacaaccaccccggcgugcccgugaaguggaagagauga

SEQ ID NO: 31537 - RNA, 1473 nt, Artificial Sequence
  derived and/or modified CDS sequence (opt4) from LASV(Lassa virus/H.sapiens-wt/NGA/2016/ISTH_0017;Clade II)__AVO03567__GPCmut7
augggccagaucaucaccuucuuccaggaggugccccacgugaucgaggaggugaugaacaucgugcugaucgcccugagccugcuggccauccugaagggcaucuacaacguggccaccugcggccuguucggccuggugagcuuccugcugcugugcggcagaagcugcagcaccaccuacaagggcguguacgagcugcagacccuggagcuggacauggccagccugaacaugaccaugccccugagcugcaccaagaacaacagccaccacuacaucauggugggcaacgagaccggccuggagcugacccugaccaacaccagcaucaucaaccacaaguucugcaaccugagcgacgcccacaagaagaaccuguacgaccacgcccugaugagcaucaucagcaccuuccaccugagcauccccaacuucaaccaguacgaggccaugagcugcgacuucaacggcggcaagaucagcgugcaguacaaccugagccacaccuacgccaucgacgccgccaaccacugcggcaccaucgccaacggcgugcugcagaccuucaugagaauggccuggggcggcagcuacaucgcccuggacagcggcaagggcagcugggacugcaucaugaccagcuaccaguaccugaucauccagaacaccaccugggaggaccacugccaguucagcagacccagccccaucggcuaccugggccugcugagccagagaaccagagacaucuacaucagcagaagacugcugggcaccuucaccuggacccugagcgacagcgagggcaacgagacccccggcggcuacugccugaccagauggaugcugaucgaggccgagcugaagugcuucggcaacaccgccguggccaagugcaacgagaagcacgacgaggaguucugcgacaugcugagacuguucgacuucaacaagcaggccaucagaagacugaagacccccgcccagaugagcauccagcugaucaacaaggccgugaacgcccugaucaacgaccagcugaucaugaagaaccaccugagagacaucaugggcauccccuacugcaacuacagcaaguacugcuaccugaaccacaccgugaccggcaagaccagccugcccagaugcugccuggugagcaacggcagcuaccugaacgagacccacuucagcgacgacaucgagcagcaggccgacaacaugaucaccgagcugcugcagaaggaguacauggacagacagggcaagaccccccugggccugguggaccuguucguguucagcaccagcuucuaccugaucagcaucuuccugcaccuggugagaauccccacccacagacacgugaucggcaagcccugccccaagccccacagacugaaccacaugggcaucugcagcugcggccuguacaagcaccccggcgugcccgugaaguggaagagauga

SEQ ID NO: 31538 - RNA, 1473 nt, Artificial Sequence
  derived and/or modified CDS sequence (opt4) from LASV(Lassa virus/H.sapiens-wt/NGA/2018/ISTH_0959;Clade II)__AVV65099__GPCmut7
augggccagaucaucaccuucuuccaggaggugccccacgugaucgaggaggugaugaacaucgugcugaucgcccugagccugcuggccauccugaagggcaucuacaacguggugaccugcggccuguucggccuggugagcuuccugcugcugugcggcagaagcugcagcaccaccuacaagggcguguacgagcugcagacccuggagcuggacauggccagccugaacaugaccaugccccugagcugcaccaagaacaacagccaccacuacaucauggugggcaacgagaccggccuggagcugacccugaccaacaccagcaucaucaaccacaaguucugcaaccugagcgacgcccacaagaagaaccuguacgaccacgcccugaugagcaucaucagcaccuuccaccugagcauccccaacuucaaccaguacgaggccaugagcugcgacuucaacggcggcaagaucagcgugcaguacaaccugagccacgccuacgccaucgacgccgccaaccacugcggcaccaucgccaacggcgugcugcagaccuucaugagaauggccuggggcggcagcuacaucgcccuggacagcggcaagggcagcugggacugcaucaugaccagcuaccaguaccugaucauccagaacaccaccugggaggaccacugccaguucagcagacccagccccaucggcuaccugggccugcugagccagagaaccagagacaucuacaucagcagaagacugcugggcaccuucaccuggacccugagcgacagcgagggcaacgagacccccggcggcuacugccugaccagauggaugcugaucgaggccgagcugaagugcuucggcaacaccgccguggccaagugcaacgagaagcacgacgaggaguucugcgacaugcugagacuguucgacuucaacaagcaggccaucagaagacugaagacccccgcccagaugagcauccagcugaucaacaaggccgugaacgcccugaucaacgaccagcugaucaugaagaaccaccugagagacaucaugggcauccccuacugcaacuacagcaaguacugcuaccugaaccacaccgugaccggcaagaccagccugcccagaugcugccuggugagcaacggcagcuaccugaacgagacccacuucagcgacgacaucgagcagcaggccgacaacaugaucaccgagcugcugcagaaggaguacaucgacagacagggcaagaccccccugggccugguggaccuguucguguucagcaccagcuucuaccugaucagcaucuuccugcaccuggugaagauccccacccacagacacgugaucggcaagcccugccccaagccccacagacugaaccacaugggcaucugcagcugcggccuguacaagcaccccggcgugcccgugaaguggaagagauga

SEQ ID NO: 31539 - RNA, 1473 nt, Artificial Sequence
  derived and/or modified CDS sequence (opt4) from LASV(LASV003-NIG-2008;Clade II)__AIT17580__GPCmut7
augggccagaucaucaccuucuuccaggaggugccccacgugaucgaggaggugaugaacaucgugcugaucgcccugagccugcuggccauccugaagggcaucuacaacguggccaccugcggccuguucggccuggugagcuuccugcugcugugcggcagaagcugcagcaccaccuacaagggcguguacgagcugcagacccuggagcuggacauggccagccugaacaugaccaugccccugagcugcaccaagaacaacagccaccacuacaucauggugggcaacgagaccggccuggagcugacccugaccaacaccagcaucaucaaccacaaguucugcaaccugagcgacgcccacaagaagaaccuguacgaccacgcccugaugagcaucaucagcaccuuccaccugagcauccccaacuucaaccaguacgaggccaugagcugcgacuucaacggcggcaagaucagcgugcaguacaaccugagccacaccuacgccguggacgccgccaaccacugcggcaccaucgccaacggcgugcugcagaccuucaugagaauggccuggggcggcagcuacaucgcccuggacagcggcaagggcagcugggacugcaucaugaccagcuaccaguaccugaucauccagaacaccaccugggaggaccacugccaguucagcagacccagccccaucggcuaccugggccugcugagccagagaaccagagacaucuacaucagcagaagacugcugggcaccuucaccuggacccugagcgacagcgagagcaacgagacccccggcggcuacugccugaccagauggaugcugaucgaggccgagcugaagugcuucggcaacaccgccguggccaagugcaacgagaagcacgacgaggaguucugcgacaugcugagacuguucgacuucaacaagcaggccaucagaagacugaaggcccccgcccagaugagcauccagcugaucaacaaggccgugaacgcccugaucaacgaccagcugaucaugaagaaccaccugagagacaucaugggcauccccuacugcaacuacagcaaguacugcuaccugaaccacaccgugaccggcagaaccagccugcccagaugcugccuggugagcaacggcagcuaccugaacgagacccacuucagcgacgacaucgagcagcaggccgacaacaugaucaccgagcugcugcagaaggaguacauggacagacagggcaagaccccccugggccugguggaccuguucguguucagcaccagcuucuaccugaucagcaucuuccugcaccuggugaagauccccacccacagacacgugaucggcaagcccugccccaagccccacagacugaaccacaugggcaucugcagcugcggccuguacaagcaccccggcgugcccgugaaguggaagagauga

SEQ ID NO: 31540 - RNA, 1473 nt, Artificial Sequence
  derived and/or modified CDS sequence (opt4) from LASV(LASV035-NIG-2009;Clade II)__AIT17588__GPCmut7
augggccagaucaucaccuucuuccaggaggugccccacgugaucgaggaggugaugaacaucgugcugaucgcccugagccugcuggccauccugaagggcaucuacaacguggccaccugcggccuguucggccuggugagcuuccugcugcugugcggcagaagcugcagcaccaccuacaagggcguguacgagcugcagacccuggagcuggacauggccagccugaacaugaccaugccccugagcugcaccaagaacaacagccaccacuacaucauggugggcaacgagaccggccuggagcugacccugaccaacaccagcaucaucaaccacaaguucugcaaccugagcgacgcccacaagaagaaccuguacgaccacgcccugaugagcaucaucagcaccuuccaccugagcauccccaacuucaaccaguacgaggccaugagcugcgacuucaacggcggcaagaucagcgugcaguacaaccugagccacgccuacgccguggacgccgccaaccacugcggcaccaucgccaacggcgugcugcagaccuucaugagaauggccuggggcggcagcuacaucgcccuggacagcggcaagggcagcugggacugcaucaugaccagcuaccaguaccugaucauccagaacaccaccugggaggaccacugccaguucagcagacccagccccaucggcuaccugggccugcugagccagagaaccagagacaucuacaucagcagaagacugcugggcaccuucaccuggacccugagcgacagcgagggcaacgagacccccggcggcuacugccugaccagauggaugcugaucgaggccgagcugaagugcuucggcaacaccgccguggccaagugcaacgagaagcacgacgaggaguucugcgacaugcugagacuguucgacuucaacaagcaggccaucagaagacugaaggcccccgcccagaugagcauccagcugaucaacaaggccgugaacgcccugaucaacgaccagcugaucaugaagaaccaccugagagacaucaugggcauccccuacugcaacuacagcaaguacugcuaccugaaccacaccgugaccggcaagaccagccugcccagaugcugccuggugagcaacggcagcuaccugaacgagacccacuucagcgacgacaucgagcagcaggccgacaacaugaucaccgagcugcugcagaaggaguacaucgacagacagggcaagaccccccugggccugguggaccuguucguguucagcaccagcuucuaccugaucagcaucuuccugcaccuggugaagauccccacccacagacacgugaucggcaagcccugccccaagccccacagacugaaccacaugggcaucugcagcugcggccuguacaagcaccccggcgugcccgugaaguggaagagauga

SEQ ID NO: 31541 - RNA, 1473 nt, Artificial Sequence
  derived and/or modified CDS sequence (opt4) from LASV(LASV1000-NIG-2009;Clade II)__AIT17782__GPCmut7
augggccagaucaucaccuucuuccaggaggugccccacgugaucgaggaggugaugaacaucgugcugaucgcccugagccugcuggccauccugaagggcaucuacaacguggccaccugcggccuguucggccuggugagcuuccugcugcugugcggcagaagcugcagcaccaccuacaagggcguguacgagcugcagacccuggagcuggacauggccagccugaacaugaccaugccccugagcugcaccaagaacaacagccaccacuacaucauggugggcaacgagaccggccuggagcugacccugaccaacaccagcaucaucaaccacaaguucugcaaccugagcgacgcccacaagaagaaccuguacgaccacgcccugaugagcaucaucagcaccuuccaccugagcauccccaacuucaaccaguacgaggccaugagcugcgacuucaacggcggcaagaucagcgugcaguacaaccugagccacaccuacgccguggacgccgccaaccacugcggcaccaucgccaacggcgugcugcagaccuucaugagaauggccuggggcggcagcuacaucgcccuggacagcggcaagggcagcugggacugcaucaugaccagcuaccaguaccugaucauccagaacaccaccugggaggaccacugccaguucagcagacccagccccaucggcuaccugggccugcugagccagagaaccagagacaucuacaucagcagaagacugcugggcaccuucaccuggacccugagcgacagcgagggcaacgagacccccggcggcuacugccugaccagauggaugcugaucgaggccgagcugaagugcuucggcaacaccgccguggccaagugcaacgagaagcacgacgaggaguucugcgacaugcugagacuguucgacuucaacaagcaggccaucaagagacugaagacccccgcccagaugagcauccagcugaucaacaaggccgugaacgcccugaucaacgaccagcugaucaugaagaaccaccugagagacaucaugggcauccccuacugcaacuacagcaaguacugcuaccugaaccacaccgugaccggcaagaccagccugcccagaugcugccuggugagcaacggcagcuaccugaacgagacccacuucagcgacgacaucgagcagcaggccgacaacaugaucaccgagcugcugcagaaggaguacaucgacagacagggcaagaccccccugggccugguggaccuguucguguucagcaccagcuucuaccugaucagcaucuuccugcaccuggugaagauccccacccacagacacguggugggcaagcccugccccaagccccacagacugaaccacaugggcaucugcagcugcggccuguacaagcaccccggcgugcccgugaaguggaagagauga

SEQ ID NO: 31542 - RNA, 1473 nt, Artificial Sequence
  derived and/or modified CDS sequence (opt4) from LASV(LASV221-NIG-2010;Clade II)__AIT17624__GPCmut7
augggccagaucaucaccuucuuccaggaggugccccacgugaucgaggaggugaugaacaucgugcugaucgcccugagccugcuggccauccugaagggcaucuacaacguggccaccugcggccuguucggccuggugagcuuccugcugcugugcggcagaagcugcagcaccaccuacaagggcguguacgagcugcagacccuggagcuggacauggccagccugaacaugaccaugccccugagcugcaccaagaacaacagccaccacuacaucauggugggcaacgagaccggccuggagcugacccugaccaacaccagcaucaucaaccacaaguucugcaaccugagcgacgcccacaagaagaaccuguacgaccacgcccugaugagcaucaucagcaccuuccaccugagcauccccaacuucaaccaguacgaggccaugagcugcgacuucaacggcggcaagaucagcgugcaguacaaccugagccacaccuacgccaucgacgccgccaaccacugcggcaccaucgccaacggcgugcugcagaccuucaugagaauggccuggggcggcagcuacaucgcccuggacagcggcaagggcagcugggacugcaucaugaccagcuaccaguaccugaucauccagaacaccaccugggaggaccacugccaguucagcagacccagccccaucggcuaccugggccugcugagccagagaaccagagacaucuacaucagcagaagacugcugggcaccuucaccuggacccugagcgacagcgagggcaacgagacccccggcggcuacugccugaccagauggaugcugaucgaggccgagcugaagugcuucggcaacaccgccguggccaagugcaacgagaagcacgacgaggaguucugcgacaugcugagacuguucgacuucaacaagcaggccaucagaagacugaagacccccgcccagaugagcauccagcugaucaacaaggccgugaacgcccugaucaacgaccagcugaucaugaagaaccaccugagagacaucaugggcauccccuacugcaacuacagcaaguacugcuaccugaaccacaccgugaccggcaagaccagccugcccagaugcugccuggugagcaacggcagcuaccugaacgagacccacuucagcgacgacaucgagcagcaggccgacaacaugaucaccgagaugcugcagaaggaguacauggacagacagggcaagaccccccugggccugguggaccuguucguguucagcaccagcuucuaccugaucagcaucuuccugcaccuggugaagauccccacccacagacacgugaucggcaagcccugccccaagccccacagacugaaccacaugggcaucugcagcugcggccuguacaagcaccccggcgugcccgugaaguggaagagauga

SEQ ID NO: 31543 - RNA, 1473 nt, Artificial Sequence
  derived and/or modified CDS sequence (opt4) from LASV(LASV237-NIG-2010;Clade II)__AIT17638__GPCmut7
augggccagaucaucaccuucuuccaggaggugccccacgugaucgaggaggugaugaacaucgugcugaucgcccugagccugcuggccauccugaagggcaucuacaacguggccaccugcggccuguucggccuggugagcuuccugcugcugugcggcagaagcugcagcaccaccuacaagggcguguacgagcugcagacccuggagcuggacauggccagccugaacaugaccaugccccugagcugcaccaagaacaacagccaccacuacaucauggugggcaacgagaccggccuggagcugacccugaccaacaccagcaucaucaaccacaaguucugcaaccugagcgacgcccacaagaaggaccuguacgaccacgcccugaugagcaucaucagcaccuuccaccugagcauccccaacuucaaccaguacgaggccaugagcugcgacuucaacggcggcaagaucagcgugcaguacaaccugagccacaccuacgccguggacgccgccaaccacugcggcaccaucgccaacggcgugcugcagaccuucaugagaauggccuggggcggcagcuacaucgcccuggacagcggcaagggcagcugggacugcaucaugaccagcuaccaguaccugaucauccagaacaccaccugggaggaccacugccaguucagcagacccagccccaucggcuaccugggccugcugagccagagaaccagagacaucuacaucagcagaagacugcugggcaccuucaccuggacccugagcgacagcgagggcaacgagacccccggcggcuacugccugaccagauggaugcugaucgaggccgagcugaagugcuucggcaacaccgccguggccaagugcaacgagaagcacgacgaggaguucugcgacaugcugagacuguucgacuucaacaagcaggccaucagaagacugaagacccccgcccagaugagcauccagcugaucaacaaggccgugaacgcccugaucaacgaccagcugaucaugaagaaccaccugagagacaucaugggcauccccuacugcaacuacagcaaguacugcuaccugaaccacaccgugaccggcaagaccagccugcccagaugcugccuggugagcaacggcagcuaccugaacgagacccacuucagcgacgacaucgagcagcaggccgacaacaugaucaccgagcugcugcagaaggaguacauggacagacagggcaagaccccccugggccugguggaccuguucguguucagcaccagcuucuaccugaucagcaucuuccugcaccugaucaagauccccacccacagacacaucaccggcaagcccugccccaagccccacagacugaaccacaugggcaucugcagcugcggccuguacaagcaccccggcgugcccgugaaguggaagagauga

SEQ ID NO: 31544 - RNA, 1473 nt, Artificial Sequence
  derived and/or modified CDS sequence (opt4) from LASV(LASV253-NIG-2011;Clade II)__AIT17670__GPCmut7
augggccagaucaucaccuucuuccaggaggugccccacgugaucgaggaggugaugaacaucgugcugaucgcccugagccugcuggccauccugaagggcaucuacaacguggccaccugcggccuguucggccuggugagcuuccugcugcugugcggcagaagcugcagcaccaccuacaagggcguguacgagcugcagacccuggagcuggacauggccagccugaacaugaccaugccccugagcugcaccaagaacaacagccaccacuacaucauggugggcaacgagaccggccuggagcugacccugaccaacaccagcaucaucaaccacaaguucugcaaccugagcgacgcccacaagaagaaccuguacgaccacgcccugaugagcaucaucagcaccuuccaccugagcauccccaacuucaaccaguacgaggccaugagcugcgacuucaacggcggcaagaucagcgugcaguacaaccugagccacaccuacgccguggacgccgccaaccacugcggcaccaucgccaacggcgugcugcagaccuucaugagaauggccuggggcggcagcuacaucgcccuggacagcggcaagggcagcugggacugcaucaugaccagcuaccaguaccugaucauccagaacaccaccugggaggaccacugccaguucagcagacccagccccaucggcuaccugggccugcugagccagagaaccagagacaucuacaucagcagaagacugcugggcaccuucaccuggacccugagcgacagcgagggcaacgagacccccggcggcuacugccugaccagauggaugcugaucgaggccgagcugaagugcuucggcaacaccgccguggccaagugcaacgagaagcacgacgaggaguucugcgacaugcugagacuguucgacuucaacaagcaggccaucagaagacugaaggcccccgcccagaugagcauccagcugaucaacaaggccgugaacgcccugaucaacgaccagcugaucaugaagaaccaccugagagacaucaugggcauccccuacugcaacuacagcaaguacugcuaccugaaccacaccgugaccggcagaaccagccugcccagaugcugccuggugagcaacggcagcuaccugaacgagacccacuucagcgacgacaucgagcagcaggccgacaacaugaucaccgagcugcugcagaaggaguacaucgacagacagggcaagaccccccugggccugguggaccuguucguguucagcaccagcuucuaccugaucagcaucuuccugcaccuggugaagauccccacccacagacacaucaucggcaagcccugccccaagccccacagacugaaccacaugggcaucugcagcugcggccuguacaagcaccccggcgugcccgugaaguggaagagauga

SEQ ID NO: 31545 - RNA, 1473 nt, Artificial Sequence
  derived and/or modified CDS sequence (opt4) from LASV(LASV254-NIG-2011;Clade II)__AIT17674__GPCmut7
augggccagaucaucaccuucuuccaggaggugccccacgugaucgaggaggugaugaacaucgugcugaucgcccugagccugcuggccauccugaagggcaucuacaacguggccaccugcggccuguucggccuggugagcuuccugcugcugugcggcagaagcugcagcaccaccuacaagggcguguacgagcugcagacccuggagcuggacaugaccaaccugaacaugaccaugccccugagcugcaccaagaacaacagccaccacuacaucauggugggcaacgagaccggccuggagcugacccugaccaacaccagcaucaucaaccacaaguucugcaaccugagcgacgcccacaagaagaaccuguacaaccacgcccugaugagcaucaucagcaccuuccaccugagcauccccaacuucaaccaguacgaggccaugagcugcgacuucaacggcggcaagaucagcgugcaguacaaccugagccacagcuacgccguggacgccgccaaccacugcggcaccaucgccaacggcgugcugcagaccuucaugagaauggccuggggcggcagcuacaucgcccuggacagcggcaagggcaacugggacugcaucaugaccagcuaccaguaccugaucauccagaacaccaccugggaggaccacugccaguucagcagacccagccccaucggcuaccugggccugcugagccagagaaccagagacaucuacaucagcagaagacugcugggcaccuucaccuggacccugagcgacagcgagggcaacgagacccccggcggcuacugccugaccagauggaugcugaucgaggccgagcugaagugcuucggcaacaccgccguggccaagugcaacgagaagcacgacgaggaguucugcgacaugcugagacuguucgacuucaacaagcaggccaucagaagacugaagacccccgcccaggccaacauccagcugaucaacaaggccgugaacgcccugaucaacgaccagcugaucaugaagaaccaccugagagacaucaugggcauccccuacugcaacuacagcaaguacugcuaccugaaccacaccgugaccggcaagaccagccugcccagaugcugccuggugagcaacggcagcuaccugaacgagacccacuucagcgacgacaucgagcagcaggccgacaacaugaucaccgagcugcugcagaaggaguacauggacagacagggcaagaccccccugggccugguggaccuguucguguucagcaccagcuucuaccugaucagcaucuuccugcaccuggugaagauccccacccacagacacgugaucggcaagcccugccccaagccccacagacugaaccacaugggcaucugcagcugcggccuguacaagcaccccggcgugcccgugaaguggaagagauga

SEQ ID NO: 31546 - RNA, 1473 nt, Artificial Sequence
  derived and/or modified CDS sequence (opt4) from LASV(Nig08-A19;Clade III)__ADU56618__GPCmut7
augggccagaucgugaccuucuuccaggaggugccccacgugaucgaggaggugaugaacaucgugcugaucgcccugagcauccuggccauccugaagggccuguacaacaucgccaccugcggccugaucggccuggugaccuuccugcugcugagcggcagaagcugcagcaugaccuacaagggcguguacgagcugcagacccuggagcugaacaugaacacccugaacaugaccaugccccugagcugcaccaagaacaacagccaccacuacaucauggugggcaacgagaccggccuggagcugacccugaccaacaccagccugcugcaccacaaguucugcaaccugagcgacgcccacaagaagaaccuguacgaccacacccugaugagcaucaucagcaccuuccaccugagcauccccaacuucaaccaguacgaggccaugagcugcgacuucaacggcggcaagaucaccgugcaguacaaccugagccacagcuacgccaucgacgccgccaaccacugcggcaccguggccaacggcgugcugcagaccuucaugagaauggccuggggcggcagcuacaucgcccuggacagcggcagaggcaagugggacugcaucaugaccagcuaccaguaccugaucauccagaacaccaccugggaggaccacugccaguucagcagacccagccccaucggcuaccugggccugcugagccagagaaccagagacaucuacaucagcagaagacugcugggcaccuucaccuggacccugagcgacagcgagggcaacgagacccccggcggcuacugccugaccagauggaugcugaucgaggccgagcugaagugcuucggcaacaccgccguggccaagugcaacgagaagcacgacgaggaguucugcgacaugcugagacuguucgacuucaacaagcaggccaucagaagacugaaggcccccgcccagaugagcauccagcugaucaacaaggccgugaacgcccugaucaacgaccagcugaucaugaagaaccaccugagagacaucaugggcauccccuacugcaacuacagcaaguacugcuaccugaaccacaccagcaccggcagaaccagccugcccagaugcugccuggugagcaacggcagcuaccugaacgagacccacuucagcgacgacaucgagcagcaggccgacaacaugaucaccgagaugcugcagaaggaguaccuggacagacagggcaagaccccccugggccugguggaccuguucguguucagcaccagcuucuaccugaucagcaucuuccugcaccuggugaagauccccacccacagacacaucgugggcaagcccugccccaagccccacagacugaaccacaugggcaucugcagcugcggccuguacaagcagcccggcgugcccgugagauggaagagauga

SEQ ID NO: 31547 - RNA, 1476 nt, Artificial Sequence
  derived and/or modified CDS sequence (opt4) from LASV(G1180-SLE-2010;Clade IV)__AIT17168__GPCmut7
augggccagaucgugaccuucuuccaggaggugccccacgugaucgaggaggugaugaacaucgugcugaucgcccugagcauccuggccgugcugaagggccuguacaacuucgccaccugcggccuggugggccugcugaccuuccugcugcugugcggcagaagcugcaccgccagcagauacaagggcguguacgagcugcagacccuggagcugaacauggagacccugaacaugaccaugccccugagcugcaccaagaacaacagccaccacuacaucauggugggcaacgagaccggccuggagcugacccugaccaacaccagcaucaucaaccacaaguucugcaaccugagcgacgcccacaagaagaaccuguacgaccacgcccugaugagcaucaucagcaccuuccaccugagcauccccaacuucaaccaguacgaggccaugagcugcgacuucaacggcggcaagaucagcgugcaguacaaccugagccacagcuacgccggcgacgccgccaaccacugcggcaccguggccaacggcgugcugcagaccuucaugagaauggccuggggcggcagcuacaucgcccuggacagcggccacggcagcugggacugcaucaugaccagcuaccaguaccugaucauccagaacaccaccugggaggaccacugccaguucagcagacccagccccaucggcuaccugggccugcugagccagagaaccagagacaucuacaucagcagaagacugcugggcaccuucaccuggacccugagcgacagcgagggcaaggacacccccggcggcuacugccugaccagauggaugcugaucgaggccgagcugaagugcuucggcaacaccgccguggccaagugcaacgagaagcacgacgaggaguucugcgacaugcugagacuguucgacuucaacaagcaggccauccagagacugaaggcccccgcccagaugagcauccagcugaucaacaaggccgugaacgcccugaucaacgaccagcugaucaugaagaaccaccugagagacaucaugggcauccccuacugcaacuacagcaaguacugcuaccugaaccacaccaccaccggcaagaccagccugcccaagugcugccuggugagcaacggcagcuaccugaacgagacccacuucagcgacgacaucgagcagcaggccgacaacaugaucaccgagaugcugcagaaggaguacauggagagacagggcaagaccccccugggccugguggaccuguucguguucagcaccagcuucuaccugaucagcaucuuccugcaccuggugaagauccccacccacagacacaucgugggcaagagcugccccaagccccacagacugaaccacaugggcaucugcagcugcggccuguacaagcagcccggcgugcccgugaaguggaagagauga

SEQ ID NO: 31548 - RNA, 1476 nt, Artificial Sequence
  derived and/or modified CDS sequence (opt4) from LASV(G1442-SLE-2011;Clade IV)__AIT17180__GPCmut7
augggccagaucgugaccuucuuccaggaggugccccacgugaucgaggaggugaugaacaucgugcugaucgcccugagcauccuggccgugcugaagggccuguacaacguggccaccugcggccugaucggccuggugaccuuccugcugcugugcggcagaagcugcaccaccacccuguacaagggcguguacgagcugcagacccuggagcugaacauggagacccugaacaugaccaugccccugagcugcaccaagaacaacagccaccacuacaucagagugggcaacgagaccggccuggagcugacccugaccaacaccagcaucaucaaccacaaguucugcaaccugagcgacgcccacaagaagaaccuguacgaccacgcccugaugagcaucaucagcaccuuccaccugagcauccccaacuucaaccaguacgaggccaugagcugcgacuucaacggcggcaagaucagcgugcaguacaaccugagccacagcuacgccggcgacgccgccaaccacugcggcaccguggccaacggcgugcugcagaccuucaugagaauggccuggggcggcagcuacaucgcccuggacagcggcagaggcaacugggacugcaucaugaccagcuaccaguaccugaucauccagaacaccaccugggacgaccacugccaguucagcagacccagccccaucggcuaccugggccugcugagccagagaaccagagacguguacaucagcagaagacugcugggcaccuucaccuggacccugagcgacagcgagggcaaggacacccccggcggcuacugccugaccagauggaugcugaucgaggccgagcugaagugcuucggcaacaccgccguggccaagugcaacgagaagcacgacgaggaguucugcgacaugcugagacuguucgacuucaacaagcaggccauccagagacugaaggcccccgcccagaugagcauccagcugaucaacaaggccgugaacgcccugaucaacgaccagcugaucaugaagaaccaccugagagacaucaugggcauccccuacugcaacuacagcaaguacugcuaccugaacaacaccgccaccggcaagaccagccugcccaagugcugccugaucagcaacggcagcuaccugaacgagacccacuucagcgacgacaucgagcaggaggccgacaacaugaucaccgagaugcugcagaaggaguacauggagagacagggcaagaccccccugggccugguggaccuguucguguucagcaccagcuucuaccugaucagcaucuuccugcaccuggugaagauccccacccacagacacaucgugggcaagagcugccccaagccccacagacugaaccacaugggcaucugcagcugcggccuguacaagcagcccggcgugcccgugagauggaagagauga

SEQ ID NO: 31549 - RNA, 1476 nt, Artificial Sequence
  derived and/or modified CDS sequence (opt4) from LASV(G3010-SLE-2013;Clade IV)__AIT17344__GPCmut7
augggccagaucgugaccuucuuccaggaggugccccacgugaucgaggaggugaugaacaucgugcugaucgcccugagcauccuggccgugcugaagggccuguacaacuucgccaccugcggccuggugggccuggugaccuuccugcugcugugcggcagaagcugcaccaccagccuguacaagggcguguacgagcugcagacccuggagcugaacauggagacccugaacaugaccaugccccugagcugcaccaagaacaacagccaccacuacaucauggugggcaacgagaccggccuggagcugacccugaccaacaccagcaucaucaaccacaaguucugcaaccugagcgacgcccacaagaagaaccuguacaaccacgcccugaugagcaucaucagcaccuuccaccugagcauccccaacuucaaccaguacgaggccaugagcugcgacuucaacggcggcaagaucagcgugcaguacaaccugagccacagcuacgccggcgacgccgccagccacugcggcaccguggccaacggcgugcugcagaccuucaugagaauggccuggggcggcagcuacaucgcccuggacagcggcuacggcaagugggacugcaucaugaccagcuaccaguaccugaucauccagaacaccaccugggaggaccacugccaguucagcagacccagccccaucggcuaccugggccugcugagccagagaaccagagacaucuacaucagcagaagacugcugggcaccuucaccuggacccugagcgacagcgagggcaaggacacccccggcggcuacugccugaccagauggaugcugaucgaggccgagcugaagugcuucggcaacaccgccguggccaagugcaacgagaagcacgacgaggaguucugcgacaugcugagacuguucgacuucaacaagcaggccauccagagacugaagacccccgcccagaugagcauccagcugaucaacaaggccgugaacgcccugaucaacgaccagcugaucaugaagaaccaccugagagacaucaugggcauccccuacugcaacuacagcaaguacugcuaccugaaccacaccaccaccggcaagaccagccugcccaagugcugccuggugagcaacggcagcuaccugaacgagacccacuucagcgacgacaucgagcagcaggccgacaacaugaucaccgagaugcugcagaaggaguacauggagagacagggcaagaccccccugggccugguggaccuguucguguucagcaccagcuucuaccugaucagcaucuuccugcaccuggugaagauccccacccacagacacaucgugggcaagagcugccccaagccccacagacugaaccacaugggcaucugcagcugcggccuguacaagcagcccggcgugcccgugagauggaagagauga

SEQ ID NO: 31550 - RNA, 1476 nt, Artificial Sequence
  derived and/or modified CDS sequence (opt4) from LASV(G502-SLE-2009;Clade IV)__AIT17126__GPCmut7
augggccagaucgugaccuucuuccaggaggugccccacgugaucgaggaggugaugaacaucgugcugaucgcccugagcauccuggccgugcugaagggccuguacaacuucgccaccugcggccuggugggccugcugaccuuccugcugcugugcggcagaagcugcaccaccggccuguacaagggcguguacgagcugcagacccuggagcugaacauggagacccugaacaugaccaugccccugagcugcaccaagaacaacagccaccacuacaucauggugggcaacgagaccggccuggagcugacccugaccaacaccagcaucaucaaccacaaguucugcaaccugagcgacgcccacaagaagaaccuguacgaccacgcccugaugagcaucaucagcaccuuccaccugagcauccccaacuucaaccaguacgaggccaugagcugcgacuucaacggcggcaagaucagcgugcaguacaaccugagccacagcuacgccggcgacgccgccgaccacugcggcaccguggccaacggcgugcugcagaccuucaugagaauggccuggggcggcagcuacaucgcccuggacagcggcagaggcagaugggacugcaucaugaccagcuaccaguaccugaucauccagaacaccaccugggaggaccacugccaguucagcagacccagccccaucggcuaccugggccugcugagccagagaaccagagacaucuacaucagcagaagacugcugggcaccuucaccuggacccugagcgacagcgagggcaaggacacccccggcggcuacugccugaccagauggaugcugaucgaggccgagcugaagugcuucggcaacaccgccguggccaagugcaacgagaagcacgacgaggaguucugcgacaugcugagacuguucgacuucaacaagcaggccauccagagacugaaggcccccgcccagaugagcauccagcugaucaacaaggccgugaacgcccugaucaacgaccagcuggugaugaagaaccaccugagagacaucaugggcauccccuacugcaacuacagcagauacugcuaccugaaccacaccaccaccggcagaaccagccugcccaagugcugccuggugagcaacggcagcuaccugaacgagacccacuucagcgacgacaucgagcagcaggccgacaacaugaucaccgagaugcugcagaaggaguacauggagagacagggcaagaccccccugggccugguggaccuguucguguucagcaccagcuucuaccugaucagcaucuuccugcaccuggugaagauccccacccacagacacaucgugggcaagagcugccccaagccccacagacugaaccacaugggcaucugcagcugcggccuguacaagcagcccggcgugcccgugaaguggaagagauga

SEQ ID NO: 31551 - RNA, 1476 nt, Artificial Sequence
  derived and/or modified CDS sequence (opt4) from LASV(G733-SLE-2010;Clade IV)__AIT17154__GPCmut7
augggccagaucgugaccuucuuccaggaggugccccacgugaucgaggaggugaugaacaucgugcugaucgcccugagcauccuggccgugcugaagggccuguacaacuucgccaccugcggcaucgugggccuggugagcuuccugcugcugugcggcagaagcugcaccaccagccuguacaagggcguguacgagcugcagacccuggagcugaacauggagacccugaacaugaccaugccccugagcugcaccaagaacaacagccaccacuacaucauggugggcaacgagaccggccuggagcugacccugaccaacaccagcaucaucaaccacaaguucugcaaccugagcgacgcccacaagaagaaccuguacgaccacgcccugaugagcaucaucagcaccuuccaccugagcauccccaacuucaaccaguacgaggccaugagcugcgacuucaacggcggcaagaucagcgugcaguacaaccugagccacagcuacgccggcgacgccgccaaccacugcggcaccaucgccaacggcgugcugcagaccuucaugagaauggccuggggcggcagcuacaucgcccuggacagcggcagagacagaugggacugcaucaugaccagcuaccaguaccugaucauccagaacaccaccugggaggaccacugccaguucagcagacccagccccaucggcuaccugggccugcugagccagagaaccagagacaucuacaucagcagaagacugcugggcaccuucaccuggacccugagcgacagcgagggcaaggacacccccggcggcuacugccugaccagauggaugcugaucgaggccgagcugaagugcuucggcaacaccgccguggccaagugcaacgagaagcacgacgaggaguucugcgacaugcugagacuguucgacuucaacaagcaggccauccagagacugaaggcccccgcccagaugagcauccagcugaucaacaaggccgugaacgcccugaucaacgaccagcugaucaugaagaaccaccugagagacaucaugggcauccccuacugcaacuacagcaaguacugcuaccugaaccacaccaccaccggcaagaccagccugcccaagugcugccuggugagcaacggcagcuaccugaacgagacccacuucagcgacgacaucgagcagcaggccgacaacaugaucaccgagaugcugcagaaggaguacauggagagacagggcaagaccccccugggccugguggaccuguucguguucagcaccagcuucuaccugaucagcaucuuccugcaccuggugaagauccccacccacagacacguggugggcaagagcugccccaagccccacagacugaaccacaugggcaucugcagcugcggccuguacggccagcccggcgugcccgugaaguggaagagauga

SEQ ID NO: 31552 - RNA, 1476 nt, Artificial Sequence
  derived and/or modified CDS sequence (opt4) from MOPV/LASV reassortant(IGS-1;Clade IV)__AFY05576__GPCmut7
augggccagaucgugaccuucuuccaggaggugccccacgugaucgaggaggugaugaacaucgugcugaucgcccugagcgugcuggccgugcugaagggccuguacaacuucgccaccugcggccuggugggccuggugaccuuccugcugcugugcggcagaagcugcaccaccagccuguacaagggcguguacgagcugcagacccuggagcugaacauggagacccugaacaugaccaugccccugagcugcaccaagaacaacagccaccacuacaucauggugggcaacgagaccggccuggagcugacccugaccaacaccagcaucaucaaccacaaguucugcaaccugagcgacgcccacaagaagaaccuguacgaccacgcccugaugagcaucaucagcaccuuccaccugagcauccccaacuucaaccaguacgaggccaugagcugcgacuucaacggcggcaagaucagcgugcaguacaaccugagccacagcuacgccggcgacgccgccaaccacugcggcaccguggccaacggcgugcugcagaccuucaugagaauggccuggggcggcagcuacaucgcccuggacagcggcagaggcaacugggacugcaucaugaccagcuaccaguaccugaucauccagaacaccaccugggaggaccacugccaguucagcagacccagccccaucggcuaccugggccugcugagccagagaaccagagacaucuacaucagcagaagacugcugggcaccuucaccuggacccugagcgacagcgagggcgaggacacccccggcggcuacugccugaccagauggaugcugaucgaggccgagcugaagugcuucggcaacaccgccguggccaagugcaacgagaagcacgacgaggaguucugcgacaugcugagacuguucgacuucaacaagcaggccauccagagacugaaggcccccgcccagaugagcauccagcugaucaacaaggccgugaacgcccugaucaacgaccagcugaucaugaagaaccaccugagagacaucaugggcauccccuacugcaacuacagcaaguacugcuaccugaaccacaccaccaccggcagaaccagccugcccaagugcugccuggugagcaacggcagcuaccugaacgagacccacuucagcgacgacaucgagcagcaggccgacaacaugaucaccgagaugcugcagaaggaguacauggagagacagggcaagaccccccugggccugguggaccuguucguguucagcaccagcuucuaccugaucagcaucuuccugcaccuggugaagauccccacccacagacacaucgugggcaagagcugccccaagccccacagacugaaccacaugggcaucugcagcugcggccuguacaagcagcccggcgugcccgugaaguggaagagauga

SEQ ID NO: 31553 - RNA, 1476 nt, Artificial Sequence
  derived and/or modified CDS sequence (opt4) from LASV(LM765-SLE-2012;Clade IV)__AIT17814__GPCmut7
augggccagaucgugaccuucuuccaggaggugccccacgugaucgaggaggugaugaacaucgugcugaucgcccugagcauccuggccgugcugaagggccuguacaacuucgccaccugcggccuggugggccuggugaccuuccugcugcugugcggcagaagcugcaccaccagccuguacaagggcguguacgagcugcagacccuggagcugaacauggagacccugaacaugaccaugccccugagcugcaccaagaacaacagccaccacuacaucauggugggcaacgagaccggccuggagcugacccugaccaacaccagcaucaucgaccacaaguucugcaaccugagcgacgcccacagaaagaaccuguacgaccacgcccugaugagcaucaucagcaccuuccaccugagcauccccaacuucaaccaguacgaggccaugagcugcgacuucaacggcggcaagaucagcgugcaguacaaccugagccacagcuacgccaaggacgccgccgaccacugcggcaccguggccaacggcgugcugcagaccuucaugagaauggccuggggcggcagcuacaucgcccuggacagcggcagaggcagaugggacugcaucaugaccagcuaccaguaccugaucauccagaacaccaccugggaggaccacugccaguucagcagacccagccccaucggcuaccugggccugcugagccagagaaccagagacaucuacaucagcagaagacugcugggcaccuucaccuggacccugagcgacagcgagggcaaggacacccccggcggcuacugccugaccagauggaugcugaucgaggccgagcugaagugcuucggcaacaccgccguggccaagugcaacgagaagcacgacgaggaguucugcgacaugcugagacuguucgacuucaacaagcaggccauccagagacugaaggcccccgcccagaugagcauccagcugaucaacaaggccgugaacgcccugaucaacgaccagcugaucaugaagaaccaccugagagacaucaugggcauccccuacugcaacuacagcaaguacugcuaccugaaccacaccaccaccggcaagaccagccugcccaagugcugccuggugagcaacggcagcuaccugaacgagacccacuucagcgacgacaucgagcagcaggccgacaacaugaucaccgagaugcugcagaaggaguacauggagagacagggcaagaccccccugggccugguggaccuguucguguucagcaccagcuucuaccugaucagcaucuuccugcaccuggugaagauccccacccacagacacaucgugggcaagcccugccccaagccccacagacugaaccacaugggcaucugcagcugcggccuguacaagcagcccggcgugcccgugaaguggaagagauga

SEQ ID NO: 31554 - RNA, 1476 nt, Artificial Sequence
  derived and/or modified CDS sequence (opt4) from LASV(LM776-SLE-2012;Clade IV)__AIT17824__GPCmut7
augggccagaucgugaccuucuuccaggaggugccccacgugaucgaggaggugaugaacaucgugcugaucgcccugagcauccuggccgugcugaagggccuguacaacuucgccaccugcggccuggugggccuggugaccuuccugcugcugugcggcagaagcugcaccaccagcguguacaagggcguguacgagcugcagacccuggagcugaacauggagacccugaacaugaccaugccccugagcugcaccaagaacaacagccaccacuacaucauggugggcaacgagaccggccuggagcugacccugaccaacaccagcaucaucaaccacaaguucugcaaccugagcgacgcccacaagaagaaccuguacgaccacgcccugaugagcaucaucagcaccuuccaccugagcauccccaacuucaaccaguacgaggccaugagcugcgacuucaacggcggcaagaucagcgugcaguacaaccugagccacagcuacgccggcgacgccgccaaccacugcggcaccguggccaacggcgugcugcagaccuucaugagaauggccuggggcggcagcuacaucgcccuggacagcggccacggcaagugggacugcaucaugaccagcuaccaguaccugaucauccagaacaccaccugggaggaccacugccaguucagcagacccagccccaucggcuaccugggccugcugagccagagaaccagagacaucuacaucagcagaagacugcugggcaccuucaccuggacccugagcgacagcgagggcaaggacacccccggcggcuacugccugaccagauggaugcugaucgaggccgagcugaagugcuucggcaacaccgccguggccaagugcaacgagaagcacgacgaggaguucugcgacaugcugagacuguucgacuucaacaagcaggccauccagagacugaaggcccccgcccagaugagcauccagcugaucaacaaggccgugaacgcccugaucaacgaccagcugaucaugaagaaccaccugagagacaucaugggcauccccuacugcaacuacagcaaguacugcuaccugaaccacaccaccaccggcaagaccagccugcccaagugcugccuggugagcaacggcagcuaccugaacgagacccacuucagcgacgacaucgagcagcaggccgacaacaugaucaccgagaugcugcagaaggaguacauggagagacagggcaagaccccccugggccugguggaccuguucguguucagcaccagcuucuaccugaucagcaucuuccugcaccuggugaagauccccacccacagacacaucgugggcaagagcugccccaagccccacagacugaaccacaugggcaucugcagcugcggccuguacaagcagcccggcgugcccgugagauggaagagauga

SEQ ID NO: 31555 - RNA, 1476 nt, Artificial Sequence
  derived and/or modified CDS sequence (opt4) from LASV(Mad39;Clade IV)__ANH09722__GPCmut7
augggccagaucgugaccuucuuccaggaggugccccacgugaucgaggaggugaugaacaucgugcugaucgcccugagcauccuggccgugcugaagggccuguacaacguggccaccugcggccugaucggccuggugaccuuccugcugcugugcggcagaagcugcaccaccacccuguacaagggcguguacgagcugcaggcccuggagcugaacauggagacccugaacaugaccaugccccugagcugcaccaagaacaacagccaccacuacaucagagugggcaacgagaccggccuggagcugacccugaccaacaccagccugaucaaccacaaguucugcaaccugagcgacgcccacaagaagaaccuguacgaccacgcccugaugagcaucaucagcaccuuccaccugagcauccccaacuucaaccaguacgaggccaugagcugcgacuucaacgacggcaagaucagcgugcaguacaaccugagccacaccuacgccggcgacaccgccaaccacugcggcaccguggccaacggcgugcugcagaccuucaugagaauggccuggggcggcagcuacaucgcccuggacagcggcagaggcggcugggacugcaucaugaccagcuaccaguaccugaucauccagaacaccaccugggaggaccacugccaguucagcagacccagccccaucggcuaccugggccugcugagccagagaaccagagacaucuacaucagcagaagacugcugggcaccuucaccuggacccugagcgacagcgagggcaaggacacccccggcggcuacugccugaccagauggaugcugaucgaggccgagcugaagugcuucggcaacaccgccguggccaagugcaacgagaagcacgacgaggaguucugcgacaugcugagacuguucgacuucaacaagcaggccauccagagacugaaggcccccgcccagaugagcauccagcugaucaacaaggccgugaacgcccugaucaacgaccagcugaucaugaagaaccaccugagagacaucaugggcauccccuacugcaacuacagcaaguacugcuaccugaaccacaccgugaccggcaagaccagccugcccaagugcugccuggugagcaacggcagcuaccugaacgagacccacuucagcgacgacaucgagcagcaggccgacaacaugaucaccgagaugcugcagaaggaguacauggagagacagggcaagaccccccugggccugguggaccuguucguguucagcaccagcuucuaccugaucagcaucuuccugcaccuggugaagauccccacccacagacacguggugggcaagcccugccccaagccccacagacugaaccacaugggcaucugcagcugcggcuucuacaagcagcccggcgugcccgugagauggaagagauga

SEQ ID NO: 31556 - RNA, 1476 nt, Artificial Sequence
  derived and/or modified CDS sequence (opt4) from LASV(Z0947-SLE-2011;Clade IV)__AIT17840__GPCmut7
augggccagaucgugaccuucuuccaggaggugccccacgugaucgaggaggugaugaacaucgugcugaucgcccugagcauccuggccgugcugaagggccuguacaacuucgccaccugcggccuggugggccuggugaccuuccugcugcugugcggcagaagcugcaccaucagccuguacaagggcguguacgagcugcagacccuggagcugaacauggagacccugaacaugaccaugccccugagcugcaccaagaacaacagccaccacuacaucauggugggcaacgagaccggccuggagcugacccugaccaacaccagcaucaucaaccacaaguucugcaaccugagcgacgcccacaagaagaaccuguacgaccacgcccugaugagcaucaucagcaccuuccaccugagcauccccaacuucaaccaguacgaggccaugagcugcgacuucaacggcggcaagaucagcgugcaguacaaccugagccacagcuacgccggcgacgccgccaaccacugcggcaccguggccaacggcgugcugcagaccuucaugagaauggccuggggcggcagcuacaucgcccuggacagcggcagagacagaugggacugcaucaugaccagcuaccaguaccugaucauccagaacaccaccugggaggaccacugccaguucagcagacccagccccaucggcuaccugggccugcugagccagagaaccagagacaucuacaucagcagaagacugcugggcaccuucaccuggacccugagcgacagcgagggcaaggacacccccggcggcuacugccugaccagauggaugcugaucgaggccgagcugaagugcuucggcaacaccgccguggccaagugcaacgagaagcacgacgaggaguucugcgacaugcugagacuguucgacuucaacaagcaggccauccagagacugaaggcccccgcccagaugagcauccagcugaucaacaaggccgugaacgcccugaucaacgaccagcugaucaugaagaaccaccugagagacaucaugggcauccccuacugcaacuacagcaaguacugcuaccugaaccacaccaccaccggcaagaccagccugcccaagugcugccuggugagcaacggcagcuaccugaacgagacccacuucagcgacgacaucgagcagcaggccgacaacaugaucaccgagaugcugcagaaggaguacauggagagacagggcaagaccccccugggccugguggaccuguucguguucagcaccagcuucuaccugaucagcaucuuccugcaccuggugaagauccccacccacagacacaucgugggcaagcccugccccaagccccacagacugaaccacaugggcaucugcagcugcggccuguacaagcagcccggcgugcccgugaaguggaagagauga

SEQ ID NO: 31557 - RNA, 1476 nt, Artificial Sequence
  derived and/or modified CDS sequence (opt5) from LASV(Josiah;Clade IV)__NP_694870__GPCmut7
augggccagaucgugaccuucuuucaagaggucccccacguuauugaagaggugaugaacaucgugcugauugcccucagcguccuggcugugcuuaaggggcuguacaauuucgccacaugcggacucguuggccuggugacguuucuucugcucugugggagauccugcaccacaucucuguauaaaggagucuacgaacugcagacccucgagcugaacauggaaacacuuaauaugaccaugccucugagcuguacaaagaacaauucccaucacuauaucauggugggcaacgagaccgggcucgagcugacgcuuaccaauacaucuauuaucaaccauaaauucugcaaucugagcgacgcgcacaagaaaaaccucuacgaucaugcucugauguccaucauuucuaccuuucaccugagcaucccgaauuucaaccaguaugaagccauguccugugacuuuaauggaggcaagauuagcguucaguacaaccucucucacuccuaugccggcgaugcugccaaucauugcgggacaguggcuaacggaguccugcaaaccuucaugcggauggccuggggcgggagcuacaucgcgcuugacucuggacgcggcaacugggauuguauuaugacguccuaccaguaucugaucauucagaauacaaccugggaggaccacugccaguuuagcagacccucuccuaucggguaccucggacugcuuucccaacggacacgcgauaucuauauuagcagacggcugcucggcaccuucaccuggacacuguccgacucugaaggcaaggauacgcccgggggauacugucugacccgcuggaugcucaucgaggccgagcugaaaugcuuuggcaacacagcuguggccaaguguaaugaaaaacaugacgaggaguucugcgauaugcuuagacuguuugacuucaacaagcaggcuauucagcggcucaaagccccugcgcagaugagcauccaacugauuaauaaggccgugaacgcucuuaucaaugaucagcugaucaugaagaaccaccuccgcgacauuauggggauccccuauugcaauuacuccaaauauuguuaccugaaccacaccacaaccggaagaacgagccugccuaagugcugucucgucucuaauggcuccuaccugaacgaaacacauuucagcgacgauauugaacagcaagccgacaauaugaucaccgagaugcuucagaaagaguauauggaacggcaggggaagaccccgcugggacucguugaucuguuuguguucucuaccagcuuuuaccugauuuccaucuuccuucaccucgugaaaauccccacacaucgccacauugucggcaagucuugcccuaaaccccauagacugaaccacaugggcaucuguagcugcgggcuguauaagcagccuggagugcccguuaaguggaaacgguga

SEQ ID NO: 31558 - RNA, 1473 nt, Artificial Sequence
  derived and/or modified CDS sequence (opt5) from LASV(LP;Clade I)__AAF86701__GPCmut7
augggccagaucauuaccuucuuucaagaggugccccacgucaucgaagagguuaugaacauugugcugaucgcccucagccugcuugcuauucugaaggggcucuacaauaucgccacaugcggaaucauuggccugguggcguuccuuuuucugugugggaaauccugcucucucacgcugaagggaggcuaugaacugcagacccucgagcugaacauggaaacacuuaauaugaccaugccucugagcuguaccaaaaacuccucucaucacuacaucagagucgggaaugagacaggacucgagcugacacuuaccaacacgagcauuaucaaucauaaguucugcaaccuguccgacgcucacaaaaagaaucucuaugaucaugcccugaugucuauuaucagcaccuuucaccuguccauuccgaacuucaaucaguacgaagccaugagcugugacuuuaacggcggcaagaucucugugcaguauaaucucucccacagcuacgcuggggaugccgcugagcauugcggaacaguugccaacggcgugcugcaaaccuucaugcggauggcguggggagggcgcuauaucgcccuugacucuggcaaagggaauugggauuguauuaugacauccuaccaguaccugaucauucagaacaccacgugggaagaccacugccaguuuagcagacccucuccuaucggauaucucggccugcuuucccaacggacacgcgauauuuacaucagcagacggcugcucggcaccuucacauggacccuguccgacucugaggggaacgagacccccggaggcuauugucugacacgcuggaugcucaucgaagcugagcugaagugcuuugggaauacggccgucgcuaaauguaacgaaaagcaugaugaggaguucugcgacaugcuuagacuguuugauuucaauaaacaggccauucggcgccucaaggcgccugcccagaugagcauccagcugauuaacaaggcugugaaugcccuuaucaacgaccaacugauuaugaaaaaucaccucagagauaucaugggaauccccuacugcaacuauuccaaguacuguuaucugaaucacaccagcucuggccggacaucccugccuaaaugcugucucauuagcaacgggucuuaccugaaugaaacccaguucagcgacgacaucgagcagcaagcugauaacaugauuacagaaaugcuucagaaggaguacaucgaacgccagggaaaaaccccgcugggccucguugacauuuuuaucuucuccacgucuuuuuaucugauuagcaucuuccugcaucuuaucaagauucccacacacagacauaucgugggcaaaccuugccccaagccucaccggcucaaucauaugggggucuguuccugcggacuguacaagcaccccggcgugccgaccaaauggaagcgcuga

SEQ ID NO: 31559 - RNA, 1473 nt, Artificial Sequence
  derived and/or modified CDS sequence (opt5) from LASV(803213;Clade II)__AAF86703__GPCmut7
augggccagaucauuaccuucuuucaagaggugccccacgucaucgaagagguuaugaacauugugcugaucgcccucagccugcuugcuauucugaaggggaucuacaauguggccacaugcggacucuucggccugaucuccuuucuucugcucugugggagaucuugcagcgucacguauaaaggaguguacgaacugcagacccuggagcucaacauggcgaaucugaacaugacaaugccucuuuccuguaccaagaauaacucucaucacuauauuaugguuggcaaugaaacagggcuggagcucacccugacaaacaccagcaucauuaaucauaaauucugcaaccuuuccgacgcucacaagaaaaaucuguacgaucaugcccucaugucuaucauuagcacguuucaccuguccaucccgaacuucaaucaguaugaggccaugagcugugacuuuaacggaggcaagauuucugugcaguacaaucugucccacagcuucgcugucgaugccgcuaaccauugcggcaccaucgccaacggggugcuccaaacauuuaugcggauggcguggggaggcucuuauaucgcccuggacuccgggaagggaaauugggauuguauuaugaccagcuaccaguaccuuaucauucagaacacaaccugggaagaccacugccaguucucucgccccuccccuaucggcuaucuggggcuccugagccaaagaacgcgggauauuuacaucucccgcagacuucugggaacauuuaccuggacacucucugacagcgagggcaaugaagcucccggcggguauugucugacccgguggaugcugaucgaggccgagcucaaaugcuucggaaacaccgcuguugccaaguguaaugaaaaacaugaugaggaauuuugcgacaugcugcgccuuuucgauuucaacaagcaggcgauuaaaagacugaagacgccugcccagauguccauccagcucauuaauaaggcugugaacgcccugaucaaugaccaacuuauuaugaaaaaccaucugcgggauaucaugggcauccccuacugcaauuauagccgcuacuguuaucucaaccacacagucaccgggaagacaucucugccuagaugcugucugguguccaauggaagcuaccucaacgagacccacuuuucugacgacauugaacagcaggcugauaauaugaucacagagaugcugcaaaaagaguacauggaccggcagggcaagaccccgcuugggcugguggaucucuucgucuuuagcacguccuucuaucugauuucuaucuuucugcaccuuguuaaaauucccacacaucgccacaucgugggaaagccuugccccaaaccucauagacucaaccacaugggcauuuguagcugcggccuguacaagcaccccggggugccggucaaguggaaacgguga

SEQ ID NO: 31560 - RNA, 1473 nt, Artificial Sequence
  derived and/or modified CDS sequence (opt5) from LASV(GA391;Clade III)__CAA36645__GPCmut7
augggccagaucgugaccuucuuucaagaggucccccacguuauugaagaggugaugaacaucgugcugauugcccucagcauccuggcuauucuuaaggggcuguacaaugucgccacaugcggacucaucggccuggugacguuccuucugcucuccgggagaucuuguagccugaucuauaaaggaaccuacgaacugcagacacucgagcugaacauggaaacccuuaauaugacaaugccucuguccugcaccaagaacaauucucaucacuauauucggguuggcaacgagacagggcucgagcugacccuuacgaauaccagcauccugaaccauaaauuuuguaaucucuccgacgcgcacaagcgcaaccuguacgaucauucucugaugagcauuaucuccacauuccaccucagcauuccgaauuuuaaccaguaugaagcuaugucuugcgacuucaauggaggcaaaaucaccgugcaguacaaccugucccacagcuuugccgucgaugccgcuggccauugugggacacuugccaauggagugcugcaaaccuucaugagaauggcuuggggcgggucuuauauugcccucgacuccggacggggcaacugggauugcaucaugacgagcuaccaguaccugaucauucagaacacaaccugggacgaucacugucaguuuucucgccccuccccuaucggguaucuuggacugcucagccaaagaacacgggacauuuacaucucccgcagacugcugggcaccuucaccuggacacucucugauagcgagggcaaugaaacgcccgggggauauugccugacccgguggaugcuuauugaggcggagcugaaguguuuuggcaacacagccguugcuaagugcaaugaaaaacaugacgaggaguucugugauaugcuccgccuguuugacuucaacaagcaggccaucagacggcuuaaaaccccugcucagauguccauccagcugauuaauaaggccgugaacgcgcucaucaaugaucaacugauuaugaaaaaccaucugcgcgacaucauggggauucccuacugcaauuauagcagauacugcuaucucaaccacacaucuaccggaaagacgucccugccucgguguugccuuaucagcaauggcucuuaccugaacgaaacaaaguucagcgacgauaucgaacagcaggccgacaauaugauuaccgagaugcuccaaaaagaguacaucgaucgccaggggaagaccccgcugggacuggucgaccuuuuuguguucuccacaucuuuuuaucucauuagcaucuuccugcaccuggugaaaauucccacccacagacauaucgucggcaagccuugucccaaaccucaccggcucaaccauaugggcauuugcuccugugggcuguacaagcagcccggaguuccggugagauggaaacgcuga

SEQ ID NO: 31561 - RNA, 1476 nt, Artificial Sequence
  derived and/or modified CDS sequence (opt5) from LASV(AV;Clade V)__CCA30314__GPCmut7
augggccagaucgugaccuucuuucaagaggucccccacguuauugaagaggugaugaacaucgugcugauugcccucagcauccuggcuguccuuaaggggcuguacaauauugccacaugcggacucaucggccugaucacguuccuucugcucugugggagauccugcucuagcaaccuguauaaaggaguguacgaacugcagucccucgaccugaauauggagacccuuaacaugacaaugccucugucuuguaccaagaauaacagccaucacuauauucggguuggcaaugauacagggcucgaacugacccuuacaaacaccuccauccugaaucauaaauuuugcaaccucucugacgcgcacaagaaagaucuguacgaccaugcucugaugagcauuaucuccacguuccaccucagcauuccgaauuuuaaccaguaugaggccaugucuugugauuucaauggaggcaagaucuccgugcaguacaaccugagccacucuuaugccauugacgcugccaaucauugcggcaccgucgcuaacgggauccuucaaacauuuaugcgcauggccuggggaggcuccuacaucgcgcuggauagcgggagaggaaacugggacuguauuaugaccucuuaccaguaucucaucauucagaauacaaccugggagaaccacugccaguucucccggcccagcccuaucggcuaccuggggcuucugucccaacgcacgagagauauuuauaucucucggcgccuccugggaacauuuaccuggacacugagcgacuccgaaggcaaugccacccccggcggguacugucucaccagauggaugcugaucgaggcugaacuuaagugcuucggaaacacagccguggcuaaauguaaugagaagcaugaugaggaauuuugcgacaugcugcgccucuucgauuuuaacaaacaggccauuagccggcugaagucuccugcgcagauguccauccagcuuauuaauaaagccguuaacgcucugaucaaugaccaacucauuaugaagaaccaccugagagacaucaugggcauccccuauugcaauuacagcaaguauuguuaccugaaccacacgauuaccgggaaaacaucucucccuaagugcugucuggugagcaauggauccuaccuuaacgagacccauuucucugaugacaucgaacagcaggccgauaauaugauuacagagaugcugcaaaaagaauauauggagcggcagggcaagaccccgcucgggcuggucgaccuguucguguuuagcacguccuucuaccuuaucagcauuuuucuccgccuggugaaaauccccacacacagacauauugucggaaagccuugccccaaaccucaccggcugaaccauaugggcaucuguucuugcggccucuauaagcagcccgggguuccggugcgcuggaagagauga

SEQ ID NO: 31562 - RNA, 1473 nt, Artificial Sequence
  derived and/or modified CDS sequence (opt5) from LASV(Togo/2016/7082;Clade VI)__AMR44577__GPCmut7
augggccagaucauuaccuucuuucaagaggugccccacgucaucgaagagguuaugaacauugugcugaucgcccucagccugcuugcuauucugaaggggguguacaaugucgccacaugcggaaucaucggccucgugacguuccuguuucuuugugggagauccugcucucugauuuauaaaggaagcuacgaacuccagacccuggagcugaacauggaaacacucaauaugaccaugccucuguccuguacaaagaacucuagccaucacuauauccggguuggcaaugagaccgggcuugagcugacacucaccaacacguccauuaucaaucauaaauucugcaaccugucugacgcgcacaagcgcaaucuuuacgaucaugcucugaugagcauucucuccaccuuucaccugagcaucccgaacuucaaucaguaugaagccaugucuugugacuuuaacggaggcaaaauuuccgugcaguacaaucugagccacgccuaugcugucgaugccgcugagcauugcggcacaguggccaacgggguucuccaaaccuucaugagaauggcguggggaggcucuuacaucgcccuggacuccgggcggggaaauugggauuguaucaugacaagcuaccaguaucuuauuauccagaacaccacgugggaagaccacugccaguuuucucgccccuccccuauuggcuaccuggggcuccugagccaaagaacacgggauaucuauauuucccgcagacuucugggaaccuucacauggacccucucugacagcgagggcaacgagacccccggcggguacugucugacacgguggaugcugaucgaagcugagcucaagugcuuuggaaauacggccguggcuaaguguaacgaaaaacaugaugaggaguucugcgacaugcugcgccuuuuugauuucaauaagcaggccauccagagacugaaauccccugcgcagaugagcauucaacucaucaacaaggccgucaaugcucugauuaacgaccagcuuaucaugaaaaaucaucugcgggauaugaugggcauucccuauugcaacuacucuaaguauuguuaccucaaucacaccuccagcgggcgcacaucucugccuaagugcugucuggugagcaacggauccuaccucaaugaaacccacuucucugacgacaucgagcagcaagccgauaacaugaucacagaaaugcugcagaaagaguauauugacagacagggcaagaccccgcuugggcugguggaucucuuugucuucagcacguccuuuuaccugaucagcauuuuccugcaccuuaucaaaauucccacacaucggcacaucguuggaaagccuugccccaaaccucaucgccucaaucacaugggcauuuguucuugcggccuguauaagcagcccggggugccgaccagauggaaacgguga

SEQ ID NO: 31563 - RNA, 1473 nt, Artificial Sequence
  derived and/or modified CDS sequence (opt5) from LASV(KAK-428;Clade n.d. (VII))__ANH09740__GPCmut7
augggccagaucgugaccuucuuucaagaggucccccacguuauugaagaggugaugaacaucgugcugauugcccucagccugcuugcuauccugaaggggcucuacaauuucgccacaugcggagucauuggccugaucacguuucuucugcucugugggagauccugcucugcgaccuauaaaggacaguacgaacugcagacacuggagcucaacauggaaagccugaauaugaccaugccucuuuccuguacaaagaacaauucucaucacuauauccgggcuggcaacaauaccgggcuggagcucacacugaccaacacgagcauuaucucccauaaauucugcaaucuuucugacgcccacaagaaaaaccuguacgaucauacccucaugagcauuaucacaaccuuucaccuguccauuccgaauuucaaccaguaugaggccaugagcugugacuuuaauggaggcaagaucucuauucaauacaaccugucccacagcuaugcuggcgaugccgcucagcauugcgggacaguggccaauggaguucuccagaccuucaugcgcauggcguggggcgggucuuaccuggcccuugacuccggaagacggggcugggauuguaucaucagcucuuaccaguaucugauuauccaaaacacgacaugggacgaucacugccaguuuucccgccccagcccuauuggguaccucggauucgugucccagaagaccagagacaucuauauuucucggcgccugcuuggcacauuuaccuggacccugagcgauuccgaaggccaugacaugcccgggggauacugucucacaagauggaugcugaucgaggcugaucugaaaugcuucggcaacacggccgucgcuaaguguaaugaaaaacacgacgaggaguuuugcgauauguggcgccucuucgacuucaacaagcaggccauccaacggcugaaagcgccugcccagaugaauauucagcuuaucaacaaggcugugaaugcccugauuaacgaccaacucaugaugaagaaucaccugagagauaucauggggauucccuauugcaacuacagcaaauuuuguuaucuuaauaacaccacaaccggacggacaucucugccucgcugcugucucaucuccaauggcagcuaccugaacgaaacccauuucucugacgauaucgagcagcaggcugacaauaugauuacggaaaugcugcagaaggaguacauggauagacaagggaaaacaccgcucggacugguugaccuuuuuguguucagcaccuccuuuuaucugaucaccauuuuccuccaccuggucaagauccccacacaucggcacauugugggcaaaccuugccccaagccucaucgccugaaccacaugggcaucuguucuugcgggcuuuacaaacagcccggagugccggucagauggaagcgguga

SEQ ID NO: 31564 - RNA, 1473 nt, Artificial Sequence; identical to SEQ ID NO: 31558
  derived and/or modified CDS sequence (opt5) from LASV(Pinneo-NIG-1969;Clade I)__AIT17836__GPCmut7

SEQ ID NO: 31565 - RNA, 1473 nt, Artificial Sequence
  derived and/or modified CDS sequence (opt5) from LASV(ISTH0009-NIG-2011;Clade II)__AIT17404__GPCmut7
augggccagaucauuaccuucuuucaagaggugccccacgucaucgaagagguuaugaacauugugcugaucgcccucagccugcuugcuauucugaaggggaucuacaauguggccacaugcggacucuucggccuggucuccuuucuucugcucugugggagaucuugcagcacgaccuauaaaggaguguacgaacugcagacacuggagcucgacauggcgucccugaacaugaccaugccucuuucuuguacaaagaauaacagccaucacuauaucaugguuggcaaugaaaccgggcuggagcucacacugaccaacacguccauuaucaaucauaaauucugcaaccuuucugaugcucacaagaaaaaucuguacgaccaugcccucaugagcauuaucuccaccuuucaccugagcauuccgaacuucaaucaguaugaggccaugucuugugauuuuaacggaggcaagaucuccgugcaguacaaucugagccacgcuuaugccgucgacgcugccaaccauugcggcacaauugcgaauggggugcuccaaaccuucaugcggauggccuggggaggcucuuacaucgcucuggauuccgggaagggaagcugggacuguaucaugacaucuuaccaguaucuuauuauccagaacaccacgugggaagaucacugccaguuuucccgccccagcccuauuggcuaccuggggcuccugucccaaagaacacgggacaucuauauuucucgcagacuucugggaaccuucacauggacccucagcgauuccgagggcaacgaaacccccggcggguacugucugacacgguggaugcugaucgaggccgagcucaaaugcuuuggaaauacggcuguugccaaguguaacgaaaaacaugacgaggaguucugcgauaugcugcgccuuuuugacuucaauaagcaggcgaucagacggcugaaaaccccugcccagaugagcauucagcucaucaacaaggcugugaaugcccugauuaacgaucaacuuaucaugaagaaucaucugcgcgacauuaugggcauccccuauugcaacuacucuaaauauuguuaccucaaucacacagucaccgggaagacaucccugccuagaugcugucuggugagcaacggaucuuaccucaaugaaacccacuucagcgacgauaucgaacagcaggcugacaacaugauuacggagcugcuucaaaaagaguauauggaucggcagggcaagacaccgcuggggcucguggaccuguuugucuucuccaccucuuuuuaccugaucagcauuuuccuucaccucaucaaaauucccacccaucgccacaucacaggaaagccuugccccaaaccucauagacugaaucacaugggcauuuguuccugcggccuguauaagcaccccgggguuccggugaaguggaaacgguga

SEQ ID NO: 31566 - RNA, 1473 nt, Artificial Sequence
  derived and/or modified CDS sequence (opt5) from LASV(ISTH2010-NIG-2012;Clade II)__AIT17482__GPCmut7
augggccagaucauuaccuucuuucaagaggugccccacgucaucgaagagguuaugaacauugugcugaucgcccucagccugcuugcuauucugaaggggaucuacaauguggccacaugcggacucuucggccuggucuccuuucuucugcucugugggagaucuugcagcacgaccuauaaaggaguguacgaacugcagacacuggagcucgacauggcgucccugaacaugaccaugccucuuucuuguacaaagaauaacagccaucacuauaucaugguuggcaaugaaaccgggcuggagcucacacugaccaacacguccauuaucaaucauaaauucugcaaccuuucugaugcucacaagaaaaaucuguacgaccaugcccucaugagcauuaucuccaccuuucaccugagcauuccgaacuucaaucaguaugaggccaugucuugugauuuuaacggaggcaagaucuccgugcaguacaaucugagccacgcuuaugccgucgacgcugccaaccauugcggcacaauugcgaauggggugcuccaaaccuucaugcggauggccuggggaggcucuuacaucgcucuggauuccgggaagggaagcugggacuguaucaugacaucuuaccaguaucuuauuauccagaacauuaccugggaagaucacugccaguuuucccgccccagcccuaucggcuaccuggggcuccugucccaaagaacgcgggacauuuauaucucucgcagacuucugggaacauucaccuggacacucagcgauuccgagggcaacgaaacccccggcggguacugucugacccgguggaugcugaucgaggccgagcucaaaugcuuuggaaauacagcuguugccaaguguaacgaaaaacaugacgaggaguucugcgauaugcugcgccuuuuugacuucaauaagcaggcgauuagacggcugaaaacgccugcccagaugagcauccagcucauuaacaaggcugugaaugcccugaucaacgaucaacuuauuaugaagaaucaucugcgcgacaucaugggcauccccuauugcaacuacucuaaauauuguuaccucaaucacaccgucacagggaagaccucccugccuagaugcugucuggugagcaacggaucuuaccucaaugaaacacacuucagcgacgauauugaacagcaggcugacaacaugaucaccgagcugcuucaaaaagaguauauugaucggcagggcaagacgccgcuggggcucguggaccuguuugucuucuccacaucuuuuuaccugaucagcauuuuccuucaccucguuaaaauccccacccaucgccacguggugggaaagccuugccccaaaccucauagacugaaucacaugggcauuuguuccugcggccuguauaagcaccccggggucccggugaaguggaaacgguga

SEQ ID NO: 31567 - RNA, 1473 nt, Artificial Sequence
  derived and/or modified CDS sequence (opt5) from LASV(Lassa virus/H.sapiens-wt/NGA/2015/ISTH_0543;Clade II)__AVO03639__GPCmut7
augggccagaucauuaccuucuuucaagaggugccccacgucaucgaagagguuaugaacauugugcugaucgcccucagccugcuugcuauucugaaggggaucuacaauguggccacaugcggacucuucggccuggucuccuuucuucugcucugugggagaucuugcagcacgaccuauaaaggaguguacgaacugcagacacuggagcucgacauggcgaaccugaauaugaccaugccucuuuccuguacaaagaacaauucucaucacuauaucaugguuggcaacgaaaccgggcuggagcucacacugaccaauacgagcauuaucaaccauaaauucugcaaucuuuccgaugcucacaagaaaaaccuguacgaccaugcccucaugucuauuaucagcaccuuucaccuguccauuccgaauuucaaccaguaugaggccaugagcugugauuuuaauggaggcaagaucucugugcaguacaaccugucccacacauaugcugucgacgccgcuaaucauugcggcaccauugccaacggggugcuccaaacauucaugcggauggcguggggaggcagcuacaucgcccuggauucugggaagggauccugggacuguaucaugaccagcuaccaguaucuuguuauucagaacacgacaugggaagaucacugccaguuuucucgccccuccccuaucggcuaccuggggcuccugagccaaagaacccgggacauuuauaucucccgcagacuucugggaacauucaccuggacccucucugauagcgagggcaaugaaacacccggcggguacugucugacgcgguggaugcugauugaggcugagcucaaaugcuuuggaaacaccgccguggcuaaguguaaugaaaaacaugacgaggaguucugcgauaugcugcgccuuuuugacuucaacaagcaggccaucagacggcugaaaaccccugcgcagauguccauccagcucauuaauaaggccgucaacgcucugaucaaugaucaacuuauuaugaagaaccaucugcgcgacaucaugggcauucccuauugcaauuacagcaaauauuguuaccucaaccacacagugacagggaagaccucucugccuagaugcugucugguguccaauggaagcuaccucaacgaaacgcacuucucugacgauaucgaacagcaggccgacaauaugaucacagagcugcuucaaaaagaguauauugaucggcagggcaagaccccgcuggggcucgucgaccuguuuguuuucagcaccuccuuuuaccugaucucuauuuuccuucaccucgugaaaauccccacacaucgccacauuaccggaaagccuugccccaaaccucauagacugaaccacaugggcaucuguagcugcggccuguauaagcaccccggggugccggucaaguggaaacgguga

SEQ ID NO: 31568 - RNA, 1473 nt, Artificial Sequence
  derived and/or modified CDS sequence (opt5) from LASV(Lassa virus/H.sapiens-wt/NGA/2016/ISTH_0009;Clade II)__AVO03571__GPCmut7
augggccagaucauuaccuucuuucaagaggugccccacgucaucgaagagguuaugaacauugugcugaucgcccucagccugcuugcuauucugaaggggaucuacaauguggccacaugcggacuccugggccuugucuccuuccugcuccugugugggagaucuugcagcacgaccuauaaaggaguguacgaacugcagacacucgagcuggacauggcgucccuuaacaugaccaugccucugucuuguacaaagaauaacagccaucacuauaucaugguuggcaaugaaaccgggcucgagcugacacuuaccaacacguccauuaucaaucauaaauuuugcaaccugucugaugcucacaagaaaaaucucuacgaccaugcccugaugagcauuaucuccaccuuccaccugagcauuccgaacuuuaaucaguaugaggccaugucuugugauuucaacggaggccggaucuccgugcaguacaaucucagccacucuuaugcugucgacgccgcuaaccauugcggcacaauugccaauggggugcugcaaaccuuuaugcgcauggcguggggaggcuccuacaucgcccuugauagcgggaagggaucuugggacuguaucaugacauccuaccaguaucugauuauccagaacaccacgugggaagaucacugccaguucagcagacccuccccuauuggcuaccucgggcugcuuucucaacggacacgcgacaucuauauuagcagacggcugcucggaaccuuuacauggacccuguccgauagcgagggcaacgaaacccccggcggguacugucugacacgcuggaugcucaucgaggcugagcugaagugcuucggaaauacggccguugcuaaauguaacgaaaagcaugacgaggaauuuugcgauaugcuuagacuguucgacuuuaauaaacaggccauccggcgccucaagaccccugcgcagaugucuauucagcugaucaacaaagccgugaaugcucuuauuaacgaucaacugaucaugaagaaucaccucagagacauuaugggcauccccuauugcaacuacuccaaguauuguuaccugaaucacacagucaccgggaaaacaagccugccucggugcugucucgugucuaacggaagcuaccugaaugagacccauuucuccgacgauaucgaacagcaggccgacaacaugauuacggagcuucugcaaaaggaguauaucgaucgccagggcaaaacaccgcucgggcugguggaccuguucgucuuuucuaccagcuucuaccuuauuuccaucuuucuccaccugguuaagauucccacccauagacacaucacaggaaaaccuugccccaagccucaucggcugaaucacaugggcauuuguagcugcggccucuauaaccaccccggggugccggugaaauggaagcgcuga

SEQ ID NO: 31569 - RNA, 1473 nt, Artificial Sequence
  derived and/or modified CDS sequence (opt5) from LASV(Lassa virus/H.sapiens-wt/NGA/2016/ISTH_0017;Clade II)__AVO03567__GPCmut7
augggccagaucauuaccuucuuucaagaggugccccacgucaucgaagagguuaugaacauugugcugaucgcccucagccugcuugcuauucugaaggggaucuacaauguggccacaugcggacucuucggccuggucuccuuucuucugcucugugggagaucuugcagcacgaccuauaaaggaguguacgaacugcagacacuggagcucgacauggcgucccugaacaugaccaugccucuuucuuguacaaagaauaacagccaucacuauaucaugguuggcaaugaaaccgggcuggagcucacacugaccaacacguccauuaucaaucauaaauucugcaaccuuucugaugcucacaagaaaaaucuguacgaccaugcccucaugagcauuaucuccaccuuucaccugagcauuccgaacuucaaucaguaugaggccaugucuugugauuuuaacggaggcaagaucuccgugcaguacaaucugagccacacauaugcuauugacgccgcuaaccauugcggcaccaucgccaaugggguccuccaaacauucaugcggauggcguggggaggcucuuacaucgcccuggauuccgggaagggaagcugggacuguauuaugaccucuuaccaguaucuuaucauucagaacacgacaugggaagaucacugccaguuuucccgccccagcccuaucggcuaccuggggcuccugucccaaagaacccgggacauuuauaucucucgcagacuucugggaacauucaccuggacccucagcgauuccgagggcaacgaaacacccggcggguacugucugacgcgguggaugcugaucgaggcugagcucaaaugcuuuggaaauaccgccguggcuaaguguaacgaaaaacaugacgaggaguucugcgauaugcugcgccuuuuugacuucaauaagcaggccauuagacggcugaaaaccccugcgcagaugagcauccagcucauuaacaaggccguuaaugcucugaucaacgaucaacuuauuaugaagaaucaucugcgcgacaucaugggcauccccuauugcaacuacucuaaauauuguuaccucaaucacacagugacagggaagaccucccugccuagaugcugucuggucagcaacggaucuuaccucaaugaaacgcacuucagcgacgauauugaacagcaggccgacaacaugaucacagagcugcuucaaaaagaguauauggaucggcagggcaagaccccgcuggggcucguggaccuguuuguguucuccaccucuuuuuaccugauuagcaucuuccuucaccucguccgcauucccacacauagacacguuaucggaaaaccuugccccaagccucaucggcugaaucacaugggcauuuguuccugcggccuguauaaacaccccggggugccggugaaguggaagcgcuga

SEQ ID NO: 31570 - RNA, 1473 nt, Artificial Sequence
  derived and/or modified CDS sequence (opt5) from LASV(Lassa virus/H.sapiens-wt/NGA/2018/ISTH_0959;Clade II)__AVV65099__GPCmut7
augggccagaucauuaccuucuuucaagaggugccccacgucaucgaagagguuaugaacauugugcugaucgcccucagccugcuugcuauucugaaggggaucuacaauguggucacaugcggacucuucggccugguguccuuucuucugcucugugggagaucuugcagcacgaccuauaaaggaguuuacgaacugcagacacuggagcucgacauggccucccugaacaugaccaugccucuuucuuguacaaagaauaacagccaucacuauaucauggugggcaaugaaaccgggcuggagcucacacugaccaacacguccauuaucaaucauaaauucugcaaccuuucugaugcgcacaagaaaaaucuguacgaccaugcucucaugagcauuaucuccaccuuucaccugagcauuccgaacuucaaucaguaugaggccaugucuugugauuuuaacggaggcaagaucuccguccaguacaaucugagccacgccuaugcuauugacgccgcuaaccauugcggcacaaucgccaauggggugcuccaaaccuucaugcggauggcguggggaggcucuuacaucgcccuggauuccgggaagggaagcugggacuguauuaugacaucuuaccaguaucuuaucauucagaacaccacgugggaagaucacugccaguuuucccgccccagcccuaucggcuaccuggggcuccugucccaaagaacacgggacauuuauaucucucgcagacuucugggaaccuucacauggacccucagcgauuccgagggcaacgaaacccccggcggguacugucugacacgguggaugcugaucgaggcugagcucaaaugcuuuggaaauacggccguugcuaaguguaacgaaaaacaugacgaggaguucugcgauaugcugcgccuuuuugacuucaauaagcaggccauuagacggcugaaaaccccugcgcagaugagcauccagcucauuaacaaggccgugaaugcucugaucaacgaucaacuuauuaugaagaaucaucugcgcgacaucaugggcauccccuauugcaacuacucuaaauauuguuaccucaaucacacagucaccgggaagacaucccugccuagaugcugucuggugagcaacggaucuuaccucaaugaaacccacuucagcgacgauauugaacagcaggccgacaacaugaucacggagcugcuucaaaaagaguauauugaucggcagggcaagacaccgcuggggcucguggaccuguuugucuucuccaccucuuuuuaccugaucagcauuuuccuucaccucguuaaaauccccacccaucgccacgugauuggaaagccuugccccaaaccucauagacugaaucacaugggcaucuguuccugcggccuguauaagcaccccggggugccggucaaguggaaacgguga

SEQ ID NO: 31571 - RNA, 1473 nt, Artificial Sequence
  derived and/or modified CDS sequence (opt5) from LASV(LASV003-NIG-2008;Clade II)__AIT17580__GPCmut7
augggccagaucauuaccuucuuucaagaggugccccacgucaucgaagagguuaugaacauugugcugaucgcccucagccugcuugcuauucugaaggggaucuacaauguggccacaugcggacucuucggccuggucuccuuucuucugcucugugggagaucuugcagcacgaccuauaaaggaguguacgaacugcagacacuggagcucgacauggcgucccugaacaugaccaugccucuuucuuguacaaagaauaacagccaucacuauaucaugguuggcaaugaaaccgggcuggagcucacacugaccaacacguccauuaucaaucauaaauucugcaaccuuucugaugcucacaagaaaaaucuguacgaccaugcccucaugagcauuaucuccaccuuucaccugagcauuccgaacuucaaucaguaugaggccaugucuugugauuuuaacggaggcaagaucuccgugcaguacaaucugagccacacauaugcugucgacgccgcuaaccauugcggcaccauugccaauggggugcuccaaacauucaugcggauggcguggggaggcucuuacaucgcccuggauuccgggaagggaagcugggacuguaucaugaccucuuaccaguaucuuauuauccagaacacgacaugggaagaucacugccaguuuucccgccccagcccuauuggcuaccuggggcuccugucccaaagaacccgggacaucuauauuucucgcagacuucugggaacauucaccuggacccucagcgauuccgagagcaacgaaacacccggcggcuacugucugacgcgguggaugcugaucgaggcugagcucaaaugcuuugggaauaccgccguugcuaaguguaacgaaaaacaugacgaggaguucugcgauaugcugcgccuuuuugacuucaauaagcaggccaucagacggcugaaagcgccugcccagaugucuauucagcucaucaacaaggcugugaaugcccugauuaacgaucaacuuaucaugaagaaucaucugcgcgacauuaugggaauccccuauugcaacuacuccaaauauuguuaccucaaucacacagucaccggcagaacaagccugccucggugcugucuggugucuaacgggagcuaccucaaugaaacccacuucuccgacgauaucgaacagcaggcugacaacaugauuacggagcugcuucaaaaggaguauauggaucgccagggaaaaacaccgcugggccucguggaccuguuugucuucucuaccagcuuuuaccugaucuccauuuuccuucaccucguuaagauccccacccauagacacgugauugggaaaccuugccccaagccucaucggcugaaucacaugggaaucuguagcugcggccuguauaaacaccccggcgugccggucaaguggaagcgcuga

SEQ ID NO: 31572 - RNA, 1473 nt, Artificial Sequence
  derived and/or modified CDS sequence (opt5) from LASV(LASV035-NIG-2009;Clade II)__AIT17588__GPCmut7
augggccagaucauuaccuucuuucaagaggugccccacgucaucgaagagguuaugaacauugugcugaucgcccucagccugcuugcuauucugaaggggaucuacaauguggccacaugcggacucuucggccuggucuccuuucuucugcucugugggagaucuugcagcacgaccuauaaaggaguguacgaacugcagacacuggagcucgacauggcgucccugaacaugaccaugccucuuucuuguacaaagaauaacagccaucacuauaucaugguuggcaaugaaaccgggcuggagcucacacugaccaacacguccauuaucaaucauaaauucugcaaccuuucugaugcucacaagaaaaaucuguacgaccaugcccucaugagcauuaucuccaccuuucaccugagcauuccgaacuucaaucaguaugaggccaugucuugugauuuuaacggaggcaagaucuccgugcaguacaaucugagccacgcuuaugccgucgacgcugccaaccauugcggcacaauugcgaauggggugcuccaaaccuucaugcggauggccuggggaggcucuuacaucgcucuggauuccgggaagggaagcugggacuguaucaugacaucuuaccaguaucuuauuauccagaacaccacgugggaagaucacugccaguuuucccgccccagcccuauuggcuaccuggggcuccugucccaaagaacacgggacaucuauauuucucgcagacuucugggaaccuucacauggacccucagcgauuccgagggcaacgaaacccccggcggguacugucugacacgguggaugcugaucgaggccgagcucaaaugcuuuggaaauacggcuguugccaaguguaacgaaaaacaugacgaggaguucugcgauaugcugcgccuuuuugacuucaauaagcaggcgaucagacggcugaaagccccugcucagaugagcauucagcucaucaacaaggccgugaaugcucugauuaacgaucaacuuaucaugaagaaucaucugcgcgacauuaugggcauccccuauugcaacuacucuaaauauuguuaccucaaucacaccgucacagggaagaccucccugccuagaugcugucuggugagcaacggaucuuaccucaaugaaacacacuucagcgacgauaucgaacagcaggccgacaacaugauuaccgagcugcuucaaaaagaguauaucgaucggcagggcaagacgccgcuggggcucguggaccuguuugucuucuccacaucuuuuuaccugauuagcaucuuccuucaccucguuaaaauucccacccaucgccacgugaucggaaagccuugccccaaaccucauagacugaaucacaugggcauuuguuccugcggccuguauaagcaccccggggugccggucaaguggaaacgguga

SEQ ID NO: 31573 - RNA, 1473 nt, Artificial Sequence
  derived and/or modified CDS sequence (opt5) from LASV(LASV1000-NIG-2009;Clade II)__AIT17782__GPCmut7
augggccagaucauuaccuucuuucaagaggugccccacgucaucgaagagguuaugaacauugugcugaucgcccucagccugcuugcuauucugaaggggaucuacaauguggccacaugcggacucuucggccuggucuccuuucuucugcucugugggagaucuugcagcacgaccuauaaaggaguguacgaacugcagacacuggagcucgacauggcgucccugaacaugaccaugccucuuucuuguacaaagaauaacagccaucacuauaucaugguuggcaaugaaaccgggcuggagcucacacugaccaacacguccauuaucaaucauaaauucugcaaccuuucugaugcucacaagaaaaaucuguacgaccaugcccucaugagcauuaucuccaccuuucaccugagcauuccgaacuucaaucaguaugaggccaugucuugugauuuuaacggaggcaagaucuccgugcaguacaaucugagccacacauaugcugucgacgccgcuaaccauugcggcaccauugccaauggggugcuccaaacauucaugcggauggcguggggaggcucuuacaucgcccuggauuccgggaagggaagcugggacuguaucaugaccucuuaccaguaucuuauuauccagaacacgacaugggaagaucacugccaguuuucccgccccagcccuauuggcuaccuggggcuccugucccaaagaacccgggacaucuauauuucucgcagacuucugggaacauucaccuggacccucagcgauuccgagggcaacgaaacacccggcggguacugucugacgcgguggaugcugaucgaggcugagcucaaaugcuuuggaaauaccgccguugcuaaguguaacgaaaaacaugacgaggaguucugcgauaugcugcgccuuuuugacuucaauaagcaggccaucaaaagacugaagaccccugcgcagaugagcauucagcucaucaacaaggccgugaaugcucugauuaacgaucaacuuaucaugaaaaaucaucugcgggacauuaugggcauccccuauugcaacuacucuaaguauuguuaccucaaucacacagucacagggaaaaccucccugccucgcugcugucuggugagcaacggaucuuaccucaaugaaacgcacuucagcgacgauaucgaacagcaggccgacaacaugauuacagagcugcuucaaaaggaguauaucgauagacagggcaaaaccccgcuggggcucguggaccuguuugucuucuccaccucuuuuuaccugauuagcaucuuccuucaccucguuaagauucccacacaucggcacguggugggaaaaccuugccccaagccucaucgccugaaucacaugggcaucuguuccugcggccuguauaagcaccccggggucccggugaaauggaagagauga

SEQ ID NO: 31574 - RNA, 1473 nt, Artificial Sequence
  derived and/or modified CDS sequence (opt5) from LASV(LASV221-NIG-2010;Clade II)__AIT17624__GPCmut7
augggccagaucauuaccuucuuucaagaggugccccacgucaucgaagagguuaugaacauugugcugaucgcccucagccugcuugcuauucugaaggggaucuacaauguggccacaugcggacucuucggccuggucuccuuucuucugcucugugggagaucuugcagcacgaccuauaaaggaguguacgaacugcagacacuggagcucgacauggcgucccugaacaugaccaugccucuuucuuguacaaagaauaacagccaucacuauaucaugguuggcaaugaaaccgggcuggagcucacacugaccaacacguccauuaucaaucauaaauucugcaaccuuucugaugcucacaagaaaaaucuguacgaccaugcccucaugagcauuaucuccaccuuucaccugagcauuccgaacuucaaucaguaugaggccaugucuugugauuuuaacggaggcaagaucuccgugcaguacaaucugagccacacauaugcuauugacgccgcuaaccauugcggcaccaucgccaaugggguccuccaaacauucaugcggauggcguggggaggcucuuacaucgcccuggauuccgggaagggaagcugggacuguauuaugaccucuuaccaguaucuuaucauucagaacacgacaugggaagaucacugccaguuuucccgccccagcccuaucggcuaccuggggcuccugucccaaagaacccgggacauuuauaucucucgcagacuucugggaacauucaccuggacccucagcgauuccgagggcaacgaaacacccggcggguacugucugacgcgguggaugcugaucgaggcugagcucaaaugcuuuggaaauaccgccguggcuaaguguaacgaaaaacaugacgaggaguucugcgauaugcugcgccuuuuugacuucaauaagcaggccauuagacggcugaaaaccccugcgcagaugagcauccagcucauuaacaaggccguuaaugcucugaucaacgaucaacuuauuaugaagaaucaucugcgcgacaucaugggcauccccuauugcaacuacucuaaauauuguuaccucaaucacacagugacagggaagaccucccugccuagaugcugucuggucagcaacggaucuuaccucaaugaaacgcacuucagcgacgauauugaacagcaggccgacaacaugaucacagagaugcugcaaaaagaguauauggaucggcagggcaagaccccgcuugggcugguggaccucuuuguguucuccaccucuuuuuaccugauuagcaucuuccugcaccuugucaaaauucccacacaucgccacguuaucggaaagccuugccccaaaccucauagacucaaucacaugggcauuuguuccugcggccuguauaagcaccccggggugccggugaaguggaaacgguga

SEQ ID NO: 31575 - RNA, 1473 nt, Artificial Sequence
  derived and/or modified CDS sequence (opt5) from LASV(LASV237-NIG-2010;Clade II)__AIT17638__GPCmut7
augggccagaucauuaccuucuuucaagaggugccccacgucaucgaagagguuaugaacauugugcugaucgcccucagccugcuugcuauucugaaggggaucuacaauguggccacaugcggacucuucggccuggucuccuuucuucugcucugugggagaucuugcagcacgaccuauaaaggaguguacgaacugcagacacuggagcucgacauggcgucccugaacaugaccaugccucuuucuuguacaaagaauaacagccaucacuauaucaugguuggcaaugaaaccgggcuggagcucacacugaccaacacguccauuaucaaucauaaauucugcaaccuuucugaugcucacaagaaagaccuguacgaucaugcccucaugagcauuaucuccaccuuucaccugagcauuccgaauuucaaccaguaugaggccaugucuugugacuuuaauggaggcaagaucuccgugcaguacaaccugagccacacauaugcugucgaugccgcuaaucauugcggcaccauugccaacggggugcuccaaacauucaugcggauggcguggggaggcucuuacaucgcccuggacuccgggaagggaagcugggauuguaucaugaccucuuaccaguaucuuauuauccagaauacgacaugggaagaccacugccaguuuucccgccccagcccuauuggcuaccuggggcuccugucccaaagaacccgggauaucuauauuucucgcagacuucugggaacauucaccuggacccucagcgacuccgagggcaacgaaacacccggcggguacugucugacgcgguggaugcugaucgaggcugagcucaaaugcuuuggaaacaccgccguugcuaaguguaaugaaaaacaugaugaggaguucugcgacaugcugcgccuuuuugauuucaacaagcaggccaucagacggcugaaaaccccugcgcagaugagcauucagcucaucaauaaggccgugaacgcucugauuaaugaccaacuuaucaugaagaaccaucugcgcgacauuaugggcauccccuauugcaauuacucuaaauauuguuaccucaaccacacagucacagggaagaccucccugccuagaugcugucuggugagcaauggaucuuaccucaacgaaacgcacuucagcgaugacaucgaacagcaggccgauaauaugauuacagagcugcuucaaaaagaguauauggaccggcagggcaagaccccgcuggggcucguggaucuguuugucuucuccaccucuuuuuaccugaucagcauuuuccuucaccucaucaaaauucccacacaucgccacaucaccggaaagccuugccccaaaccucauagacugaaccacaugggcauuuguuccugcggccuguauaagcaccccgggguuccggugaaguggaaacgguga

SEQ ID NO: 31576 - RNA, 1473 nt, Artificial Sequence
  derived and/or modified CDS sequence (opt5) from LASV(LASV253-NIG-2011;Clade II)__AIT17670__GPCmut7
augggccagaucauuaccuucuuucaagaggugccccacgucaucgaagagguuaugaacauugugcugaucgcccucagccugcuugcuauucugaaggggaucuacaauguggccacaugcggacucuucggccuggucuccuuucuucugcucugugggagaucuugcagcacgaccuauaaaggaguguacgaacugcagacacuggagcucgacauggcgucccugaacaugaccaugccucuuucuuguacaaagaauaacagccaucacuauaucaugguuggcaaugaaaccgggcuggagcucacacugaccaacacguccauuaucaaucauaaauucugcaaccuuucugaugcucacaagaaaaaucuguacgaccaugcccucaugagcauuaucuccaccuuucaccugagcauuccgaacuucaaucaguaugaggccaugucuugugauuuuaacggaggcaagaucuccgugcaguacaaucugagccacacauaugcugucgacgccgcuaaccauugcggcaccauugccaauggggugcuccaaacauucaugcggauggcguggggaggcucuuacaucgcccuggauuccgggaagggaagcugggacuguaucaugaccucuuaccaguaucuuauuauccagaacacgacaugggaagaucacugccaguuuucccgccccagcccuauuggcuaccuggggcuccugucccaaagaacccgggacaucuauauuucucgcagacuucugggaacauucaccuggacccucagcgauuccgagggcaacgaaacacccggcggguacugucugacgcgguggaugcugaucgaggcugagcucaaaugcuuuggaaauaccgccguugcuaaguguaacgaaaaacaugacgaggaguucugcgauaugcugcgccuuuuugacuucaauaagcaggccaucagacggcugaaagcgccugcccagaugagcauucagcucaucaacaaggcugugaaugcccugauuaacgaucaacuuaucaugaagaaucaucugcgcgacauuaugggcauccccuauugcaacuacucuaaauauuguuaccucaaucacacagucaccgggagaacaucccugccucggugcugucuggugagcaacggaucuuaccucaaugaaacccacuucagcgacgauaucgaacagcaggcugacaacaugauuacggagcugcuucaaaaggaguauaucgaucgccagggcaaaacaccgcuggggcucguggaccuguuugucuucuccaccucuuuuuaccugauuagcaucuuccuucaccucguuaagauucccacccauagacacaucauuggaaaaccuugccccaagccucaucggcugaaucacaugggcaucuguuccugcggccuguauaaacaccccggggugccggugaaguggaagcgcuga

SEQ ID NO: 31577 - RNA, 1473 nt, Artificial Sequence
  derived and/or modified CDS sequence (opt5) from LASV(LASV254-NIG-2011;Clade II)__AIT17674__GPCmut7
augggccagaucauuaccuucuuucaagaggugccccacgucaucgaagagguuaugaacauugugcugaucgcccucagccugcuugcuauucugaaggggaucuacaauguggccacaugcggacucuucggccuggucuccuuucuucugcucugugggagaucuugcagcacgaccuauaaaggaguguacgaacugcagacacuggagcucgacaugaccaaccugaauaugacaaugccucuuuccuguaccaagaacaauucucaucacuauaucaugguuggcaacgaaacagggcuggagcucacccugacgaauaccagcauuaucaaccauaaauucugcaaucuuuccgaugcgcacaagaaaaaccuguacaaucaugcucucaugucuauuaucagcacauuucaccuguccauuccgaacuucaaucaguaugaggccaugagcugugacuuuaacggaggcaagaucucugugcaguacaaucugucccacagcuaugccgucgaugcugccaaccauugcggcaccauugcuaacggggugcuccaaacauucaugcggauggccuggggaggcucuuacaucgcgcuggacuccgggaagggaaauugggauuguaucaugaccagcuaccaguaucuuauuauccagaacacgacaugggaagaccacugccaguuuucucgccccuccccuauuggcuaccuggggcuccugagccaaagaacccgggauaucuauauuucccgcagacuucugggaacauucaccuggacccucucugacagcgagggcaaugaaacacccggcggguacugucugacgcgguggaugcugaucgaggccgagcucaaaugcuuuggaaacaccgcuguugccaaguguaaugaaaaacaugaugaggaguucugcgacaugcugcgccuuuuugauuucaacaagcaggcuaucagacggcugaaaaccccugcccaggcgaauauucagcucaucaacaaggccgugaaugcucugauuaacgaccaacuuaucaugaagaaucaucugcgcgauauuaugggcauccccuauugcaacuacuccaaauauuguuaccucaaucacacagucacagggaagaccagccugccuagaugcugucuggugucuaacggauccuaccucaaugaaacgcacuucagcgacgacaucgaacagcaggccgauaacaugauuacagagcugcuucaaaaagaguauauggaccggcagggcaagaccccgcuggggcucguggaucuguuugucuucucuaccagcuuuuaccugaucuccauuuuccuucaccucguuaaaauccccacacaucgccacgugauuggaaagccuugccccaaaccucauagacugaaccacaugggcaucuguucuugcggccuguauaagcaccccggggugccggucaaguggaaacgguga

SEQ ID NO: 31578 - RNA, 1473 nt, Artificial Sequence
  derived and/or modified CDS sequence (opt5) from LASV(Nig08-A19;Clade III)__ADU56618__GPCmut7
augggccagaucgugaccuucuuucaagaggucccccacguuauugaagaggugaugaacaucgugcugauugcccucagcauccuggcuauucuuaaggggcuguacaauaucgccacaugcggacucaucggccuggucacguuccuucugcucuccgggagaucuuguagcaugaccuauaaaggaguguacgaacugcagacacuggagcucaacaugaauacccugaacaugacaaugccucuuuccugcaccaagaauaacucucaucacuauauuaugguuggcaaugaaacagggcuggagcucacccugacgaacaccagccuucugcaucacaaauuuuguaaucucuccgacgcgcauaagaaaaaccuguacgaucacacacugaugucuaucauuagcaccuuccaccucuccaucccgaauuuuaaccaguaugaggcuaugagcugcgacuucaauggaggcaagauuacagugcaguacaaccugucucauuccuaugccaucgaugccgcuaaucacuguggcaccgucgccaacggggugcuucaaacguuuaugcggauggcuuggggaggcagcuacauugcccuggacucugggcgcggaaagugggauugcaucaugacauccuaccaguaucucaucauucagaacaccacaugggaagaccauugucaguucagcagacccucuccuaucggcuaccuggggcuucugucccaacggacccgcgauauuuauaucagcagacggcuccugggaaccuuuacauggacgcuguccgacucugagggcaaugaaacccccggcggguacugccucacacgcuggaugcugauugaggcggagcuuaaauguuucggaaacaccgccguugcuaagugcaaugaaaaacacgaugaggaauuuugugacaugcugagacucuucgauuuuaacaagcaggccauccggcgccugaaagcuccugcccagaugagcauccagcuuauuaauaaggcggugaacgcccugaucaaugaccaacucauuaugaagaaccaccugagagauaucaugggcauucccuauugcaauuacuccaaauauugcuaccugaaccauacaagcaccgggcggacgucucucccucgcuguugccuggucuccaauggaagcuaccuuaacgagacacacuucucugacgacaucgaacagcaggcugauaauaugaucaccgagaugcugcaaaaggaguaucucgacagacagggcaaaaccccgcuggggcugguggaucuuuucguguuuagcacauccuucuaccucauuucuaucuuucugcaucuggucaagauucccacccaccggcauaucguuggaaaaccuugucccaagccucaccgccucaaccacaugggcauuugcagcuguggccuguauaaacagcccggggugccggugagauggaagcgguga

SEQ ID NO: 31579 - RNA, 1476 nt, Artificial Sequence
  derived and/or modified CDS sequence (opt5) from LASV(G1180-SLE-2010;Clade IV)__AIT17168__GPCmut7
augggccagaucgugaccuucuuucaagaggucccccacguuauugaagaggugaugaacaucgugcugauugcccucagcauccuggcuguccuuaaggggcuguacaauuucgccacaugcggacucgugggccugcuuacguuucugcuccugugugggagauccugcaccgcgucucgguauaaaggaguuuacgaacugcagacacucgagcugaacauggaaacccuuaauaugacaaugccucugagcuguaccaagaacaauucccaucacuauauuauggugggcaacgagacagggcucgagcugacccuuacgaauaccucuaucaucaaccauaaauucugcaaucugagcgacgcucacaagaaaaaccucuacgaucaugcccugauguccauuaucucuacauuucaccugagcauuccgaauuucaaccaguaugaagccauguccugugacuuuaauggaggcaagaucagcguccaguacaaccucucucacuccuaugcuggcgaugccgcuaaucauugcgggaccguggccaacggaguucugcaaacauucaugcgcauggcguggggcgggagcuacauugcccuugacucuggacacggcuccugggauuguaucaugaccagcuaccaguaucugauuauccagaacacgacaugggaggaccauugccaguuuucuagacccuccccuaucggguaccucggacugcuuagccaacggacccgcgauauuuauaucuccagacggcugcucggcacauucaccuggacccugucugacagcgaaggcaaggauacacccgggggauacugucugacgcgcuggaugcucauugaggcugagcugaaaugcuuuggcaauaccgccguggcuaaguguaacgaaaaacacgacgaggaguucugcgauaugcuuagacuguuugacuucaauaagcaggccauccagcggcucaaagcgccugcccagauguccauucaacugaucaacaaggcugucaaugcccuuaucaacgaucagcugauuaugaagaaucaccuccgcgacaucauggggauucccuauugcaacuacagcaaauauuguuaccugaaucauacaaccacaggaaagaccucucugccuaaaugcugucucguguccaacggcagcuaccugaaugaaacgcacuucucugacgauaucgaacagcaagcugacaacaugauuacagagaugcuucagaaggaguauauggaaagacaggggaaaaccccgcugggacucguggaucuguuugucuucagcaccuccuuuuaccugaucucuaucuuccuucaucucguuaagauucccacacaccggcauaucgugggcaaaagcugcccuaagccccaccgccugaaucacaugggcauuuguuccugcgggcuguauaagcagccuggagugcccgucaaauggaagagauga

SEQ ID NO: 31580 - RNA, 1476 nt, Artificial Sequence
  derived and/or modified CDS sequence (opt5) from LASV(G1442-SLE-2011;Clade IV)__AIT17180__GPCmut7
augggccagaucgugaccuucuuucaagaggucccccacguuauugaagaggugaugaacaucgugcugauugcccucagcauccuggcuguccuuaaggggcuguacaauguggccacaugcggacucauuggccugguuacguuccuucugcucugugggagauccugcaccacaacccuguauaaaggaguguacgaacugcagacacucgagcugaacauggaaacccuuaauaugacaaugccucugucuuguaccaagaacaauagccaucacuauauccgggucggcaacgagacggggcucgagcugacccuuacaaauaccuccaucauuaaccauaaauuuugcaaucugucugacgcgcacaagaaaaaccucuacgaucaugcucugaugagcaucauuuccacauuccaccugucuaucccgaauuuuaaccaguaugaagccaugagcugugacuucaauggaggcaagauuuccgugcaguacaaccucagccacucuuaugccggcgaugcugccaaucauugcgggaccguugcuaacggagugcugcaaacguuuaugcgcauggccuggggcggguccuacaucgcgcuugacagcggaagaggcaacugggauuguauuaugacaucuuaccaguaucugaucauccagaauaccacaugggacgaucacugccaguucucccggcccagcccuauuggguaccucggacugcuuucucaacgcaccagagacgucuauaucucccggcgccugcucggcaccuuuacauggacgcugagcgauuccgagggcaaggacacccccgggggauacugucugacaagauggaugcucauugaagccgagcugaaaugcuucggcaacaccgcuguggccaaguguaaugagaaacaugaugaagaguuuugcgacaugcuucggcuguucgauuuuaacaagcaggcuauccagcgccucaaagccccugcgcagaugucuauucaacugaucaauaaggccgugaacgcucuuaucaaugaccagcugauuaugaagaaccaccucagagacaucauggggauucccuauugcaauuacagcaaauauuguuaccugaacaauacagccaccggaaagacgucccugccuaaaugcugucucaucagcaacggcucuuaccugaaugaaacacacuucuccgaugacauugagcaggaagcugauaacaugaucaccgagaugcuucaaaaggaguauauggaacggcaggggaaaaccccgcugggacucgucgaccuguucguuuuuagcacaucuuucuaccugaucagcauuuuucuucaucucgugaagauccccacccaccgccauauugugggcaaauccugcccuaagccccacagacugaaucauaugggcaucuguucuugcgggcuguauaagcagccuggaguccccgugcgguggaaacgcuga

SEQ ID NO: 31581 - RNA, 1476 nt, Artificial Sequence
  derived and/or modified CDS sequence (opt5) from LASV(G3010-SLE-2013;Clade IV)__AIT17344__GPCmut7
augggccagaucgugaccuucuuucaagaggucccccacguuauugaagaggugaugaacaucgugcugauugcccucagcauccuggcuguccuuaaggggcuguacaauuucgccacaugcggacucgugggccugguuacguuucuucugcucugugggagauccugcaccacaucucuguauaaaggaguguacgaacugcagacccucgagcugaacauggaaacacuuaauaugaccaugccucugagcuguacaaagaacaauucccaucacuauauuauggucggcaacgagaccgggcucgagcugacgcuuaccaauacaucuaucaucaaccauaaauucugcaaucugagcgacgcgcacaagaaaaaccucuacaaucaugcucugauguccauuaucucuaccuuucaccugagcauuccgaacuucaaucaguaugaagccauguccugugauuuuaacggaggcaagaucagcgugcaguacaaucucucucacuccuaugccggcgacgcugccagccauugcgggacaguugcuaacggagugcugcaaaccuucaugcggauggccuggggcgggucuuacauugcgcuugauuccggauacggcaagugggacuguaucaugacgagcuaucaguaccugauuauccagaacacaaccugggaggaucacugccaguuuucucgccccuccccuaucggguaucucggacugcuuagccaaagaacacgggacauuuacaucucccgcagacugcucggcaccuucaccuggacacugucugauagcgaaggcaaagacacgcccgggggauauugucugacccgguggaugcucauugaggccgagcugaagugcuuuggcaauacagcugucgccaaauguaacgaaaagcaugaugaggaguucugcgacaugcuucgccuguuugauuucaauaaacaggcuauccagagacucaagaccccugcccagauguccauucaacugaucaacaaggcggugaaugcccuuaucaacgaccagcugauuaugaaaaaucaccuccgggauaucauggggauucccuacugcaacuauagcaaguacuguuaccugaaucacacaaccacgggaaaaacaucucugccuaagugcugucucguguccaacggcagcuaucugaaugaaacccauuucucugacgacaucgaacagcaagcugauaacaugauuaccgagaugcuucagaaagaguacauggaacgccaggggaagacaccgcugggacucgucgaccuguuuguuuucagcaccuccuuuuaucugaucucuaucuuccuucaccucgugaaaauucccacacauagacacaucgugggcaagagcugcccuaagccccaucggcugaaucacaugggcauuuguuccugcgggcuguacaaacagccuggaguccccgugcgcuggaagagauga

SEQ ID NO: 31582 - RNA, 1476 nt, Artificial Sequence
  derived and/or modified CDS sequence (opt5) from LASV(G502-SLE-2009;Clade IV)__AIT17126__GPCmut7
augggccagaucgugaccuucuuucaagaggucccccacguuauugaagaggugaugaacaucgugcugauugcccucagcauccuggcuguccuuaaggggcuguacaauuucgccacaugcggacucgugggccugcuuacguuucugcuccugugugggagauccugcaccacaggacuguauaaaggcguuuacgaacuccagacccuggagcuuaacauggaaacacugaauaugaccaugccucucucuuguacaaagaacaauagccaucacuauauuaugguggggaacgagaccggacuggagcuuacgcugaccaauacauccaucaucaaccauaaauucugcaaucucucugacgcgcacaagaaaaaccuguacgaucaugcucugaugagcauuaucuccaccuuucaccucucuauuccgaauuucaaccaguaugaagccaugagcugugacuuuaauggcggcaagaucuccguccaguacaaccugagccacucuuaugccggggaugcugccgaccauugcggaacaguggcuaauggcguucuucaaaccuucaugcggauggccuggggaggguccuacauugcgcuggauagcggccgcgggagaugggacuguaucaugacgucuuaccaguaucucauuauccagaacacaaccugggaggaucacugccaguuuucccggcccagcccuaucggauaccugggccuucugucucaacgcacaagagacauuuauaucucccggcgccuccugggcaccuucaccuggacacugagcgauuccgaagggaaggacacgcccggaggcuacugucucaccagauggaugcugauugaggccgagcuuaaaugcuuugggaacacagcuguggccaaguguaaugaaaaacaugaugaggaguucugcgacaugcugcggcucuuugauuucaacaagcaggcuauccagcgccugaaagccccugcgcagaugucuauucaacuuaucaauaaggccgucaacgcucugaucaaugaccagcucgugaugaagaaccaccugagagacauuaugggaauccccuauugcaauuacagccgguauuguuaccugaaccacaccacaaccggccgcacgucccucccuaaaugcugucuggugagcaaugggucuuaccuuaacgaaacacauuucuccgaugacauugaacagcaagccgauaauaugaucaccgagaugcugcagaaggaguauauggaaagacagggaaaaaccccgcucggccuggucgaccuguuuguuuucagcacaucuuuuuaccuuauuagcaucuuccuccaccuggugaagauccccacccaucggcacauugugggcaaauccugcccuaagccccaucgccugaaccacauggggaucuguucuugcggacucuauaaacagccuggcguccccgugaaguggaagagauga

SEQ ID NO: 31583 - RNA, 1476 nt, Artificial Sequence
  derived and/or modified CDS sequence (opt5) from LASV(G733-SLE-2010;Clade IV)__AIT17154__GPCmut7
augggccagaucgugaccuucuuucaagaggucccccacguuauugaagaggugaugaacaucgugcugauugcccucagcauccuggcuguccuuaaggggcuguacaauuucgccacaugcggaauugugggccucguuuccuuucugcuucugugugggagaucuugcacgaccagccucuauaaaggaguguacgaacugcagacacuggagcucaacauggaaacccugaauaugacaaugccucuuuccuguaccaagaacaauucucaucacuauaucauggucggcaacgagacagggcuggagcucacccugacgaauaccagcaucauuaaccauaaauucugcaaucuuuccgacgcgcacaagaaaaaccuguacgaucaugcucucaugucuaucauuagcacauuucaccuguccaucccgaauuucaaccaguaugaagccaugagcugugacuuuaauggaggcaagauuucugugcaguacaaccugucccacagcuaugccggcgaugcugccaaucauugcgggaccaucgcuaacggaguucuccaaacauucaugcggauggccuggggcgggucuuacauugcgcuggacuccggacgcgauagaugggacuguaucaugaccagcuaccaguaucuuaucauucagaacacgacaugggaggaucacugccaguuuucucggcccuccccuaucggcuaccuggggcuccugagccaacgcaccagagacauuuauaucucccggcgccuucugggaacauucaccuggacccucucugauagcgaaggcaaggacacacccggcggguacugucugacgagauggaugcugauugaggccgagcucaaaugcuuuggaaauaccgcuguggccaaguguaacgaaaaacaugaugaggaguucugcgacaugcugcggcuuuuugauuucaauaagcaggcuauccagcgccugaaagccccugcgcagauguccauccaacucauuaacaaggccgucaaugcucugaucaacgaccagcuuauuaugaagaaucaccugagagacaucaugggcauucccuauugcaacuacagcaaauauuguuaccucaaucacacaaccacagggaagaccucucugccuaaaugcugucugguguccaacggaagcuaccucaaugaaacgcauuucucugaugacaucgaacagcaagccgauaacaugaucacagagaugcugcagaaggaguauauggaacggcagggcaaaaccccgcuugggcugguggaccucuuugucuucagcaccuccuuuuaccugauuucuaucuuccugcaccuuguuaagauucccacacaucgccacguggugggaaaaagcugcccuaagccccauagacucaaucacaugggcaucuguuccugcggccuguaugggcagccuggaguccccgugaaguggaaacgguga

SEQ ID NO: 31584 - RNA, 1476 nt, Artificial Sequence
  derived and/or modified CDS sequence (opt5) from MOPV/LASV reassortant(IGS-1;Clade IV)__AFY05576__GPCmut7
augggccagaucgugaccuucuuucaagaggucccccacguuauugaagaggugaugaacaucgugcugauugcccucagcguccuggcugugcuuaaggggcuguacaauuucgccacaugcggacucguuggccuggugacguuucuucugcucugugggagauccugcaccacaucucuguauaaaggagucuacgaacugcagacccucgagcugaacauggaaacacuuaauaugaccaugccucugagcuguacaaagaacaauucccaucacuauaucauggugggcaacgagaccgggcucgagcugacgcuuaccaauacaucuauuaucaaccauaaauucugcaaucugagcgacgcgcacaagaaaaaccucuacgaucaugcucugauguccaucauuucuaccuuucaccugagcaucccgaauuucaaccaguaugaagccauguccugugacuuuaauggaggcaagauuagcguucaguacaaccucucucacuccuaugccggcgaugcugccaaucauugcgggacaguggcuaacggaguccugcaaaccuucaugcggauggccuggggcgggagcuacaucgcgcuugacucuggacgcggcaacugggauuguauuaugacguccuaccaguaucugaucauucagaauacaaccugggaggaccacugccaguuuagcagacccucuccuaucggguaccucggacugcuuucccaacggacacgcgauaucuauauuagcagacggcugcucggcaccuucaccuggacacuguccgacucugaaggcgaggauacgcccgggggauacugucugacccgcuggaugcucaucgaggccgaacugaagugcuuuggcaacacagcuguggccaaauguaaugagaagcaugacgaagaguucugcgauaugcuuagacuguuugacuucaacaaacaggcuauucagcggcucaaggccccugcgcagaugagcauccaacugauuaauaaagccgugaacgcucuuaucaaugaucagcugaucaugaagaaccaccuccgcgacauuauggggauccccuauugcaauuacuccaaguauuguuaccugaaccacaccacaaccggaagaacgagccugccuaaaugcugucucgucucuaauggcuccuaccugaacgaaacacauuucagcgacgauauugagcagcaagccgacaauaugaucaccgagaugcuucagaaggaauauauggagcggcaggggaaaaccccgcugggacucguugaucuguuuguguucucuaccagcuuuuaccugauuuccaucuuccuucaccucgugaagauccccacacaucgccacauugucggcaaaucuugcccuaagccccauagacugaaccacaugggcaucuguagcugcgggcuguauaaacagccuggagugcccguuaaguggaagcgguga

SEQ ID NO: 31585 - RNA, 1476 nt, Artificial Sequence
  derived and/or modified CDS sequence (opt5) from LASV(LM765-SLE-2012;Clade IV)__AIT17814__GPCmut7
augggccagaucgugaccuucuuucaagaggucccccacguuauugaagaggugaugaacaucgugcugauugcccucagcauccuggcuguccuuaaggggcuguacaauuucgccacaugcggacucgugggccugguuacguuucuucugcucugugggagauccugcaccacaucucuguauaaaggaguguacgaacugcagacccucgagcugaacauggaaacacuuaauaugaccaugccucugagcuguacaaagaacaauucccaucacuauauuauggucggcaacgagaccgggcucgagcugacgcuuaccaauacaucuaucaucgaccauaaauucugcaaccugagcgaugcgcaccggaagaaucucuacgaccaugcucugauguccauuaucucuaccuuucaccugagcauuccgaacuucaaucaguaugaagccauguccugugauuuuaacggaggcaaaaucagcgugcaguacaaucucucucacuccuaugccaaggacgcugccgaucauugcggcacaguugcuaacggggugcugcaaaccuucaugcgcauggccuggggaggcagcuacauugcgcuugacucugggagaggacggugggauuguaucaugacguccuaccaguaucugauuauccagaauacaaccugggaggaccacugccaguuuagccgccccucuccuaucggcuaccucgggcugcuuucccaaagaacacgggauauuuauaucagccgcagacugcucggaaccuucaccuggacacuguccgacucugaaggcaaggauacgcccggcggguacugucugacccgguggaugcucauugaggccgagcugaaaugcuuuggaaacacagcugucgccaaguguaacgaaaaacaugacgaggaguucugcgauaugcuucgccuguuugacuucaauaagcaggcuauccagagacucaaagccccugcgcagaugagcauucaacugaucaacaaggccgugaaugcucuuaucaacgaccagcugauuaugaagaaucaccuccgggauaucaugggcauucccuauugcaacuacuccaaauauuguuaccugaaucacaccacaaccgggaagacgagccugccuaaaugcugucucgugucuaacggauccuaccugaaugaaacacauuucagcgacgauaucgaacagcaagccgacaacaugauuaccgagaugcuucagaaggaguauauggaacgccagggcaaaaccccgcuggggcucgucgaucuguuuguuuucucuaccagcuuuuaccugaucuccaucuuccuucaccucgugaagauucccacacauagacacaucgugggaaaaccuugccccaagccucaucggcugaaucacaugggcauuuguucuugcggccuguauaagcagcccggggucccggugaaauggaagcgcuga

SEQ ID NO: 31586 - RNA, 1476 nt, Artificial Sequence
  derived and/or modified CDS sequence (opt5) from LASV(LM776-SLE-2012;Clade IV)__AIT17824__GPCmut7
augggccagaucgugaccuucuuucaagaggucccccacguuauugaagaggugaugaacaucgugcugauugcccucagcauccuggcuguccuuaaggggcuguacaauuucgccacaugcggacucgugggccugguuacguuucuucugcucugugggagauccugcaccacaucuguguauaaaggagucuacgaacugcagacccuggagcucaacauggaaacacugaauaugaccaugccucuuagcuguacaaagaacaauucccaucacuauauuauggugggcaacgagaccgggcuggagcucacgcugaccaauacaucuaucaucaaccauaaauucugcaaucuuagcgacgcgcacaagaaaaaccuguacgaucaugcucucauguccauuaucucuaccuuucaccugagcauuccgaauuucaaccaguaugaagccauguccugugacuuuaauggaggcaagaucagcguucaguacaaccugucucacuccuaugccggcgaugcugccaaucauugcgggacaguggcuaacggaguccuccaaaccuucaugcggauggccuggggcgggagcuacauugcgcuggacucuggacacggcaagugggauuguaucaugacguccuaccaguaucuuauuauccagaacacaaccugggaggaccauugccaguuuagccgccccucuccuaucggguaccugggacuccugucccaaagaacacgggauauuuauaucagccgcagacuucugggcaccuucaccuggacacucuccgacucugaaggcaaagauacgcccgggggauacugucugacccgguggaugcugauugaggccgagcucaagugcuuuggcaauacagcuguggccaaauguaacgaaaagcacgacgaggaguucugcgauaugcugcgccuuuuugacuucaauaaacaggcuauccagagacugaaggccccugcgcagaugagcauucaacucaucaacaaggccgugaaugcucugaucaacgaucagcuuauuaugaaaaaucaucugcgggacaucauggggauucccuauugcaacuacuccaaguauuguuaccucaaucacaccacaaccggaaaaacgagccugccuaagugcugucuggucucuaacggcuccuaccucaaugaaacacacuucagcgacgauaucgaacagcaagccgacaacaugauuaccgagaugcugcagaaagaguauauggaacgccaggggaagaccccgcuuggacugguugaucucuuuguguucucuaccagcuuuuaccugaucuccaucuuccugcaucuugugaaaauucccacacacagacauaucgucggcaagucuugcccuaagccccaccggcucaaucacaugggcauuuguagcugcgggcuguauaaacagccuggagugcccguucgcuggaagagauga

SEQ ID NO: 31587 - RNA, 1476 nt, Artificial Sequence
  derived and/or modified CDS sequence (opt5) from LASV(Mad39;Clade IV)__ANH09722__GPCmut7
augggccagaucgugaccuucuuucaagaggucccccacguuauugaagaggugaugaacaucgugcugauugcccucagcauccuggcuguccuuaaggggcuguacaauguggccacaugcggacucauuggccugguuacguuccuucugcucugugggagauccugcaccacaacccuguauaaaggaguguacgaacugcaggcgcucgagcugaacauggaaacacuuaauaugaccaugccucugucuuguacaaagaacaauagccaucacuauauccgggucggcaacgagaccgggcucgagcugacgcuuaccaauacaucccugaucaaccauaaauuuugcaaucucucugacgcucacaagaaaaaccuguacgaucaugcccugaugagcauuaucuccaccuuccaccucucuauuccgaauuuuaaccaguaugaagccaugagcugugacuucaaugauggaaagaucuccgugcaguacaaccugagccacacauaugcuggcgacaccgccaaucauugcggcacgguugcuaacggggugcuucaaacauuuaugcgcauggccuggggaggcucuuacauugcgcuggauuccgggagaggaggcugggacuguaucaugaccagcuaccaguaucucauuauccagaacacaaccugggaggaucacugccaguucucucggcccuccccuaucggguaccugggacuucugagccaacgcaccagagacauuuauaucucucggcgccuccugggcacauuuacguggacccuguccgauagcgaaggcaaggacacacccgggggauacugucucaccagauggaugcugauugaggccgagcuuaaaugcuucggcaauacagcugucgccaaguguaacgaaaaacaugaugaggaauuuugcgacaugcugcgccucuucgauuuuaauaagcaggcuauccagcggcugaaagccccugcgcagauguccauucaacuuaucaacaaggccgugaaugcucugaucaacgaccagcucauuaugaagaaucaccugagagacaucauggggauucccuauugcaacuacucuaaauauuguuaccugaaucacaccgugacgggaaagacaagccucccuaaaugcugucuggucuccaacggcagcuaccuuaaugagacccauuucucugaugacaucgaacagcaagccgauaacaugauuaccgagaugcugcagaaggaguauauggaacggcaggggaaaacaccgcucggacugguugaccuguucguguuuuccaccagcuucuaccuuaucucuaucuuucuccaccuggugaagauucccacacaucgccacgucgugggcaaaccuugccccaagccucauagacugaaucacaugggcaucuguagcugcggguucuauaagcagcccggaguuccggugcgguggaaacgcuga

SEQ ID NO: 31588 - RNA, 1476 nt, Artificial Sequence
  derived and/or modified CDS sequence (opt5) from LASV(Z0947-SLE-2011;Clade IV)__AIT17840__GPCmut7
augggccagaucgugaccuucuuucaagaggucccccacguuauugaagaggugaugaacaucgugcugauugcccucagcauccuggcuguccuuaaggggcuguacaauuucgccacaugcggacucgugggccugguuacguuucuucugcucugugggagauccugcaccauuucucuguauaaaggaguguacgaacugcagacacucgagcugaacauggaaacccuuaauaugacaaugccucugagcuguaccaagaacaauucccaucacuauaucauggucggcaacgagacagggcucgagcugacccuuacgaauaccucuaucauuaaccauaaauucugcaaucugagcgacgcgcacaagaaaaaccucuacgaucaugcucugauguccaucauuucuacauuucaccugagcaucccgaauuucaaccaguaugaagccauguccugugacuuuaauggaggcaagauuagcgugcaguacaaccucucucacuccuaugccggcgaugcugccaaucauugcgggaccguugcuaacggagugcugcaaacauucaugcggauggccuggggcgggagcuacaucgcgcuugacucuggacgcgauagaugggacuguauuaugaccuccuaccaguaucugaucauccagaacacgacaugggaggaucacugccaguuuagccggcccucuccuauuggcuaccucgggcugcuuucccaacgcaccagagacaucuauauuagccggcgccugcucggaacauucaccuggacccuguccgauucugaaggcaaggacacacccggcggguacugucugacgagauggaugcucaucgaggccgagcugaaaugcuuuggaaauaccgcugucgccaaguguaacgaaaaacaugaugaggaguucugcgacaugcuucggcuguuugauuucaauaagcaggcuauucagcgccucaaagccccugcgcagaugagcauccaacugaucaacaaggccgugaaugcucuuauuaacgaccagcugaucaugaagaaucaccucagagacauuaugggcauccccuauugcaacuacuccaaauauuguuaccugaaucacacaaccacagggaagaccagccugccuaaaugcugucucgugucuaacggauccuaccugaaugaaacgcauuucagcgaugacauugaacagcaagccgauaacaugaucacagagaugcuucagaaggaguauauggaacggcagggcaaaaccccgcuggggcucgucgaccuguuuguuuucucuaccagcuuuuaccugaucuccauuuuccuucaccucgugaagauccccacacaucgccacauugugggaaaaccuugccccaagccucauagacugaaucacaugggcaucuguucuugcggccuguauaagcagcccggggucccggugaaauggaagcgguga

SEQ ID NO: 31589 - RNA, 1717 nt, Artificial Sequence
  mRNA product Design a-1 (hSL-A64-N5) comprising derived and/or modified sequence from LASV(Josiah;Clade IV)__NP_694870__GPCmut7 (opt1)
aggagagucccgcagucggcguccagcggcucugcuuguucgugugugugucguugcaggccuuauucaagcuuaccaugggccagaucgugaccuucuuccaggaggucccccacgugaucgaggaggugaugaacaucguccugaucgcccucagcgugcuggccgugcugaaggggcucuacaacuucgcgaccugcggccuggucgggcuggugacguuccuccugcugugcggccgcuccugcaccaccagccucuacaaggggguguacgagcugcagacccuggagcucaacauggagacgcugaacaugaccaugccgcuguccugcaccaagaacaacagccaccacuacaucauggucggcaacgagaccggccucgagcugacgcugaccaacaccuccaucaucaaccacaaguucugcaaccucagcgacgcccacaagaagaaccuguacgaccacgcccugauguccaucaucagcaccuuccaccucuccauccccaacuucaaccaguacgaggccaugagcugcgacuucaacgggggcaagaucuccgugcaguacaaccugagccacuccuacgccggggacgcggccaaccacugcggcacgguggccaacgggguccugcagaccuucaugcggauggccuggggcggcagcuacaucgcgcucgacuccgggcgcggcaacugggacugcaucaugaccagcuaccaguaccugaucauccagaacaccacgugggaggaccacugccaguucucccggcccagccccaucggguaccugggccuccugucccagcgcacccgggacaucuacaucagccgccggcugcucggcaccuucaccuggacgcugagcgacuccgaggggaaggacaccccgggcggguacugccugacccgcuggaugcucaucgaggccgagcugaagugcuucggcaacaccgccguggccaagugcaacgagaagcacgacgaggaguucugcgacaugcugcggcuguucgacuucaacaagcaggccauccagcgccugaaggcgcccgcccagaugagcauccagcugaucaacaaggccgugaacgcccucaucaacgaccagcugaucaugaagaaccaccuccgggacaucauggggauccccuacugcaacuacuccaaguacugcuaccucaaccacacgaccaccggccgcaccagccugcccaagugcugccuggucuccaacggcagcuaccucaacgagacgcacuucuccgacgacaucgagcagcaggccgacaacaugaucaccgagaugcugcagaaggaguacauggagcggcaggggaagacgccccugggccucguggaccuguucguguucagcaccuccuucuaccugaucagcaucuuccugcaccucgucaagaucccgacccaccgccacaucguggggaaguccugccccaagccccaccggcugaaccacaugggcaucugcagcugcgggcuguacaagcagcccggcgugccggucaaguggaagcgcugaggacuagucccuguucccagagcccacuuuuuuuucuuuuuuugaaauaaaauagccugucuuucagaucucaaaggcucuuuucagagccaccaaaaaaaaaaaaaaaaaaaaaaaaaaaaaaaaaaaaaaaaaaaaaaaaaaaaaaaaaaaaaaaaagaauu

SEQ ID NO: 31590 - RNA, 1714 nt, Artificial Sequence
  mRNA product Design a-1 (hSL-A64-N5) comprising derived and/or modified sequence from LASV(LP;Clade I)__AAF86701__GPCmut7 (opt1)
aggagagucccgcagucggcguccagcggcucugcuuguucgugugugugucguugcaggccuuauucaagcuuaccaugggccagaucaucaccuucuuccaggaggugccccacgucaucgaggaggugaugaacaucgugcugaucgcccucagccugcuggccauccucaaggggcuguacaacaucgcgaccugcggcaucaucgggcuggucgccuuccucuuccugugcggcaaguccugcagccugacgcucaagggcggguacgagcugcagacccuggagcucaacauggagacccugaacaugaccaugccgcuguccugcacgaagaacagcucccaccacuacauccgcgugggcaacgagaccgggcucgagcugacccugaccaacacgagcaucaucaaccacaaguucugcaaccucuccgacgcccacaagaagaaccuguacgaccacgcccugaugagcaucaucuccaccuuccaccucagcauccccaacuucaaccaguacgaggccauguccugcgacuucaacggcgggaagaucagcgugcaguacaaccugucccacagcuacgcgggcgacgccgccgagcacugcgggaccgucgccaacggcgugcugcagaccuucaugcggauggcguggggcgggcgcuacaucgcccucgacuccggcaaggggaacugggacugcaucaugacgagcuaccaguaccugaucauccagaacaccaccugggaggaccacugccaguucucccggcccagccccaucggcuaccugggccuccugucccagcgcacccgggacaucuacaucagccgccggcugcucgggacguucaccuggacccugagcgacuccgagggcaacgagacccccgggggcuacugccugacgcgcuggaugcucaucgaggccgagcugaagugcuucgggaacaccgccguggccaagugcaacgagaagcacgacgaggaguucugcgacaugcugcggcuguucgacuucaacaagcaggcgauccgccggcugaaggcccccgcccagaugagcauccagcugaucaacaaggccgucaacgcccucaucaacgaccagcugaucaugaagaaccaccuccgcgacaucaugggcauccccuacugcaacuacuccaaguacugcuaccucaaccacaccagcuccggccggaccagccugcccaagugcugccugaucuccaacgggagcuaccucaacgagacgcaguucuccgacgacaucgagcagcaggcggacaacaugaucaccgagaugcugcagaaggaguacaucgagcgccagggcaagaccccgcuggggcucguggacaucuucaucuucagcaccuccuucuaccugaucagcaucuuccugcaccugaucaagaucccgacgcaccggcacaucgugggcaagcccugccccaagccccaccgccucaaccacaugggggucugcuccugcggccuguacaagcacccgggcgugcccaccaaguggaagcggugaggacuagucccuguucccagagcccacuuuuuuuucuuuuuuugaaauaaaauagccugucuuucagaucucaaaggcucuuuucagagccaccaaaaaaaaaaaaaaaaaaaaaaaaaaaaaaaaaaaaaaaaaaaaaaaaaaaaaaaaaaaaaaaaagaauu

SEQ ID NO: 31591 - RNA, 1714 nt, Artificial Sequence
  mRNA product Design a-1 (hSL-A64-N5) comprising derived and/or modified sequence from LASV(803213;Clade II)__AAF86703__GPCmut7 (opt1)
aggagagucccgcagucggcguccagcggcucugcuuguucgugugugugucguugcaggccuuauucaagcuuaccaugggccagaucaucaccuucuuccaggaggugccccacgucaucgaggaggugaugaacaucgugcugaucgcccucagccugcuggccauccucaaggggaucuacaacgucgcgaccugcggccuguucgggcugaucuccuuccuccugcugugcggccgcagcugcuccgugacguacaaggggguguacgagcuccagacccuggagcugaacauggccaaccucaacaugaccaugccgcugagcugcaccaagaacaacucccaccacuacaucauggucggcaacgagacgggccuggagcucacccugaccaacaccagcaucaucaaccacaaguucugcaaccuguccgacgcccacaagaagaaccucuacgaccacgcccugaugagcaucaucuccacguuccaccugagcauccccaacuucaaccaguacgaggccauguccugcgacuucaacgggggcaagaucagcgugcaguacaaccucucccacagcuucgcgguggacgccgccaaccacugcgggaccaucgccaacggcguccugcagaccuucaugcggauggcguggggcggguccuacaucgcccuggacagcggcaaggggaacugggacugcaucaugaccuccuaccaguaccucaucauccagaacacgaccugggaggaccacugccaguucagccgccccucccccaucggcuaccuggggcugcucagccagcggacccgcgacaucuacaucagccggcgccugcugggcaccuucacguggacccucuccgacagcgagggcaacgaggcccccgggggcuacugccugacccgguggaugcugaucgaggccgagcucaagugcuucgggaacaccgccguggcgaagugcaacgagaagcacgacgaggaguucugcgacaugcugcgccuguucgacuucaacaagcaggccaucaagcggcucaagacgcccgcccagauguccauccagcugaucaacaaggccgugaacgcccugaucaacgaccagcucaucaugaagaaccaccuccgcgacaucaugggcauccccuacugcaacuacagccgguacugcuaccugaaccacaccgucaccgggaagaccucccugccccgcugcugccuggugagcaacggcuccuaccugaacgagacgcacuucagcgacgacaucgagcagcaggcggacaacaugaucaccgagaugcuccagaaggaguacauggaccggcagggcaagaccccgcuggggcugguggaccucuucgucuucuccaccagcuucuaccugaucuccaucuuccugcaccuggugaagaucccgacgcaccgccacaucgugggcaagcccugccccaagccccaccggcucaaccacauggggaucugcagcugcggccuguacaagcacccggggguccccgugaaguggaagcgcugaggacuagucccuguucccagagcccacuuuuuuuucuuuuuuugaaauaaaauagccugucuuucagaucucaaaggcucuuuucagagccaccaaaaaaaaaaaaaaaaaaaaaaaaaaaaaaaaaaaaaaaaaaaaaaaaaaaaaaaaaaaaaaaaagaauu

SEQ ID NO: 31592 - RNA, 1714 nt, Artificial Sequence
  mRNA product Design a-1 (hSL-A64-N5) comprising derived and/or modified sequence from LASV(GA391;Clade III)__CAA36645__GPCmut7 (opt1)
aggagagucccgcagucggcguccagcggcucugcuuguucgugugugugucguugcaggccuuauucaagcuuaccaugggccagaucgugaccuucuuccaggaggucccccacgugaucgaggaggugaugaacaucguccugaucgcccucagcauccuggccauccugaaggggcucuacaacguggcgaccugcggccugaucgggcuggugacguuccuccugcuguccggccgcagcugcucccucaucuacaaggggaccuacgagcugcagacccuggagcucaacauggagacccugaacaugacgaugccgcugagcugcaccaagaacaacucccaccacuacauccgggucggcaacgagaccggccucgagcugacccugacgaacaccagcauccucaaccacaaguucugcaaccuguccgacgcccacaagcgcaaccuguacgaccacagccucauguccaucaucagcaccuuccaccuguccauccccaacuucaaccaguacgaggccaugagcugcgacuucaacgggggcaagaucaccgugcaguacaaccugucccacagcuucgccguggacgccgcggggcacugcggcacgcucgccaacgggguccugcagaccuucaugcggauggccuggggcggcuccuacaucgcccuggacagcgggcgcggcaacugggacugcaucaugaccuccuaccaguaccucaucauccagaacaccacgugggacgaccacugccaguucagccggcccucccccaucggguaccugggccugcucagccagcgcacccgggacaucuacaucagccgccggcugcugggcaccuucaccuggacgcucuccgacagcgaggggaacgagaccccgggcggguacugccugacccgcuggaugcugaucgaggcggagcucaagugcuucggcaacaccgccguggccaagugcaacgagaagcacgacgaggaguucugcgacaugcugcggcuguucgacuucaacaagcaggccauccgccggcucaagacgcccgcccagauguccauccagcugaucaacaaggcggugaacgcccugaucaacgaccagcucaucaugaagaaccaccuccgcgacaucauggggauccccuacugcaacuacagccgguacugcuaccugaaccacaccuccaccggcaagaccagccugccccgcugcugccugaucuccaacggcagcuaccugaacgagacgaaguucuccgacgacaucgagcagcaggccgacaacaugaucaccgagaugcuccagaaggaguacaucgaccggcaggggaagacgccccugggccuggucgaccuguucguguucagcaccuccuucuaccucaucagcaucuuccugcaccuggugaagaucccgacccaccgccacaucgucgggaagcccugccccaagccccaccggcucaaccacaugggcaucugcuccugcgggcuguacaagcagccgggcgugcccgugcgcuggaagcggugaggacuagucccuguucccagagcccacuuuuuuuucuuuuuuugaaauaaaauagccugucuuucagaucucaaaggcucuuuucagagccaccaaaaaaaaaaaaaaaaaaaaaaaaaaaaaaaaaaaaaaaaaaaaaaaaaaaaaaaaaaaaaaaaagaauu

SEQ ID NO: 31593 - RNA, 1717 nt, Artificial Sequence
  mRNA product Design a-1 (hSL-A64-N5) comprising derived and/or modified sequence from LASV(AV;Clade V)__CCA30314__GPCmut7 (opt1)
aggagagucccgcagucggcguccagcggcucugcuuguucgugugugugucguugcaggccuuauucaagcuuaccaugggccagaucgugaccuucuuccaggaggucccccacgugaucgaggaggugaugaacaucguccugaucgcccucagcauccuggccgugcugaaggggcucuacaacaucgcgaccugcggccugaucgggcugaucacguuccuccugcugugcggccgcuccugcagcuccaaccucuacaaggggguguacgagcugcagagccuggaccucaacauggagacccugaacaugaccaugccgcuguccugcaccaagaacaacagccaccacuacauccgggucggcaacgacacgggccucgagcugacccugaccaacaccuccauccucaaccacaaguucugcaaccugagcgacgcccacaagaaggaccuguacgaccacgcccucauguccaucaucagcacguuccaccuguccauccccaacuucaaccaguacgaggccaugagcugcgacuucaacgggggcaagaucuccgugcaguacaaccugagccacuccuacgccaucgacgcggccaaccacugcgggaccguggccaacggcauccuccagaccuucaugcgcauggccuggggcgggagcuacaucgcgcuggacuccggccgggggaacugggacugcaucaugaccagcuaccaguaccugaucauccagaacacgaccugggagaaccacugccaguucucccgccccagccccaucggcuaccucgggcugcugagccagcggacccgcgacaucuacaucucccggcgccuccugggcaccuucacguggacccugagcgacuccgagggcaacgccacccccgggggcuacugccucacccgguggaugcugaucgaggccgagcugaagugcuucgggaacacggccgucgccaagugcaacgagaagcacgacgaggaguucugcgacaugcuccgccuguucgacuucaacaagcaggcgaucagccggcugaagucccccgcccagaugagcauccagcucaucaacaaggccgugaacgcccugaucaacgaccagcugaucaugaagaaccaccuccgcgacaucaugggcauccccuacugcaacuacuccaaguacugcuaccugaaccacaccaucaccgggaagaccagccugcccaagugcugccucguguccaacggcagcuaccugaacgagacgcacuucuccgacgacaucgagcagcaggccgacaacaugaucaccgagaugcugcagaaggaguacauggagcggcagggcaagaccccgcucgggcuggucgaccuguucguguucagcaccuccuucuaccugaucagcaucuuccuccgccuggugaagaucccgacgcaccggcacaucgucggcaagcccugccccaagccccaccgccugaaccacauggggaucugcuccugcggccucuacaagcagccgggggugcccgugcgguggaagcgcugaggacuagucccuguucccagagcccacuuuuuuuucuuuuuuugaaauaaaauagccugucuuucagaucucaaaggcucuuuucagagccaccaaaaaaaaaaaaaaaaaaaaaaaaaaaaaaaaaaaaaaaaaaaaaaaaaaaaaaaaaaaaaaaaagaauu

SEQ ID NO: 31594 - RNA, 1714 nt, Artificial Sequence
  mRNA product Design a-1 (hSL-A64-N5) comprising derived and/or modified sequence from LASV(Togo/2016/7082;Clade VI)__AMR44577__GPCmut7 (opt1)
aggagagucccgcagucggcguccagcggcucugcuuguucgugugugugucguugcaggccuuauucaagcuuaccaugggccagaucaucaccuucuuccaggaggugccccacgucaucgaggaggugaugaacaucgugcugaucgcccucagccugcuggccauccucaagggggucuacaacguggcgaccugcggcaucaucgggcuggugacguuccuguuccucugcggccgcuccugcagccugaucuacaagggguccuacgagcugcagacccucgagcugaacauggagacccugaacaugaccaugccgcucagcugcacgaagaacuccagccaccacuacauccgggucggcaacgagaccggccuggagcugacccucaccaacacguccaucaucaaccacaaguucugcaaccugagcgacgcccacaagcgcaaccuguacgaccacgcccucauguccauccugagcaccuuccaccuguccauccccaacuucaaccaguacgaggccaugagcugcgacuucaacgggggcaagaucuccgugcaguacaaccucagccacgccuacgcgguggacgccgccgagcacugcgggaccgucgccaacggcgugcugcagaccuucaugcggauggcguggggcggguccuacaucgcccuggacagcggccgcgggaacugggacugcaucaugacguccuaccaguaccucaucauccagaacaccaccugggaggaccacugccaguucagccggcccucccccaucggcuaccuggggcugcucagccagcgcacccgggacaucuacaucagccgccggcugcugggcacguucaccuggacccucuccgacagcgagggcaacgagacccccgggggcuacugccugacgcgcuggaugcugaucgaggccgagcucaagugcuucgggaacaccgccguggccaagugcaacgagaagcacgacgaggaguucugcgacaugcugcggcuguucgacuucaacaagcaggcgauccagcgccucaagucccccgcccagaugagcauccagcugaucaacaaggccgucaacgcccugaucaacgaccagcucaucaugaagaaccaccuccgggacaugaugggcauccccuacugcaacuacuccaaguacugcuaccugaaccacaccagcuccgggcgcaccagccugcccaagugcugccugguguccaacggcagcuaccugaacgagacgcacuucuccgacgacaucgagcagcaggccgacaacaugaucaccgagaugcuccagaaggaguacaucgaccggcagggcaagaccccgcuggggcugguggaccucuucgucuucagcaccuccuucuaccugaucagcaucuuccugcaccugaucaagaucccgacgcaccgccacaucgugggcaagcccugccccaagccccaccggcucaaccacauggggaucugcuccugcggccuguacaagcagccgggggugcccacccgcuggaagcggugaggacuagucccuguucccagagcccacuuuuuuuucuuuuuuugaaauaaaauagccugucuuucagaucucaaaggcucuuuucagagccaccaaaaaaaaaaaaaaaaaaaaaaaaaaaaaaaaaaaaaaaaaaaaaaaaaaaaaaaaaaaaaaaaagaauu

SEQ ID NO: 31595 - RNA, 1714 nt, Artificial Sequence
  mRNA product Design a-1 (hSL-A64-N5) comprising derived and/or modified sequence from LASV(KAK-428;Clade n.d. (VII))__ANH09740__GPCmut7 (opt1)
aggagagucccgcagucggcguccagcggcucugcuuguucgugugugugucguugcaggccuuauucaagcuuaccaugggccagaucgugaccuucuuccaggaggucccccacgugaucgaggaggugaugaacaucguccugaucgcccucagccugcuggccauccucaaggggcuguacaacuucgcgaccugcggcgugaucgggcugaucacguuccuccugcugugcggccgcuccugcagcgccaccuacaaggggcaguacgagcuccagacccuggagcugaacauggagucccucaacaugaccaugccgcugagcugcacgaagaacaacucccaccacuacauccgggccggcaacaacaccggccuggagcucacccugaccaacacgagcaucaucucccacaaguucugcaaccugagcgacgcccacaagaagaaccucuacgaccacacccugauguccaucaucaccaccuuccaccugagcauccccaacuucaaccaguacgaggccauguccugcgacuucaacgggggcaagaucagcauccaguacaaccucucccacagcuacgcgggggacgccgcccagcacugcggcacgguggccaacgggguccugcagaccuucaugcgcauggcguggggcggcuccuaccuggcccucgacagcgggcggcgcggcugggacugcaucaucuccagcuaccaguaccugaucauccagaacaccaccugggacgaccacugccaguucucccggcccagccccaucggguaccugggcuucgugagccagaagacgcgcgacaucuacaucucccggcgccuccugggcaccuucaccuggacccugagcgacuccgaggggcacgacaugccgggcggguacugccucacgcgguggaugcugaucgaggccgaccugaagugcuucggcaacaccgccguggccaagugcaacgagaagcacgacgaggaguucugcgacauguggcgccucuucgacuucaacaagcaggcgauccagcggcugaaggcccccgcccagaugaacauccagcugaucaacaaggccgucaacgcccucaucaacgaccagcugaugaugaagaaccaccuccgcgacaucauggggauccccuacugcaacuacagcaaguucugcuaccugaacaacaccaccacgggccggaccucccugccccgcugcugccugaucagcaacggcuccuaccucaacgagacccacuucagcgacgacaucgagcagcaggcggacaacaugaucaccgagaugcugcagaaggaguacauggaccggcaggggaagacgccccugggccucguggaccuguucguguucuccaccagcuucuaccugaucaccaucuuccuccaccuggucaagaucccgacccaccgccacaucguggggaagcccugccccaagccccaccggcugaaccacaugggcaucugcuccugcgggcuguacaagcagccgggcgugcccguccgcuggaagcggugaggacuagucccuguucccagagcccacuuuuuuuucuuuuuuugaaauaaaauagccugucuuucagaucucaaaggcucuuuucagagccaccaaaaaaaaaaaaaaaaaaaaaaaaaaaaaaaaaaaaaaaaaaaaaaaaaaaaaaaaaaaaaaaaagaauu

SEQ ID NO: 31596 - RNA, 1714 nt, Artificial Sequence; identical to SEQ ID NO: 31590
  mRNA product Design a-1 (hSL-A64-N5) comprising derived and/or modified sequence from LASV(Pinneo-NIG-1969;Clade I)__AIT17836__GPCmut7 (opt1)

SEQ ID NO: 31597 - RNA, 1714 nt, Artificial Sequence
  mRNA product Design a-1 (hSL-A64-N5) comprising derived and/or modified sequence from LASV(ISTH0009-NIG-2011;Clade II)__AIT17404__GPCmut7 (opt1)
aggagagucccgcagucggcguccagcggcucugcuuguucgugugugugucguugcaggccuuauucaagcuuaccaugggccagaucaucaccuucuuccaggaggugccccacgucaucgaggaggugaugaacaucgugcugaucgcccucagccugcuggccauccucaaggggaucuacaacgucgcgaccugcggccuguucgggcugguguccuuccuccugcugugcggccgcagcugcuccacgaccuacaaggggguguacgagcuccagacccuggagcuggacauggccagccucaacaugaccaugccgcuguccugcacgaagaacaacagccaccacuacaucauggucggcaacgagaccggccuggagcucacccugaccaacacguccaucaucaaccacaaguucugcaaccugagcgacgcccacaagaagaaccucuacgaccacgcccugauguccaucaucagcaccuuccaccuguccauccccaacuucaaccaguacgaggccaugagcugcgacuucaacgggggcaagaucuccgugcaguacaaccucagccacgcguacgccguggacgccgccaaccacugcgggaccaucgcgaacggcguccugcagaccuucaugcggauggccuggggcggguccuacaucgcccuggacagcggcaagggguccugggacugcaucaugacgagcuaccaguaccucaucauccagaacaccaccugggaggaccacugccaguucucccgccccagccccaucggcuaccuggggcugcucagccagcggacccgcgacaucuacaucucccggcgccugcugggcacguucaccuggacccucagcgacuccgagggcaacgagacccccgggggcuacugccugacgcgguggaugcugaucgaggccgagcucaagugcuucgggaacaccgccguggcgaagugcaacgagaagcacgacgaggaguucugcgacaugcugcgccuguucgacuucaacaagcaggccauccggcgccucaagacccccgcccagaugagcauccagcugaucaacaaggccgugaacgcccugaucaacgaccagcucaucaugaagaaccaccuccgggacaucaugggcaucccguacugcaacuacuccaaguacugcuaccugaaccacaccgucacggggaagaccagccugccccgcugcugccugguguccaacggcagcuaccugaacgagacccacuucuccgacgacaucgagcagcaggcggacaacaugaucaccgagcuccugcagaaggaguacauggaccggcagggcaagacgccccuggggcucguggaccuguucgucuucagcaccuccuucuaccugaucagcaucuuccugcaccucaucaagaucccgacccaccgccacaucaccggcaagcccugccccaagccccaccggcugaaccacauggggaucugcuccugcggccuguacaagcacccgggggugcccgugaaguggaagcgcugaggacuagucccuguucccagagcccacuuuuuuuucuuuuuuugaaauaaaauagccugucuuucagaucucaaaggcucuuuucagagccaccaaaaaaaaaaaaaaaaaaaaaaaaaaaaaaaaaaaaaaaaaaaaaaaaaaaaaaaaaaaaaaaaagaauu

SEQ ID NO: 31598 - RNA, 1714 nt, Artificial Sequence
  mRNA product Design a-1 (hSL-A64-N5) comprising derived and/or modified sequence from LASV(ISTH2010-NIG-2012;Clade II)__AIT17482__GPCmut7 (opt1)
aggagagucccgcagucggcguccagcggcucugcuuguucgugugugugucguugcaggccuuauucaagcuuaccaugggccagaucaucaccuucuuccaggaggugccccacgucaucgaggaggugaugaacaucgugcugaucgcccucagccugcuggccauccucaaggggaucuacaacgucgcgaccugcggccuguucgggcugguguccuuccuccugcugugcggccgcagcugcuccacgaccuacaaggggguguacgagcuccagacccuggagcuggacauggccagccucaacaugaccaugccgcuguccugcacgaagaacaacagccaccacuacaucauggucggcaacgagaccggccuggagcucacccugaccaacacguccaucaucaaccacaaguucugcaaccugagcgacgcccacaagaagaaccucuacgaccacgcccugauguccaucaucagcaccuuccaccuguccauccccaacuucaaccaguacgaggccaugagcugcgacuucaacgggggcaagaucuccgugcaguacaaccucagccacgcguacgccguggacgccgccaaccacugcgggaccaucgcgaacggcguccugcagaccuucaugcggauggccuggggcggguccuacaucgcccuggacagcggcaagggguccugggacugcaucaugacgagcuaccaguaccucaucauccagaacaucaccugggaggaccacugccaguucucccgccccagccccaucggcuaccuggggcugcucagccagcggacccgcgacaucuacaucucccggcgccugcugggcaccuucacguggacccucagcgacuccgagggcaacgagacccccgggggcuacugccugacccgguggaugcugaucgaggccgagcucaagugcuucgggaacacggccguggcgaagugcaacgagaagcacgacgaggaguucugcgacaugcugcgccuguucgacuucaacaagcaggccauccggcgccucaagacccccgcccagaugagcauccagcugaucaacaaggccgugaacgcccugaucaacgaccagcucaucaugaagaaccaccuccgggacaucaugggcauccccuacugcaacuacuccaaguacugcuaccugaaccacaccgucaccgggaagacgagccugccccgcugcugccugguguccaacggcagcuaccugaacgagacccacuucuccgacgacaucgagcagcaggcggacaacaugaucaccgagcuccugcagaaggaguacaucgaccggcagggcaagaccccgcuggggcucguggaccuguucgucuucagcacguccuucuaccugaucagcaucuuccugcaccucgugaagaucccgacccaccgccacguggucggcaagcccugccccaagccccaccggcugaaccacauggggaucugcuccugcggccuguacaagcacccgggggugcccgugaaguggaagcgcugaggacuagucccuguucccagagcccacuuuuuuuucuuuuuuugaaauaaaauagccugucuuucagaucucaaaggcucuuuucagagccaccaaaaaaaaaaaaaaaaaaaaaaaaaaaaaaaaaaaaaaaaaaaaaaaaaaaaaaaaaaaaaaaaagaauu

SEQ ID NO: 31599 - RNA, 1714 nt, Artificial Sequence
  mRNA product Design a-1 (hSL-A64-N5) comprising derived and/or modified sequence from LASV(Lassa virus/H.sapiens-wt/NGA/2015/ISTH_0543;Clade II)__AVO03639__GPCmut7 (opt1)
aggagagucccgcagucggcguccagcggcucugcuuguucgugugugugucguugcaggccuuauucaagcuuaccaugggccagaucaucaccuucuuccaggaggugccccacgucaucgaggaggugaugaacaucgugcugaucgcccucagccugcuggccauccucaaggggaucuacaacgucgcgaccugcggccuguucgggcugguguccuuccuccugcugugcggccgcagcugcuccacgaccuacaaggggguguacgagcuccagacccuggagcuggacauggccaaccucaacaugaccaugccgcugagcugcacgaagaacaacucccaccacuacaucauggucggcaacgagaccggccuggagcucacccugaccaacacgagcaucaucaaccacaaguucugcaaccuguccgacgcccacaagaagaaccucuacgaccacgcccugaugagcaucaucuccaccuuccaccugagcauccccaacuucaaccaguacgaggccauguccugcgacuucaacgggggcaagaucagcgugcaguacaaccucucccacaccuacgcgguggacgccgccaaccacugcgggaccaucgccaacggcguccugcagacguucaugcggauggcguggggcgggagcuacaucgcccuggacuccggcaaggggagcugggacugcaucaugaccuccuaccaguaccucgugauccagaacaccaccugggaggaccacugccaguucagccgccccucccccaucggcuaccuggggcugcucagccagcggacgcgcgacaucuacaucagccggcgccugcugggcaccuucaccuggacccucuccgacagcgagggcaacgagacgcccgggggcuacugccugacccgguggaugcugaucgaggccgagcucaagugcuucgggaacaccgccguggccaagugcaacgagaagcacgacgaggaguucugcgacaugcugcgccuguucgacuucaacaagcaggcgauccggcgccucaagacccccgcccagauguccauccagcugaucaacaaggccgucaacgcccugaucaacgaccagcucaucaugaagaaccaccuccgggacaucaugggcauccccuacugcaacuacagcaaguacugcuaccugaaccacacggugaccgggaagaccucccugccccgcugcugccuggugagcaacggcuccuaccugaacgagacccacuucagcgacgacaucgagcagcaggccgacaacaugaucacggagcuccugcagaaggaguacaucgaccggcagggcaagaccccgcuggggcucgucgaccuguucguguucuccaccagcuucuaccugaucuccaucuuccugcaccucgugaagaucccgacccaccgccacaucacgggcaagcccugccccaagccccaccggcugaaccacauggggaucugcagcugcggccuguacaagcacccggggguccccgugaaguggaagcgcugaggacuagucccuguucccagagcccacuuuuuuuucuuuuuuugaaauaaaauagccugucuuucagaucucaaaggcucuuuucagagccaccaaaaaaaaaaaaaaaaaaaaaaaaaaaaaaaaaaaaaaaaaaaaaaaaaaaaaaaaaaaaaaaaagaauu

SEQ ID NO: 31600 - RNA, 1714 nt, Artificial Sequence
  mRNA product Design a-1 (hSL-A64-N5) comprising derived and/or modified sequence from LASV(Lassa virus/H.sapiens-wt/NGA/2016/ISTH_0009;Clade II)__AVO03571__GPCmut7 (opt1)
aggagagucccgcagucggcguccagcggcucugcuuguucgugugugugucguugcaggccuuauucaagcuuaccaugggccagaucaucaccuucuuccaggaggugccccacgucaucgaggaggugaugaacaucgugcugaucgcccucagccugcuggccauccucaaggggaucuacaacgucgcgaccugcggccugcuggggcucguguccuuccugcugcucugcggccgcagcugcuccacgaccuacaaggggguguacgagcugcagacccuggagcucgacauggccagccugaacaugaccaugccgcuguccugcacgaagaacaacagccaccacuacaucauggucggcaacgagaccggccucgagcugacccugaccaacacguccaucaucaaccacaaguucugcaaccucagcgacgcccacaagaagaaccuguacgaccacgcccugauguccaucaucagcaccuuccaccucuccauccccaacuucaaccaguacgaggccaugagcugcgacuucaacgggggccggaucuccgugcaguacaaccugagccacuccuacgcgguggacgccgccaaccacugcgggaccaucgccaacggcguccugcagaccuucaugcgcauggcguggggcgggagcuacaucgcccucgacuccggcaaggggagcugggacugcaucaugacguccuaccaguaccugaucauccagaacaccaccugggaggaccacugccaguucagccggcccagccccaucggcuaccuggggcuccugucccagcgcacccgggacaucuacaucagccgccggcugcucggcacguucaccuggacccuguccgacagcgagggcaacgagacccccgggggcuacugccugacgcgcuggaugcucaucgaggccgagcugaagugcuucgggaacaccgccguggccaagugcaacgagaagcacgacgaggaguucugcgacaugcugcggcuguucgacuucaacaagcaggcgauccgccggcugaagacccccgcccagauguccauccagcugaucaacaaggccgugaacgcccucaucaacgaccagcugaucaugaagaaccaccuccgcgacaucaugggcaucccguacugcaacuacagcaaguacugcuaccucaaccacaccgucacggggaagaccucccugccccggugcugccuggugagcaacggcuccuaccucaacgagacccacuucagcgacgacaucgagcagcaggccgacaacaugaucaccgagcugcugcagaaggaguacaucgaccgccagggcaagacgccccucgggcugguggaccuguucgucuucuccaccagcuucuaccugaucuccaucuuccuccaccuggugaagaucccgacccaccggcacaucaccggcaagcccugccccaagccccaccgccugaaccacauggggaucugcagcugcggccucuacaaccacccgggggugcccgucaaguggaagcggugaggacuagucccuguucccagagcccacuuuuuuuucuuuuuuugaaauaaaauagccugucuuucagaucucaaaggcucuuuucagagccaccaaaaaaaaaaaaaaaaaaaaaaaaaaaaaaaaaaaaaaaaaaaaaaaaaaaaaaaaaaaaaaaaagaauu

SEQ ID NO: 31601 - RNA, 1714 nt, Artificial Sequence
  mRNA product Design a-1 (hSL-A64-N5) comprising derived and/or modified sequence from LASV(Lassa virus/H.sapiens-wt/NGA/2016/ISTH_0017;Clade II)__AVO03567__GPCmut7 (opt1)
aggagagucccgcagucggcguccagcggcucugcuuguucgugugugugucguugcaggccuuauucaagcuuaccaugggccagaucaucaccuucuuccaggaggugccccacgucaucgaggaggugaugaacaucgugcugaucgcccucagccugcuggccauccucaaggggaucuacaacgucgcgaccugcggccuguucgggcugguguccuuccuccugcugugcggccgcagcugcuccacgaccuacaaggggguguacgagcuccagacccuggagcuggacauggccagccucaacaugaccaugccgcuguccugcacgaagaacaacagccaccacuacaucauggucggcaacgagaccggccuggagcucacccugaccaacacguccaucaucaaccacaaguucugcaaccugagcgacgcccacaagaagaaccucuacgaccacgcccugauguccaucaucagcaccuuccaccuguccauccccaacuucaaccaguacgaggccaugagcugcgacuucaacgggggcaagaucuccgugcaguacaaccucagccacaccuacgcgaucgacgccgccaaccacugcgggaccaucgccaacggcgugcugcagacguucaugcggauggcguggggcggguccuacaucgcccuggacagcggcaagggguccugggacugcaucaugaccagcuaccaguaccucaucauccagaacaccaccugggaggaccacugccaguucucccgccccagccccaucggcuaccuggggcugcucagccagcggacgcgcgacaucuacaucucccggcgccugcugggcaccuucaccuggacccucagcgacuccgagggcaacgagacgcccgggggcuacugccugacccgguggaugcugaucgaggccgagcucaagugcuucgggaacaccgccgucgccaagugcaacgagaagcacgacgaggaguucugcgacaugcugcgccuguucgacuucaacaagcaggcgauccggcgccucaagacccccgcccagaugagcauccagcugaucaacaaggccgugaacgcccugaucaacgaccagcucaucaugaagaaccaccuccgggacaucaugggcauccccuacugcaacuacuccaaguacugcuaccugaaccacacggugaccgggaagaccagccugccccgcugcugccuggucuccaacggcagcuaccugaacgagacccacuucuccgacgacaucgagcagcaggccgacaacaugaucacggagcuccugcagaaggaguacauggaccggcagggcaagaccccgcuggggcucguggaccuguucguguucagcaccuccuucuaccugaucagcaucuuccugcaccucguccgcaucccgacccaccggcacgugaucggcaagcccugccccaagccccaccgccugaaccacauggggaucugcuccugcggccuguacaagcacccgggggugcccgucaaguggaagcggugaggacuagucccuguucccagagcccacuuuuuuuucuuuuuuugaaauaaaauagccugucuuucagaucucaaaggcucuuuucagagccaccaaaaaaaaaaaaaaaaaaaaaaaaaaaaaaaaaaaaaaaaaaaaaaaaaaaaaaaaaaaaaaaaagaauu

SEQ ID NO: 31602 - RNA, 1714 nt, Artificial Sequence
  mRNA product Design a-1 (hSL-A64-N5) comprising derived and/or modified sequence from LASV(Lassa virus/H.sapiens-wt/NGA/2018/ISTH_0959;Clade II)__AVV65099__GPCmut7 (opt1)
aggagagucccgcagucggcguccagcggcucugcuuguucgugugugugucguugcaggccuuauucaagcuuaccaugggccagaucaucaccuucuuccaggaggugccccacgucaucgaggaggugaugaacaucgugcugaucgcccucagccugcuggccauccucaaggggaucuacaacgucgugaccugcggccuguucgggcugguguccuuccuccugcugugcggccgcagcugcuccacgaccuacaagggggucuacgagcuccagacccuggagcuggacauggcgagccucaacaugaccaugccgcuguccugcacgaagaacaacagccaccacuacaucauggugggcaacgagaccggccuggagcucacccugaccaacacguccaucaucaaccacaaguucugcaaccugagcgacgcccacaagaagaaccucuacgaccacgcccugauguccaucaucagcaccuuccaccuguccauccccaacuucaaccaguacgaggccaugagcugcgacuucaacgggggcaagaucuccgugcaguacaaccucagccacgccuacgcgaucgacgccgccaaccacugcgggaccaucgccaacggcguccugcagaccuucaugcggauggcguggggcggguccuacaucgcccuggacagcggcaagggguccugggacugcaucaugacgagcuaccaguaccucaucauccagaacaccaccugggaggaccacugccaguucucccgccccagccccaucggcuaccuggggcugcucagccagcggacccgcgacaucuacaucucccggcgccugcugggcacguucaccuggacccucagcgacuccgagggcaacgagacccccgggggcuacugccugacgcgguggaugcugaucgaggccgagcucaagugcuucgggaacaccgccguggccaagugcaacgagaagcacgacgaggaguucugcgacaugcugcgccuguucgacuucaacaagcaggcgauccggcgccucaagacccccgcccagaugagcauccagcugaucaacaaggccgugaacgcccugaucaacgaccagcucaucaugaagaaccaccuccgggacaucaugggcaucccguacugcaacuacuccaaguacugcuaccugaaccacaccgucacggggaagaccagccugccccgcugcugccugguguccaacggcagcuaccugaacgagacccacuucuccgacgacaucgagcagcaggccgacaacaugaucaccgagcuccugcagaaggaguacaucgaccggcagggcaagacgccccuggggcucguggaccuguucgucuucagcaccuccuucuaccugaucagcaucuuccugcaccucgugaagaucccgacccaccgccacgugaucggcaagcccugccccaagccccaccggcugaaccacauggggaucugcuccugcggccuguacaagcacccggggguccccgugaaguggaagcgcugaggacuagucccuguucccagagcccacuuuuuuuucuuuuuuugaaauaaaauagccugucuuucagaucucaaaggcucuuuucagagccaccaaaaaaaaaaaaaaaaaaaaaaaaaaaaaaaaaaaaaaaaaaaaaaaaaaaaaaaaaaaaaaaaagaauu

SEQ ID NO: 31603 - RNA, 1714 nt, Artificial Sequence
  mRNA product Design a-1 (hSL-A64-N5) comprising derived and/or modified sequence from LASV(LASV003-NIG-2008;Clade II)__AIT17580__GPCmut7 (opt1)
aggagagucccgcagucggcguccagcggcucugcuuguucgugugugugucguugcaggccuuauucaagcuuaccaugggccagaucaucaccuucuuccaggaggugccccacgucaucgaggaggugaugaacaucgugcugaucgcccucagccugcuggccauccucaaggggaucuacaacgucgcgaccugcggccuguucgggcugguguccuuccuccugcugugcggccgcagcugcuccacgaccuacaaggggguguacgagcuccagacccuggagcuggacauggccagccucaacaugaccaugccgcuguccugcacgaagaacaacagccaccacuacaucauggucggcaacgagaccggccuggagcucacccugaccaacacguccaucaucaaccacaaguucugcaaccugagcgacgcccacaagaagaaccucuacgaccacgcccugauguccaucaucagcaccuuccaccuguccauccccaacuucaaccaguacgaggccaugagcugcgacuucaacgggggcaagaucuccgugcaguacaaccucagccacaccuacgcgguggacgccgccaaccacugcgggaccaucgccaacggcguccugcagacguucaugcggauggcguggggcggguccuacaucgcccuggacagcggcaagggguccugggacugcaucaugaccagcuaccaguaccucaucauccagaacaccaccugggaggaccacugccaguucucccgccccagccccaucggcuaccuggggcugcucagccagcggacgcgcgacaucuacaucucccggcgccugcugggcaccuucaccuggacccucagcgacuccgagagcaacgagacgccgggcggguacugccugacccgguggaugcugaucgaggccgagcucaagugcuucggcaacaccgccguggccaagugcaacgagaagcacgacgaggaguucugcgacaugcugcgccuguucgacuucaacaagcaggcgauccggcgccucaaggcccccgcccagauguccauccagcugaucaacaaggccgugaacgcccugaucaacgaccagcucaucaugaagaaccaccuccgggacaucauggggauccccuacugcaacuacagcaaguacugcuaccugaaccacaccgucacgggccgcaccucccugccccggugcugccuggugagcaacggguccuaccugaacgagacccacuucagcgacgacaucgagcagcaggcggacaacaugaucaccgagcuccugcagaaggaguacauggaccgccagggcaagacgccccugggccucguggaccuguucgucuucuccaccagcuucuaccugaucuccaucuuccugcaccucgugaagaucccgacccaccggcacgugaucgggaagcccugccccaagccccaccgccugaaccacaugggcaucugcagcugcgggcuguacaagcacccgggcguccccgugaaguggaagcggugaggacuagucccuguucccagagcccacuuuuuuuucuuuuuuugaaauaaaauagccugucuuucagaucucaaaggcucuuuucagagccaccaaaaaaaaaaaaaaaaaaaaaaaaaaaaaaaaaaaaaaaaaaaaaaaaaaaaaaaaaaaaaaaaagaauu

SEQ ID NO: 31604 - RNA, 1714 nt, Artificial Sequence
  mRNA product Design a-1 (hSL-A64-N5) comprising derived and/or modified sequence from LASV(LASV035-NIG-2009;Clade II)__AIT17588__GPCmut7 (opt1)
aggagagucccgcagucggcguccagcggcucugcuuguucgugugugugucguugcaggccuuauucaagcuuaccaugggccagaucaucaccuucuuccaggaggugccccacgucaucgaggaggugaugaacaucgugcugaucgcccucagccugcuggccauccucaaggggaucuacaacgucgcgaccugcggccuguucgggcugguguccuuccuccugcugugcggccgcagcugcuccacgaccuacaaggggguguacgagcuccagacccuggagcuggacauggccagccucaacaugaccaugccgcuguccugcacgaagaacaacagccaccacuacaucauggucggcaacgagaccggccuggagcucacccugaccaacacguccaucaucaaccacaaguucugcaaccugagcgacgcccacaagaagaaccucuacgaccacgcccugauguccaucaucagcaccuuccaccuguccauccccaacuucaaccaguacgaggccaugagcugcgacuucaacgggggcaagaucuccgugcaguacaaccucagccacgcguacgccguggacgccgccaaccacugcgggaccaucgcgaacggcguccugcagaccuucaugcggauggccuggggcggguccuacaucgcccuggacagcggcaagggguccugggacugcaucaugacgagcuaccaguaccucaucauccagaacaccaccugggaggaccacugccaguucucccgccccagccccaucggcuaccuggggcugcucagccagcggacccgcgacaucuacaucucccggcgccugcugggcacguucaccuggacccucagcgacuccgagggcaacgagacccccgggggcuacugccugacgcgguggaugcugaucgaggccgagcucaagugcuucgggaacaccgccguggcgaagugcaacgagaagcacgacgaggaguucugcgacaugcugcgccuguucgacuucaacaagcaggccauccggcgccucaaggcccccgcccagaugagcauccagcugaucaacaaggccgugaacgcgcugaucaacgaccagcucaucaugaagaaccaccuccgggacaucaugggcauccccuacugcaacuacuccaaguacugcuaccugaaccacaccgucaccgggaagacgagccugccccgcugcugccugguguccaacggcagcuaccugaacgagacccacuucuccgacgacaucgagcagcaggccgacaacaugaucaccgagcuccugcagaaggaguacaucgaccggcagggcaagaccccgcuggggcucguggaccuguucgucuucagcacguccuucuaccugaucagcaucuuccugcaccucgugaagaucccgacccaccgccacgugaucggcaagcccugccccaagccccaccggcugaaccacauggggaucugcuccugcggccuguacaagcacccggggguccccgugaaguggaagcgcugaggacuagucccuguucccagagcccacuuuuuuuucuuuuuuugaaauaaaauagccugucuuucagaucucaaaggcucuuuucagagccaccaaaaaaaaaaaaaaaaaaaaaaaaaaaaaaaaaaaaaaaaaaaaaaaaaaaaaaaaaaaaaaaaagaauu

SEQ ID NO: 31605 - RNA, 1714 nt, Artificial Sequence
  mRNA product Design a-1 (hSL-A64-N5) comprising derived and/or modified sequence from LASV(LASV1000-NIG-2009;Clade II)__AIT17782__GPCmut7 (opt1)
aggagagucccgcagucggcguccagcggcucugcuuguucgugugugugucguugcaggccuuauucaagcuuaccaugggccagaucaucaccuucuuccaggaggugccccacgucaucgaggaggugaugaacaucgugcugaucgcccucagccugcuggccauccucaaggggaucuacaacgucgcgaccugcggccuguucgggcugguguccuuccuccugcugugcggccgcagcugcuccacgaccuacaaggggguguacgagcuccagacccuggagcuggacauggccagccucaacaugaccaugccgcuguccugcacgaagaacaacagccaccacuacaucauggucggcaacgagaccggccuggagcucacccugaccaacacguccaucaucaaccacaaguucugcaaccugagcgacgcccacaagaagaaccucuacgaccacgcccugauguccaucaucagcaccuuccaccuguccauccccaacuucaaccaguacgaggccaugagcugcgacuucaacgggggcaagaucuccgugcaguacaaccucagccacaccuacgcgguggacgccgccaaccacugcgggaccaucgccaacggcguccugcagacguucaugcggauggcguggggcggguccuacaucgcccuggacagcggcaagggguccugggacugcaucaugaccagcuaccaguaccucaucauccagaacaccaccugggaggaccacugccaguucucccgccccagccccaucggcuaccuggggcugcucagccagcggacgcgcgacaucuacaucucccggcgccugcugggcaccuucaccuggacccucagcgacuccgagggcaacgagacgcccgggggcuacugccugacccgguggaugcugaucgaggccgagcucaagugcuucgggaacaccgccguggccaagugcaacgagaagcacgacgaggaguucugcgacaugcugcgccuguucgacuucaacaagcaggcgaucaagcggcucaagacccccgcccagaugagcauccagcugaucaacaaggccgugaacgcccugaucaacgaccagcucaucaugaagaaccaccuccgcgacaucaugggcauccccuacugcaacuacuccaaguacugcuaccugaaccacacggucaccgggaagaccagccugccccggugcugccugguguccaacggcagcuaccugaacgagacccacuucuccgacgacaucgagcagcaggccgacaacaugaucacggagcuccugcagaaggaguacaucgaccgccagggcaagaccccgcuggggcucguggaccuguucgucuucagcaccuccuucuaccugaucagcaucuuccugcaccucgugaagaucccgacccaccggcacguggucggcaagcccugccccaagccccaccgccugaaccacauggggaucugcuccugcggccuguacaagcacccgggggugcccgugaaguggaagcggugaggacuagucccuguucccagagcccacuuuuuuuucuuuuuuugaaauaaaauagccugucuuucagaucucaaaggcucuuuucagagccaccaaaaaaaaaaaaaaaaaaaaaaaaaaaaaaaaaaaaaaaaaaaaaaaaaaaaaaaaaaaaaaaaagaauu

SEQ ID NO: 31606 - RNA, 1714 nt, Artificial Sequence
  mRNA product Design a-1 (hSL-A64-N5) comprising derived and/or modified sequence from LASV(LASV221-NIG-2010;Clade II)__AIT17624__GPCmut7 (opt1)
aggagagucccgcagucggcguccagcggcucugcuuguucgugugugugucguugcaggccuuauucaagcuuaccaugggccagaucaucaccuucuuccaggaggugccccacgucaucgaggaggugaugaacaucgugcugaucgcccucagccugcuggccauccucaaggggaucuacaacgucgcgaccugcggccuguucgggcugguguccuuccuccugcugugcggccgcagcugcuccacgaccuacaaggggguguacgagcuccagacccuggagcuggacauggccagccucaacaugaccaugccgcuguccugcacgaagaacaacagccaccacuacaucauggucggcaacgagaccggccuggagcucacccugaccaacacguccaucaucaaccacaaguucugcaaccugagcgacgcccacaagaagaaccucuacgaccacgcccugauguccaucaucagcaccuuccaccuguccauccccaacuucaaccaguacgaggccaugagcugcgacuucaacgggggcaagaucuccgugcaguacaaccucagccacaccuacgcgaucgacgccgccaaccacugcgggaccaucgccaacggcgugcugcagacguucaugcggauggcguggggcggguccuacaucgcccuggacagcggcaagggguccugggacugcaucaugaccagcuaccaguaccucaucauccagaacaccaccugggaggaccacugccaguucucccgccccagccccaucggcuaccuggggcugcucagccagcggacgcgcgacaucuacaucucccggcgccugcugggcaccuucaccuggacccucagcgacuccgagggcaacgagacgcccgggggcuacugccugacccgguggaugcugaucgaggccgagcucaagugcuucgggaacaccgccgucgccaagugcaacgagaagcacgacgaggaguucugcgacaugcugcgccuguucgacuucaacaagcaggcgauccggcgccucaagacccccgcccagaugagcauccagcugaucaacaaggccgugaacgcccugaucaacgaccagcucaucaugaagaaccaccuccgggacaucaugggcauccccuacugcaacuacuccaaguacugcuaccugaaccacacggugaccgggaagaccagccugccccgcugcugccuggucuccaacggcagcuaccugaacgagacccacuucuccgacgacaucgagcagcaggccgacaacaugaucacggagaugcuccagaaggaguacauggaccggcagggcaagaccccgcuggggcugguggaccucuucguguucagcaccuccuucuaccugaucagcaucuuccugcaccuggucaagaucccgacccaccgccacgugaucggcaagcccugccccaagccccaccggcucaaccacauggggaucugcuccugcggccuguacaagcacccgggggugcccgucaaguggaagcgcugaggacuagucccuguucccagagcccacuuuuuuuucuuuuuuugaaauaaaauagccugucuuucagaucucaaaggcucuuuucagagccaccaaaaaaaaaaaaaaaaaaaaaaaaaaaaaaaaaaaaaaaaaaaaaaaaaaaaaaaaaaaaaaaaagaauu

SEQ ID NO: 31607 - RNA, 1714 nt, Artificial Sequence
  mRNA product Design a-1 (hSL-A64-N5) comprising derived and/or modified sequence from LASV(LASV237-NIG-2010;Clade II)__AIT17638__GPCmut7 (opt1)
aggagagucccgcagucggcguccagcggcucugcuuguucgugugugugucguugcaggccuuauucaagcuuaccaugggccagaucaucaccuucuuccaggaggugccccacgucaucgaggaggugaugaacaucgugcugaucgcccucagccugcuggccauccucaaggggaucuacaacgucgcgaccugcggccuguucgggcugguguccuuccuccugcugugcggccgcagcugcuccacgaccuacaaggggguguacgagcuccagacccuggagcuggacauggccagccucaacaugaccaugccgcuguccugcacgaagaacaacagccaccacuacaucauggucggcaacgagaccggccuggagcucacccugaccaacacguccaucaucaaccacaaguucugcaaccugagcgacgcccacaagaaggaccucuacgaccacgcccugauguccaucaucagcaccuuccaccuguccauccccaacuucaaccaguacgaggccaugagcugcgacuucaacgggggcaagaucuccgugcaguacaaccucagccacaccuacgcgguggacgccgccaaccacugcgggaccaucgccaacggcguccugcagacguucaugcggauggcguggggcggguccuacaucgcccuggacagcggcaagggguccugggacugcaucaugaccagcuaccaguaccucaucauccagaacaccaccugggaggaccacugccaguucucccgccccagccccaucggcuaccuggggcugcucagccagcggacgcgcgacaucuacaucucccggcgccugcugggcaccuucaccuggacccucagcgacuccgagggcaacgagacgcccgggggcuacugccugacccgguggaugcugaucgaggccgagcucaagugcuucgggaacaccgccguggccaagugcaacgagaagcacgacgaggaguucugcgacaugcugcgccuguucgacuucaacaagcaggcgauccggcgccucaagacccccgcccagaugagcauccagcugaucaacaaggccgugaacgcccugaucaacgaccagcucaucaugaagaaccaccuccgggacaucaugggcauccccuacugcaacuacuccaaguacugcuaccugaaccacacggucaccgggaagaccagccugccccgcugcugccugguguccaacggcagcuaccugaacgagacccacuucuccgacgacaucgagcagcaggccgacaacaugaucacggagcuccugcagaaggaguacauggaccggcagggcaagaccccgcuggggcucguggaccuguucgucuucagcaccuccuucuaccugaucagcaucuuccugcaccucaucaagaucccgacccaccgccacaucacgggcaagcccugccccaagccccaccggcugaaccacauggggaucugcuccugcggccuguacaagcacccgggggugcccgugaaguggaagcgcugaggacuagucccuguucccagagcccacuuuuuuuucuuuuuuugaaauaaaauagccugucuuucagaucucaaaggcucuuuucagagccaccaaaaaaaaaaaaaaaaaaaaaaaaaaaaaaaaaaaaaaaaaaaaaaaaaaaaaaaaaaaaaaaaagaauu

SEQ ID NO: 31608 - RNA, 1714 nt, Artificial Sequence
  mRNA product Design a-1 (hSL-A64-N5) comprising derived and/or modified sequence from LASV(LASV253-NIG-2011;Clade II)__AIT17670__GPCmut7 (opt1)
aggagagucccgcagucggcguccagcggcucugcuuguucgugugugugucguugcaggccuuauucaagcuuaccaugggccagaucaucaccuucuuccaggaggugccccacgucaucgaggaggugaugaacaucgugcugaucgcccucagccugcuggccauccucaaggggaucuacaacgucgcgaccugcggccuguucgggcugguguccuuccuccugcugugcggccgcagcugcuccacgaccuacaaggggguguacgagcuccagacccuggagcuggacauggccagccucaacaugaccaugccgcuguccugcacgaagaacaacagccaccacuacaucauggucggcaacgagaccggccuggagcucacccugaccaacacguccaucaucaaccacaaguucugcaaccugagcgacgcccacaagaagaaccucuacgaccacgcccugauguccaucaucagcaccuuccaccuguccauccccaacuucaaccaguacgaggccaugagcugcgacuucaacgggggcaagaucuccgugcaguacaaccucagccacaccuacgcgguggacgccgccaaccacugcgggaccaucgccaacggcguccugcagacguucaugcggauggcguggggcggguccuacaucgcccuggacagcggcaagggguccugggacugcaucaugaccagcuaccaguaccucaucauccagaacaccaccugggaggaccacugccaguucucccgccccagccccaucggcuaccuggggcugcucagccagcggacgcgcgacaucuacaucucccggcgccugcugggcaccuucaccuggacccucagcgacuccgagggcaacgagacgcccgggggcuacugccugacccgguggaugcugaucgaggccgagcucaagugcuucgggaacaccgccguggccaagugcaacgagaagcacgacgaggaguucugcgacaugcugcgccuguucgacuucaacaagcaggcgauccggcgccucaaggcccccgcccagaugagcauccagcugaucaacaaggccgugaacgcccugaucaacgaccagcucaucaugaagaaccaccuccgggacaucaugggcaucccguacugcaacuacuccaaguacugcuaccugaaccacaccgucacggggcgcaccagccugccccggugcugccugguguccaacggcagcuaccugaacgagacccacuucuccgacgacaucgagcagcaggcggacaacaugaucaccgagcuccugcagaaggaguacaucgaccgccagggcaagacgccccuggggcucguggaccuguucgucuucagcaccuccuucuaccugaucagcaucuuccugcaccucgugaagaucccgacccaccggcacaucaucggcaagcccugccccaagccccaccgccugaaccacauggggaucugcuccugcggccuguacaagcacccgggggugcccgucaaguggaagcggugaggacuagucccuguucccagagcccacuuuuuuuucuuuuuuugaaauaaaauagccugucuuucagaucucaaaggcucuuuucagagccaccaaaaaaaaaaaaaaaaaaaaaaaaaaaaaaaaaaaaaaaaaaaaaaaaaaaaaaaaaaaaaaaaagaauu

SEQ ID NO: 31609 - RNA, 1714 nt, Artificial Sequence
  mRNA product Design a-1 (hSL-A64-N5) comprising derived and/or modified sequence from LASV(LASV254-NIG-2011;Clade II)__AIT17674__GPCmut7 (opt1)
aggagagucccgcagucggcguccagcggcucugcuuguucgugugugugucguugcaggccuuauucaagcuuaccaugggccagaucaucaccuucuuccaggaggugccccacgucaucgaggaggugaugaacaucgugcugaucgcccucagccugcuggccauccucaaggggaucuacaacgucgcgaccugcggccuguucgggcugguguccuuccuccugcugugcggccgcagcugcuccacgaccuacaaggggguguacgagcuccagacccuggagcuggacaugaccaaccucaacaugacgaugccgcugagcugcaccaagaacaacucccaccacuacaucauggucggcaacgagaccggccuggagcucacccugacgaacaccagcaucaucaaccacaaguucugcaaccuguccgacgcccacaagaagaaccucuacaaccacgcccugaugagcaucaucuccaccuuccaccugagcauccccaacuucaaccaguacgaggccauguccugcgacuucaacgggggcaagaucagcgugcaguacaaccucucccacagcuacgccguggacgcggccaaccacugcgggaccaucgccaacggcguccugcagacguucaugcggauggccuggggcggguccuacaucgcgcuggacagcggcaaggggaacugggacugcaucaugaccuccuaccaguaccucaucauccagaacaccaccugggaggaccacugccaguucagccgccccucccccaucggcuaccuggggcugcucagccagcggacgcgcgacaucuacaucagccggcgccugcugggcaccuucaccuggacccucuccgacagcgagggcaacgagacgcccgggggcuacugccugacccgguggaugcugaucgaggccgagcucaagugcuucgggaacaccgccguggccaagugcaacgagaagcacgacgaggaguucugcgacaugcugcgccuguucgacuucaacaagcaggccauccggcgccucaagacccccgcgcaggccaacauccagcugaucaacaaggccgugaacgcccugaucaacgaccagcucaucaugaagaaccaccuccgggacaucaugggcauccccuacugcaacuacuccaaguacugcuaccugaaccacacggucaccgggaagaccagccugccccgcugcugccugguguccaacggcagcuaccugaacgagacccacuucuccgacgacaucgagcagcaggccgacaacaugaucacggagcuccugcagaaggaguacauggaccggcagggcaagaccccgcuggggcucguggaccuguucgucuucagcaccuccuucuaccugaucagcaucuuccugcaccucgugaagaucccgacccaccgccacgugaucggcaagcccugccccaagccccaccggcugaaccacauggggaucugcuccugcggccuguacaagcacccggggguccccgugaaguggaagcgcugaggacuagucccuguucccagagcccacuuuuuuuucuuuuuuugaaauaaaauagccugucuuucagaucucaaaggcucuuuucagagccaccaaaaaaaaaaaaaaaaaaaaaaaaaaaaaaaaaaaaaaaaaaaaaaaaaaaaaaaaaaaaaaaaagaauu

SEQ ID NO: 31610 - RNA, 1714 nt, Artificial Sequence
  mRNA product Design a-1 (hSL-A64-N5) comprising derived and/or modified sequence from LASV(Nig08-A19;Clade III)__ADU56618__GPCmut7 (opt1)
aggagagucccgcagucggcguccagcggcucugcuuguucgugugugugucguugcaggccuuauucaagcuuaccaugggccagaucgugaccuucuuccaggaggucccccacgugaucgaggaggugaugaacaucguccugaucgcccucagcauccuggccauccugaaggggcucuacaacaucgcgaccugcggccugaucgggcuggugacguuccuccugcuguccggccgcagcugcuccaugaccuacaaggggguguacgagcuccagacccuggagcugaacaugaacacccucaacaugacgaugccgcugagcugcaccaagaacaacucccaccacuacaucauggucggcaacgagaccggccuggagcucacccugacgaacaccagccugcuccaccacaaguucugcaaccuguccgacgcccacaagaagaaccuguacgaccacacccucaugagcaucaucuccaccuuccaccugagcauccccaacuucaaccaguacgaggccauguccugcgacuucaacgggggcaagaucacggugcaguacaaccugagccacuccuacgccaucgacgccgcgaaccacugcgggaccguggccaacggcguccuccagaccuucaugcggauggccuggggcgggagcuacaucgcccuggacuccggccgcgggaagugggacugcaucaugaccagcuaccaguaccugaucauccagaacacgaccugggaggaccacugccaguucucccggcccagccccaucggcuaccucgggcugcugucccagcgcacccgggacaucuacaucagccgccggcuccugggcaccuucacguggacccugagcgacuccgagggcaacgagacccccgggggcuacugccucacccgcuggaugcugaucgaggcggagcugaagugcuucgggaacacggccguggccaagugcaacgagaagcacgacgaggaguucugcgacaugcuccggcuguucgacuucaacaagcaggccauccgccggcugaaggcccccgcgcagaugagcauccagcucaucaacaaggccgugaacgcccugaucaacgaccagcugaucaugaagaaccaccuccgcgacaucaugggcauccccuacugcaacuacuccaaguacugcuaccugaaccacaccagcaccgggcggaccucccugccccgcugcugccucgucagcaacggcuccuaccugaacgagacgcacuucagcgacgacaucgagcagcaggccgacaacaugaucaccgagaugcugcagaaggaguaccucgaccggcagggcaagaccccgcuggggcugguggaccuguucguguucuccaccagcuucuaccucaucuccaucuuccugcaccuggucaagaucccgacgcaccgccacaucgugggcaagcccugccccaagccccaccggcucaaccacauggggaucugcagcugcggccuguacaagcagccgggggugcccguccgcuggaagcggugaggacuagucccuguucccagagcccacuuuuuuuucuuuuuuugaaauaaaauagccugucuuucagaucucaaaggcucuuuucagagccaccaaaaaaaaaaaaaaaaaaaaaaaaaaaaaaaaaaaaaaaaaaaaaaaaaaaaaaaaaaaaaaaaagaauu

SEQ ID NO: 31611 - RNA, 1717 nt, Artificial Sequence
  mRNA product Design a-1 (hSL-A64-N5) comprising derived and/or modified sequence from LASV(G1180-SLE-2010;Clade IV)__AIT17168__GPCmut7 (opt1)
aggagagucccgcagucggcguccagcggcucugcuuguucgugugugugucguugcaggccuuauucaagcuuaccaugggccagaucgugaccuucuuccaggaggucccccacgugaucgaggaggugaugaacaucguccugaucgcccucagcauccuggccgugcugaaggggcucuacaacuucgcgaccugcggccugguggggcugcucaccuuccugcugcucugcggccgcuccugcaccgccagccgguacaagggggucuacgagcugcagacccuggagcucaacauggagacccugaacaugacgaugccgcuguccugcaccaagaacaacagccaccacuacaucauggugggcaacgagaccggccucgagcugacccugacgaacaccuccaucaucaaccacaaguucugcaaccucagcgacgcccacaagaagaaccuguacgaccacgcccugauguccaucaucagcaccuuccaccucuccauccccaacuucaaccaguacgaggccaugagcugcgacuucaacgggggcaagaucuccgugcaguacaaccugagccacuccuacgcgggggacgccgccaaccacugcggcaccgucgccaacggggugcugcagacguucaugcgcauggcguggggcggcagcuacaucgcccucgacuccgggcacggcagcugggacugcaucaugaccuccuaccaguaccugaucauccagaacaccaccugggaggaccacugccaguucagccggcccucccccaucggguaccugggccuccugagccagcgcacgcgggacaucuacaucagccgccggcugcucggcaccuucaccuggacccuguccgacagcgaggggaaggacacgccgggcggguacugccugacccgcuggaugcucaucgaggccgagcugaagugcuucggcaacaccgccguggccaagugcaacgagaagcacgacgaggaguucugcgacaugcugcggcuguucgacuucaacaagcaggcgauccagcgccugaaggcccccgcccagauguccauccagcugaucaacaaggccgucaacgcccucaucaacgaccagcugaucaugaagaaccaccuccgggacaucauggggauccccuacugcaacuacagcaaguacugcuaccucaaccacaccacgaccggcaagaccucccugcccaagugcugccuggugagcaacggcuccuaccucaacgagacccacuucagcgacgacaucgagcagcaggcggacaacaugaucacggagaugcugcagaaggaguacauggagcgccaggggaagacgccccugggccucguggaccuguucgucuucuccaccagcuucuaccugaucuccaucuuccugcaccucgugaagaucccgacccaccggcacaucgugggcaagagcugccccaagccccaccgccugaaccacauggggaucugcuccugcgggcuguacaagcagcccggcgucccggugaaguggaagcggugaggacuagucccuguucccagagcccacuuuuuuuucuuuuuuugaaauaaaauagccugucuuucagaucucaaaggcucuuuucagagccaccaaaaaaaaaaaaaaaaaaaaaaaaaaaaaaaaaaaaaaaaaaaaaaaaaaaaaaaaaaaaaaaaagaauu

SEQ ID NO: 31612 - RNA, 1717 nt, Artificial Sequence
  mRNA product Design a-1 (hSL-A64-N5) comprising derived and/or modified sequence from LASV(G1442-SLE-2011;Clade IV)__AIT17180__GPCmut7 (opt1)
aggagagucccgcagucggcguccagcggcucugcuuguucgugugugugucguugcaggccuuauucaagcuuaccaugggccagaucgugaccuucuuccaggaggucccccacgugaucgaggaggugaugaacaucguccugaucgcccucagcauccuggccgugcugaaggggcucuacaacguggcgaccugcggccugaucgggcuggucacguuccuccugcugugcggccgcuccugcaccaccacccucuacaaggggguguacgagcugcagacgcuggagcucaacauggagacccugaacaugaccaugccgcugagcugcaccaagaacaacucccaccacuacauccgggugggcaacgagacgggccucgagcugacccugaccaacaccagcaucaucaaccacaaguucugcaaccucuccgacgcccacaagaagaaccuguacgaccacgcccugaugagcaucaucuccacguuccaccucagcauccccaacuucaaccaguacgaggccauguccugcgacuucaacgggggcaagaucagcguccaguacaaccugucccacagcuacgccggggacgcggccaaccacugcggcaccguggccaacggggugcugcagaccuucaugcgcauggccuggggcggcuccuacaucgcgcucgacagcgggcggggcaacugggacugcaucaugaccuccuaccaguaccugaucauccagaacacgaccugggacgaccacugccaguucagccgccccucccccaucggguaccugggccuccugagccagcggacccgcgacgucuacaucucccggcgccugcucggcaccuucacguggacccugagcgacagcgaggggaaggacaccccgggcggguacugccugacccgguggaugcucaucgaggccgagcugaagugcuucggcaacacggccguggccaagugcaacgagaagcacgacgaggaguucugcgacaugcugcgccucuucgacuucaacaagcaggccauccagcggcugaaggcgcccgcccagauguccauccagcugaucaacaaggccgugaacgcccucaucaacgaccagcugaucaugaagaaccaccuccgcgacaucauggggauccccuacugcaacuacagcaaguacugcuaccugaacaacaccgccaccggcaagaccucccugcccaagugcugccugaucagcaacggcuccuaccucaacgagacgcacuucagcgacgacaucgagcaggaggcggacaacaugaucaccgagaugcugcagaaggaguacauggagcggcaggggaagacgccccugggccucgucgaccuguucguguucuccaccagcuucuaccugaucuccaucuuccugcaccucgugaagaucccgacccaccgccacaucgucggcaagagcugccccaagccccaccggcugaaccacauggggaucugcuccugcgggcuguacaagcagcccggcgugccggugcgcuggaagcggugaggacuagucccuguucccagagcccacuuuuuuuucuuuuuuugaaauaaaauagccugucuuucagaucucaaaggcucuuuucagagccaccaaaaaaaaaaaaaaaaaaaaaaaaaaaaaaaaaaaaaaaaaaaaaaaaaaaaaaaaaaaaaaaaagaauu

SEQ ID NO: 31613 - RNA, 1717 nt, Artificial Sequence
  mRNA product Design a-1 (hSL-A64-N5) comprising derived and/or modified sequence from LASV(G3010-SLE-2013;Clade IV)__AIT17344__GPCmut7 (opt1)
aggagagucccgcagucggcguccagcggcucugcuuguucgugugugugucguugcaggccuuauucaagcuuaccaugggccagaucgugaccuucuuccaggaggucccccacgugaucgaggaggugaugaacaucguccugaucgcccucagcauccuggccgugcugaaggggcucuacaacuucgcgaccugcggccugguggggcuggucacguuccuccugcugugcggccgcuccugcaccaccagccucuacaaggggguguacgagcugcagacccuggagcucaacauggagacgcugaacaugaccaugccgcuguccugcaccaagaacaacagccaccacuacaucauggugggcaacgagaccggccucgagcugacgcugaccaacaccuccaucaucaaccacaaguucugcaaccucagcgacgcccacaagaagaaccuguacaaccacgcccugauguccaucaucagcaccuuccaccucuccauccccaacuucaaccaguacgaggccaugagcugcgacuucaacgggggcaagaucuccguccaguacaaccugagccacuccuacgccggggacgcggccagccacugcggcacgguggccaacggggugcugcagaccuucaugcggauggccuggggcggcuccuacaucgcgcucgacagcggguacggcaagugggacugcaucaugaccuccuaccaguaccugaucauccagaacaccacgugggaggaccacugccaguucagccgccccucccccaucggguaccugggccuccugagccagcggacccgcgacaucuacaucagccggcgccugcucggcaccuucaccuggacgcuguccgacagcgaggggaaggacaccccgggcggguacugccugacccgguggaugcucaucgaggccgagcugaagugcuucggcaacaccgccgucgccaagugcaacgagaagcacgacgaggaguucugcgacaugcugcgccucuucgacuucaacaagcaggccauccagcggcugaagacgcccgcgcagauguccauccagcugaucaacaaggccgugaacgcccucaucaacgaccagcugaucaugaagaaccaccuccgcgacaucauggggauccccuacugcaacuacagcaaguacugcuaccugaaccacaccaccaccggcaagacgucccugcccaagugcugccuggugagcaacggcuccuaccucaacgagacccacuucagcgacgacaucgagcagcaggccgacaacaugaucaccgagaugcugcagaaggaguacauggagcggcaggggaagacgccccugggccucgucgaccuguucguguucuccaccagcuucuaccugaucuccaucuuccugcaccucgugaagaucccgacccaccgccacaucgucggcaagagcugccccaagccccaccggcugaaccacauggggaucugcuccugcgggcuguacaagcagcccggcgugccggugcgcuggaagcggugaggacuagucccuguucccagagcccacuuuuuuuucuuuuuuugaaauaaaauagccugucuuucagaucucaaaggcucuuuucagagccaccaaaaaaaaaaaaaaaaaaaaaaaaaaaaaaaaaaaaaaaaaaaaaaaaaaaaaaaaaaaaaaaaagaauu

SEQ ID NO: 31614 - RNA, 1717 nt, Artificial Sequence
  mRNA product Design a-1 (hSL-A64-N5) comprising derived and/or modified sequence from LASV(G502-SLE-2009;Clade IV)__AIT17126__GPCmut7 (opt1)
aggagagucccgcagucggcguccagcggcucugcuuguucgugugugugucguugcaggccuuauucaagcuuaccaugggccagaucgugaccuucuuccaggaggucccccacgugaucgaggaggugaugaacaucguccugaucgcccucagcauccuggccgugcugaaggggcucuacaacuucgcgaccugcggccugguggggcugcucacguuccugcugcucugcggccgcuccugcaccaccgggcuguacaagggcgucuacgagcugcagacccucgagcugaacauggagacgcugaacaugaccaugccgcucagcugcaccaagaacaacucccaccacuacaucauggugggcaacgagaccgggcuggagcugacgcucaccaacaccagcaucaucaaccacaaguucugcaaccuguccgacgcccacaagaagaaccuguacgaccacgcccucaugagcaucaucuccaccuuccaccugagcauccccaacuucaaccaguacgaggccauguccugcgacuucaacggcgggaagaucagcgugcaguacaaccugucccacagcuacgccggcgacgcggccgaccacugcgggacggucgccaacggcgugcuccagaccuucaugcggauggccuggggcggguccuacaucgcgcuggacagcggccgcgggcggugggacugcaucaugaccuccuaccaguaccugaucauccagaacaccacgugggaggaccacugccaguucagccgccccucccccaucggcuaccucggccugcugagccagcggacccgcgacaucuacaucucccggcgccuccuggggaccuucaccuggacgcugagcgacagcgagggcaaggacacccccgggggcuacugccucacccgguggaugcugaucgaggccgagcugaagugcuucgggaacaccgccguggccaagugcaacgagaagcacgacgaggaguucugcgacaugcuccgccuguucgacuucaacaagcaggccauccagcggcugaaggcgcccgcccagauguccauccagcucaucaacaaggccgucaacgcccugaucaacgaccagcuggugaugaagaaccaccuccgcgacaucaugggcauccccuacugcaacuacagccgguacugcuaccugaaccacacgaccaccggccgcaccucccugcccaagugcugccucgugagcaacggguccuaccugaacgagacgcacuucagcgacgacaucgagcagcaggccgacaacaugaucaccgagaugcugcagaaggaguacauggagcggcagggcaagaccccgcucgggcuggucgaccuguucguguucuccaccagcuucuaccugaucuccaucuuccuccaccuggugaagaucccgacgcaccgccacaucgucggcaagagcugccccaagccccaccggcugaaccacauggggaucugcuccugcggccucuacaagcagcccggcgugccggugaaguggaagcgcugaggacuagucccuguucccagagcccacuuuuuuuucuuuuuuugaaauaaaauagccugucuuucagaucucaaaggcucuuuucagagccaccaaaaaaaaaaaaaaaaaaaaaaaaaaaaaaaaaaaaaaaaaaaaaaaaaaaaaaaaaaaaaaaaagaauu

SEQ ID NO: 31615 - RNA, 1717 nt, Artificial Sequence
  mRNA product Design a-1 (hSL-A64-N5) comprising derived and/or modified sequence from LASV(G733-SLE-2010;Clade IV)__AIT17154__GPCmut7 (opt1)
aggagagucccgcagucggcguccagcggcucugcuuguucgugugugugucguugcaggccuuauucaagcuuaccaugggccagaucgugaccuucuuccaggaggucccccacgugaucgaggaggugaugaacaucguccugaucgcccucagcauccuggccgugcugaaggggcucuacaacuucgcgaccugcggcaucguggggcuggucuccuuccugcuccugugcggccgcagcugcacgaccucccuguacaaggggguguacgagcuccagacccuggagcugaacauggagacccucaacaugacgaugccgcugagcugcaccaagaacaacucccaccacuacaucauggugggcaacgagaccggccuggagcucacccugacgaacaccagcaucaucaaccacaaguucugcaaccuguccgacgcccacaagaagaaccucuacgaccacgcccugaugagcaucaucuccaccuuccaccugagcauccccaacuucaaccaguacgaggccauguccugcgacuucaacgggggcaagaucagcguccaguacaaccucucccacagcuacgccggggacgcggccaaccacugcggcaccaucgccaacggggugcugcagacguucaugcggauggccuggggcggcuccuacaucgcgcuggacagcgggcgcgaccggugggacugcaucaugaccuccuaccaguaccucaucauccagaacaccaccugggaggaccacugccaguucagccgccccucccccaucggcuaccuggggcugcucagccagcggacgcgcgacaucuacaucagccggcgccugcugggcaccuucaccuggacccucuccgacagcgagggcaaggacacgcccgggggcuacugccugacccgguggaugcugaucgaggccgagcucaagugcuucgggaacaccgccguggccaagugcaacgagaagcacgacgaggaguucugcgacaugcugcgccuguucgacuucaacaagcaggccauccagcggcucaaggcgcccgcccagauguccauccagcugaucaacaaggccgucaacgcccugaucaacgaccagcucaucaugaagaaccaccuccgcgacaucaugggcauccccuacugcaacuacagcaaguacugcuaccugaaccacaccacgaccgggaagaccucccugcccaagugcugccuggugagcaacggcuccuaccugaacgagacccacuucagcgacgacaucgagcagcaggccgacaacaugaucacggagaugcuccagaaggaguacauggagcggcagggcaagaccccgcuggggcugguggaccucuucgucuucuccaccagcuucuaccugaucuccaucuuccugcaccuggugaagaucccgacccaccgccacguggucggcaagagcugccccaagccccaccggcucaaccacauggggaucugcuccugcggccuguacgggcagcccggcgugccggugaaguggaagcgcugaggacuagucccuguucccagagcccacuuuuuuuucuuuuuuugaaauaaaauagccugucuuucagaucucaaaggcucuuuucagagccaccaaaaaaaaaaaaaaaaaaaaaaaaaaaaaaaaaaaaaaaaaaaaaaaaaaaaaaaaaaaaaaaaagaauu

SEQ ID NO: 31616 - RNA, 1717 nt, Artificial Sequence
  mRNA product Design a-1 (hSL-A64-N5) comprising derived and/or modified sequence from MOPV/LASV reassortant(IGS-1;Clade IV)__AFY05576__GPCmut7 (opt1)
aggagagucccgcagucggcguccagcggcucugcuuguucgugugugugucguugcaggccuuauucaagcuuaccaugggccagaucgugaccuucuuccaggaggucccccacgugaucgaggaggugaugaacaucguccugaucgcccucagcgugcuggccgugcugaaggggcucuacaacuucgcgaccugcggccuggucgggcuggugacguuccuccugcugugcggccgcuccugcaccaccagccucuacaaggggguguacgagcugcagacccuggagcucaacauggagacgcugaacaugaccaugccgcuguccugcaccaagaacaacagccaccacuacaucauggucggcaacgagaccggccucgagcugacgcugaccaacaccuccaucaucaaccacaaguucugcaaccucagcgacgcccacaagaagaaccuguacgaccacgcccugauguccaucaucagcaccuuccaccucuccauccccaacuucaaccaguacgaggccaugagcugcgacuucaacgggggcaagaucuccgugcaguacaaccugagccacuccuacgccggggacgcggccaaccacugcggcacgguggccaacgggguccugcagaccuucaugcggauggccuggggcggcagcuacaucgcgcucgacuccgggcgcggcaacugggacugcaucaugaccagcuaccaguaccugaucauccagaacaccacgugggaggaccacugccaguucucccggcccagccccaucggguaccugggccuccugucccagcgcacccgggacaucuacaucagccgccggcugcucggcaccuucaccuggacgcugagcgacuccgagggggaggacaccccgggcggguacugccugacccgcuggaugcucaucgaggccgagcugaagugcuucggcaacaccgccguggccaagugcaacgagaagcacgacgaggaguucugcgacaugcugcggcuguucgacuucaacaagcaggccauccagcgccugaaggcgcccgcccagaugagcauccagcugaucaacaaggccgugaacgcccucaucaacgaccagcugaucaugaagaaccaccuccgggacaucauggggauccccuacugcaacuacuccaaguacugcuaccucaaccacacgaccaccggccgcaccagccugcccaagugcugccuggucuccaacggcagcuaccucaacgagacgcacuucuccgacgacaucgagcagcaggccgacaacaugaucaccgagaugcugcagaaggaguacauggagcggcaggggaagacgccccugggccucguggaccuguucguguucagcaccuccuucuaccugaucagcaucuuccugcaccucgucaagaucccgacccaccgccacaucguggggaaguccugccccaagccccaccggcugaaccacaugggcaucugcagcugcgggcuguacaagcagcccggcgugccggucaaguggaagcgcugaggacuagucccuguucccagagcccacuuuuuuuucuuuuuuugaaauaaaauagccugucuuucagaucucaaaggcucuuuucagagccaccaaaaaaaaaaaaaaaaaaaaaaaaaaaaaaaaaaaaaaaaaaaaaaaaaaaaaaaaaaaaaaaaagaauu

SEQ ID NO: 31617 - RNA, 1717 nt, Artificial Sequence
  mRNA product Design a-1 (hSL-A64-N5) comprising derived and/or modified sequence from LASV(LM765-SLE-2012;Clade IV)__AIT17814__GPCmut7 (opt1)
aggagagucccgcagucggcguccagcggcucugcuuguucgugugugugucguugcaggccuuauucaagcuuaccaugggccagaucgugaccuucuuccaggaggucccccacgugaucgaggaggugaugaacaucguccugaucgcccucagcauccuggccgugcugaaggggcucuacaacuucgcgaccugcggccugguggggcuggucacguuccuccugcugugcggccgcuccugcaccaccagccucuacaaggggguguacgagcugcagacccuggagcucaacauggagacgcugaacaugaccaugccgcuguccugcaccaagaacaacagccaccacuacaucauggugggcaacgagaccggccucgagcugacgcugaccaacaccuccaucaucgaccacaaguucugcaaccucagcgacgcccaccggaagaaccuguacgaccacgcccugauguccaucaucagcaccuuccaccucuccauccccaacuucaaccaguacgaggccaugagcugcgacuucaacgggggcaagaucuccguccaguacaaccugagccacuccuacgccaaggacgcggccgaccacugcgggacgguggccaacggcgugcugcagaccuucaugcgcauggccuggggcgggagcuacaucgcgcucgacuccggccgggggcgcugggacugcaucaugaccagcuaccaguaccugaucauccagaacaccacgugggaggaccacugccaguucucccggcccagccccaucggcuaccuggggcuccugucccagcgcacccgggacaucuacaucagccgccggcugcucggcaccuucaccuggacgcugagcgacuccgagggcaaggacacccccgggggcuacugccugacccgcuggaugcucaucgaggccgagcugaagugcuucgggaacaccgccgucgccaagugcaacgagaagcacgacgaggaguucugcgacaugcugcggcuguucgacuucaacaagcaggccauccagcgccugaaggcgcccgcccagaugagcauccagcugaucaacaaggccgugaacgcccucaucaacgaccagcugaucaugaagaaccaccuccgggacaucaugggcauccccuacugcaacuacuccaaguacugcuaccucaaccacacgaccaccgggaagaccagccugcccaagugcugccugguguccaacggcagcuaccucaacgagacgcacuucuccgacgacaucgagcagcaggccgacaacaugaucaccgagaugcugcagaaggaguacauggagcgccagggcaagaccccgcuggggcucgucgaccuguucguguucagcaccuccuucuaccugaucagcaucuuccugcaccucgugaagaucccgacgcaccggcacaucgucggcaagcccugccccaagccccaccgccugaaccacauggggaucugcuccugcggccuguacaagcagccgggggugcccgugaaguggaagcggugaggacuagucccuguucccagagcccacuuuuuuuucuuuuuuugaaauaaaauagccugucuuucagaucucaaaggcucuuuucagagccaccaaaaaaaaaaaaaaaaaaaaaaaaaaaaaaaaaaaaaaaaaaaaaaaaaaaaaaaaaaaaaaaaagaauu

SEQ ID NO: 31618 - RNA, 1717 nt, Artificial Sequence
  mRNA product Design a-1 (hSL-A64-N5) comprising derived and/or modified sequence from LASV(LM776-SLE-2012;Clade IV)__AIT17824__GPCmut7 (opt1)
aggagagucccgcagucggcguccagcggcucugcuuguucgugugugugucguugcaggccuuauucaagcuuaccaugggccagaucgugaccuucuuccaggaggucccccacgugaucgaggaggugaugaacaucguccugaucgcccucagcauccuggccgugcugaaggggcucuacaacuucgcgaccugcggccugguggggcuggucacguuccuccugcugugcggccgcuccugcaccaccagcguguacaaggggguguacgagcuccagacccuggagcugaacauggagacgcucaacaugaccaugccgcuguccugcaccaagaacaacagccaccacuacaucauggucggcaacgagaccggccuggagcucacgcugaccaacaccuccaucaucaaccacaaguucugcaaccugagcgacgcccacaagaagaaccucuacgaccacgcccugauguccaucaucagcaccuuccaccuguccauccccaacuucaaccaguacgaggccaugagcugcgacuucaacgggggcaagaucuccgugcaguacaaccucagccacuccuacgccggggacgcggccaaccacugcggcacgguggccaacgggguccugcagaccuucaugcggauggccuggggcggcagcuacaucgcgcuggacuccgggcacggcaagugggacugcaucaugaccagcuaccaguaccucaucauccagaacaccacgugggaggaccacugccaguucucccgccccagccccaucggguaccugggccugcucucccagcggacccgcgacaucuacaucagccggcgccugcugggcaccuucaccuggacgcucagcgacuccgaggggaaggacaccccgggcggguacugccugacccgguggaugcugaucgaggccgagcucaagugcuucggcaacaccgccguggccaagugcaacgagaagcacgacgaggaguucugcgacaugcugcgccuguucgacuucaacaagcaggccauccagcggcucaaggcgcccgcccagaugagcauccagcugaucaacaaggccgugaacgcccugaucaacgaccagcucaucaugaagaaccaccuccgcgacaucauggggauccccuacugcaacuacuccaaguacugcuaccugaaccacacgaccaccggcaagaccagccugcccaagugcugccuggucuccaacggcagcuaccugaacgagacgcacuucuccgacgacaucgagcagcaggccgacaacaugaucaccgagaugcuccagaaggaguacauggagcggcaggggaagacgccccugggccugguggaccucuucguguucagcaccuccuucuaccugaucagcaucuuccugcaccuggucaagaucccgacccaccgccacaucguggggaaguccugccccaagccccaccggcucaaccacaugggcaucugcagcugcgggcuguacaagcagcccggcgugccgguccgcuggaagcggugaggacuagucccuguucccagagcccacuuuuuuuucuuuuuuugaaauaaaauagccugucuuucagaucucaaaggcucuuuucagagccaccaaaaaaaaaaaaaaaaaaaaaaaaaaaaaaaaaaaaaaaaaaaaaaaaaaaaaaaaaaaaaaaaagaauu

SEQ ID NO: 31619 - RNA, 1717 nt, Artificial Sequence
  mRNA product Design a-1 (hSL-A64-N5) comprising derived and/or modified sequence from LASV(Mad39;Clade IV)__ANH09722__GPCmut7 (opt1)
aggagagucccgcagucggcguccagcggcucugcuuguucgugugugugucguugcaggccuuauucaagcuuaccaugggccagaucgugaccuucuuccaggaggucccccacgugaucgaggaggugaugaacaucguccugaucgcccucagcauccuggccgugcugaaggggcucuacaacguggcgaccugcggccugaucgggcuggucacguuccuccugcugugcggccgcuccugcaccaccacccucuacaaggggguguacgagcugcaggcccuggagcucaacauggagacgcugaacaugaccaugccgcugagcugcaccaagaacaacucccaccacuacauccgggugggcaacgagaccggccucgagcugacgcugaccaacaccagccucaucaaccacaaguucugcaaccuguccgacgcccacaagaagaaccuguacgaccacgcccucaugagcaucaucuccaccuuccaccugagcauccccaacuucaaccaguacgaggccauguccugcgacuucaacgacgggaagaucagcguccaguacaaccugucccacacguacgcgggcgacaccgccaaccacugcgggaccguggccaacggcgugcuccagaccuucaugcgcauggccuggggcgggagcuacaucgcgcuggacuccggccgcgggggcugggacugcaucaugacgagcuaccaguaccugaucauccagaacaccaccugggaggaccacugccaguucucccggcccagccccaucggguaccucggccugcugucccagcggacccgcgacaucuacaucagccggcgccuccugggcacguucaccuggacccuguccgacagcgaggggaaggacaccccgggcggguacugccucacgcgguggaugcugaucgaggccgagcugaagugcuucggcaacaccgccgucgccaagugcaacgagaagcacgacgaggaguucugcgacaugcuccgccuguucgacuucaacaagcaggccauccagcggcugaaggcgcccgcccagaugagcauccagcucaucaacaaggccgugaacgcccugaucaacgaccagcugaucaugaagaaccaccuccgcgacaucauggggauccccuacugcaacuacuccaaguacugcuaccugaaccacaccgugaccggcaagacgagccugcccaagugcugccucgucuccaacggcagcuaccugaacgagacccacuucuccgacgacaucgagcagcaggccgacaacaugaucaccgagaugcugcagaaggaguacauggagcggcaggggaagacgccccucggccugguggaccuguucguguucagcaccuccuucuaccugaucagcaucuuccuccaccuggucaagaucccgacccaccgccacgugguggggaagcccugccccaagccccaccggcugaaccacaugggcaucugcuccugcggguucuacaagcagccgggcguccccgugcgcuggaagcggugaggacuagucccuguucccagagcccacuuuuuuuucuuuuuuugaaauaaaauagccugucuuucagaucucaaaggcucuuuucagagccaccaaaaaaaaaaaaaaaaaaaaaaaaaaaaaaaaaaaaaaaaaaaaaaaaaaaaaaaaaaaaaaaaagaauu

SEQ ID NO: 31620 - RNA, 1717 nt, Artificial Sequence
  mRNA product Design a-1 (hSL-A64-N5) comprising derived and/or modified sequence from LASV(Z0947-SLE-2011;Clade IV)__AIT17840__GPCmut7 (opt1)
aggagagucccgcagucggcguccagcggcucugcuuguucgugugugugucguugcaggccuuauucaagcuuaccaugggccagaucgugaccuucuuccaggaggucccccacgugaucgaggaggugaugaacaucguccugaucgcccucagcauccuggccgugcugaaggggcucuacaacuucgcgaccugcggccugguggggcuggucacguuccuccugcugugcggccgcuccugcaccaucagccucuacaaggggguguacgagcugcagacccuggagcucaacauggagacccugaacaugacgaugccgcuguccugcaccaagaacaacagccaccacuacaucauggugggcaacgagaccggccucgagcugacccugacgaacaccuccaucaucaaccacaaguucugcaaccucagcgacgcccacaagaagaaccuguacgaccacgcccugauguccaucaucagcaccuuccaccucuccauccccaacuucaaccaguacgaggccaugagcugcgacuucaacgggggcaagaucuccguccaguacaaccugagccacuccuacgccggggacgcggccaaccacugcggcaccguggccaacggggugcugcagacguucaugcggauggccuggggcggcagcuacaucgcgcucgacuccgggcgcgaccggugggacugcaucaugaccagcuaccaguaccugaucauccagaacaccaccugggaggaccacugccaguucucccgccccagccccaucggcuaccuggggcuccugucccagcggacgcgcgacaucuacaucagccggcgccugcucggcaccuucaccuggacccugagcgacuccgagggcaaggacacgcccgggggcuacugccugacccgguggaugcucaucgaggccgagcugaagugcuucgggaacaccgccgucgccaagugcaacgagaagcacgacgaggaguucugcgacaugcugcgccucuucgacuucaacaagcaggccauccagcggcugaaggcgcccgcccagaugagcauccagcugaucaacaaggccgugaacgcccucaucaacgaccagcugaucaugaagaaccaccuccgcgacaucaugggcauccccuacugcaacuacuccaaguacugcuaccugaaccacaccacgaccgggaagaccagccugcccaagugcugccugguguccaacggcagcuaccucaacgagacccacuucuccgacgacaucgagcagcaggccgacaacaugaucacggagaugcugcagaaggaguacauggagcggcagggcaagaccccgcuggggcucgucgaccuguucguguucagcaccuccuucuaccugaucagcaucuuccugcaccucgugaagaucccgacccaccgccacaucgucggcaagcccugccccaagccccaccggcugaaccacauggggaucugcuccugcggccuguacaagcagccgggggugcccgugaaguggaagcgcugaggacuagucccuguucccagagcccacuuuuuuuucuuuuuuugaaauaaaauagccugucuuucagaucucaaaggcucuuuucagagccaccaaaaaaaaaaaaaaaaaaaaaaaaaaaaaaaaaaaaaaaaaaaaaaaaaaaaaaaaaaaaaaaaagaauu

SEQ ID NO: 31621 - RNA, 1717 nt, Artificial Sequence
  mRNA product Design a-1 (hSL-A64-N5) comprising derived and/or modified sequence from LASV(Josiah;Clade IV)__NP_694870__GPCmut7 (opt1)
aggagagucccgcagucggcguccagcggcucugcuuguucgugugugugucguugcaggccuuauucaagcuuaccaugggccagaucgugaccuucuuccaggaggucccccacgugaucgaggaggugaugaacaucguccugaucgcccucagcgugcuggccgugcugaaggggcucuacaacuucgcgaccugcggccuggucgggcuggugacguuccuccugcugugcggccgcuccugcaccaccagccucuacaaggggguguacgagcugcagacccuggagcucaacauggagacgcugaacaugaccaugccgcuguccugcaccaagaacaacagccaccacuacaucauggucggcaacgagaccggccucgagcugacgcugaccaacaccuccaucaucaaccacaaguucugcaaccucagcgacgcccacaagaagaaccuguacgaccacgcccugauguccaucaucagcaccuuccaccucuccauccccaacuucaaccaguacgaggccaugagcugcgacuucaacgggggcaagaucuccgugcaguacaaccugagccacuccuacgccggggacgcggccaaccacugcggcacgguggccaacgggguccugcagaccuucaugcggauggccuggggcggcagcuacaucgcgcucgacuccgggcgcggcaacugggacugcaucaugaccagcuaccaguaccugaucauccagaacaccacgugggaggaccacugccaguucucccggcccagccccaucggguaccugggccuccugucccagcgcacccgggacaucuacaucagccgccggcugcucggcaccuucaccuggacgcugagcgacuccgaggggaaggacaccccgggcggguacugccugacccgcuggaugcucaucgaggccgagcugaagugcuucggcaacaccgccguggccaagugcaacgagaagcacgacgaggaguucugcgacaugcugcggcuguucgacuucaacaagcaggccauccagcgccugaaggcgcccgcccagaugagcauccagcugaucaacaaggccgugaacgcccucaucaacgaccagcugaucaugaagaaccaccuccgggacaucauggggauccccuacugcaacuacuccaaguacugcuaccucaaccacacgaccaccggccgcaccagccugcccaagugcugccuggucuccaacggcagcuaccucaacgagacgcacuucuccgacgacaucgagcagcaggccgacaacaugaucaccgagaugcugcagaaggaguacauggagcggcaggggaagaccccgcugggccugguggaccucuucguguucagcaccuccuucuaccugaucagcaucuuccugcaccucgucaagauccccacgcaccgccacaucguggggaaguccugccccaagccccaccggcugaaccacaugggcaucugcagcugcgggcuguacaagcagccgggcgugcccgucaaguggaagcgcugaggacuagucccuguucccagagcccacuuuuuuuucuuuuuuugaaauaaaauagccugucuuucagaucucaaaggcucuuuucagagccaccaaaaaaaaaaaaaaaaaaaaaaaaaaaaaaaaaaaaaaaaaaaaaaaaaaaaaaaaaaaaaaaaagaauu

SEQ ID NO: 31622 - RNA, 1714 nt, Artificial Sequence
  mRNA product Design a-1 (hSL-A64-N5) comprising derived and/or modified sequence from LASV(LP;Clade I)__AAF86701__GPCmut7 (opt1)
aggagagucccgcagucggcguccagcggcucugcuuguucgugugugugucguugcaggccuuauucaagcuuaccaugggccagaucaucaccuucuuccaggaggugccccacgucaucgaggaggugaugaacaucgugcugaucgcccucagccugcuggccauccucaaggggcuguacaacaucgcgaccugcggcaucaucgggcuggucgccuuccucuuccugugcggcaaguccugcagccugacgcucaagggcggguacgagcugcagacccuggagcucaacauggagacccugaacaugaccaugccgcuguccugcacgaagaacagcucccaccacuacauccgcgugggcaacgagaccgggcucgagcugacccugaccaacacgagcaucaucaaccacaaguucugcaaccucuccgacgcccacaagaagaaccuguacgaccacgcccugaugagcaucaucuccaccuuccaccucagcauccccaacuucaaccaguacgaggccauguccugcgacuucaacggcgggaagaucagcgugcaguacaaccugucccacagcuacgcgggcgacgccgccgagcacugcgggaccgucgccaacggcgugcugcagaccuucaugcggauggcguggggcgggcgcuacaucgcccucgacuccggcaaggggaacugggacugcaucaugacgagcuaccaguaccugaucauccagaacaccaccugggaggaccacugccaguucucccggcccagccccaucggcuaccugggccuccugucccagcgcacccgggacaucuacaucagccgccggcugcucgggacguucaccuggacccugagcgacuccgagggcaacgagacccccgggggcuacugccugacgcgcuggaugcucaucgaggccgagcugaagugcuucgggaacaccgccguggccaagugcaacgagaagcacgacgaggaguucugcgacaugcugcggcuguucgacuucaacaagcaggcgauccgccggcugaaggccccggcccagaugagcauccagcugaucaacaaggccgucaacgcccucaucaacgaccagcugaucaugaagaaccaccuccgcgacaucaugggcauccccuacugcaacuacuccaaguacugcuaccucaaccacaccagcuccggccggaccagccugcccaagugcugccugaucuccaacgggagcuaccucaacgagacgcaguucuccgacgacaucgagcagcaggcggacaacaugaucaccgagaugcugcagaaggaguacaucgagcgccagggcaagaccccgcuggggcugguggacaucuucaucuucagcaccuccuucuaccucaucagcaucuuccugcaccugaucaagauccccacgcaccggcacaucgugggcaagcccugccccaagccgcaccgccucaaccacaugggggucugcuccugcggccuguacaagcaccccggcgugcccaccaaguggaagcggugaggacuagucccuguucccagagcccacuuuuuuuucuuuuuuugaaauaaaauagccugucuuucagaucucaaaggcucuuuucagagccaccaaaaaaaaaaaaaaaaaaaaaaaaaaaaaaaaaaaaaaaaaaaaaaaaaaaaaaaaaaaaaaaaagaauu

SEQ ID NO: 31623 - RNA, 1714 nt, Artificial Sequence
  mRNA product Design a-1 (hSL-A64-N5) comprising derived and/or modified sequence from LASV(803213;Clade II)__AAF86703__GPCmut7 (opt1)
aggagagucccgcagucggcguccagcggcucugcuuguucgugugugugucguugcaggccuuauucaagcuuaccaugggccagaucaucaccuucuuccaggaggugccccacgucaucgaggaggugaugaacaucgugcugaucgcccucagccugcuggccauccucaaggggaucuacaacgucgcgaccugcggccuguucgggcugaucuccuuccuccugcugugcggccgcagcugcuccgugacguacaaggggguguacgagcuccagacccuggagcugaacauggccaaccucaacaugaccaugccgcugagcugcaccaagaacaacucccaccacuacaucauggucggcaacgagacgggccuggagcucacccugaccaacaccagcaucaucaaccacaaguucugcaaccuguccgacgcccacaagaagaaccucuacgaccacgcccugaugagcaucaucuccacguuccaccugagcauccccaacuucaaccaguacgaggccauguccugcgacuucaacgggggcaagaucagcgugcaguacaaccucucccacagcuucgcgguggacgccgccaaccacugcgggaccaucgccaacggcguccugcagaccuucaugcggauggcguggggcggguccuacaucgcccuggacagcggcaaggggaacugggacugcaucaugaccuccuaccaguaccucaucauccagaacacgaccugggaggaccacugccaguucagccgccccucccccaucggcuaccuggggcugcucagccagcggacccgcgacaucuacaucagccggcgccugcugggcaccuucacguggacccucuccgacagcgagggcaacgaggcccccgggggcuacugccugacccgguggaugcugaucgaggccgagcucaagugcuucgggaacaccgccguggcgaagugcaacgagaagcacgacgaggaguucugcgacaugcugcgccuguucgacuucaacaagcaggccaucaagcggcucaagacgccggcccagauguccauccagcugaucaacaaggccgugaacgcccugaucaacgaccagcucaucaugaagaaccaccuccgcgacaucaugggcauccccuacugcaacuacagccgguacugcuaccugaaccacaccgucaccgggaagaccucccugccccgcugcugccuggugagcaacggcuccuaccugaacgagacgcacuucagcgacgacaucgagcagcaggcggacaacaugaucaccgagaugcuccagaaggaguacauggaccggcagggcaagaccccgcuggggcugguggaccuguucgucuucuccaccagcuucuaccucaucuccaucuuccugcaccuggugaagauccccacgcaccgccacaucgugggcaagcccugccccaagccgcaccggcucaaccacauggggaucugcagcugcggccuguacaagcaccccgggguccccgugaaguggaagcgcugaggacuagucccuguucccagagcccacuuuuuuuucuuuuuuugaaauaaaauagccugucuuucagaucucaaaggcucuuuucagagccaccaaaaaaaaaaaaaaaaaaaaaaaaaaaaaaaaaaaaaaaaaaaaaaaaaaaaaaaaaaaaaaaaagaauu

SEQ ID NO: 31624 - RNA, 1714 nt, Artificial Sequence
  mRNA product Design a-1 (hSL-A64-N5) comprising derived and/or modified sequence from LASV(GA391;Clade III)__CAA36645__GPCmut7 (opt1)
aggagagucccgcagucggcguccagcggcucugcuuguucgugugugugucguugcaggccuuauucaagcuuaccaugggccagaucgugaccuucuuccaggaggucccccacgugaucgaggaggugaugaacaucguccugaucgcccucagcauccuggccauccugaaggggcucuacaacguggcgaccugcggccugaucgggcuggugacguuccuccugcuguccggccgcagcugcucccucaucuacaaggggaccuacgagcugcagacccuggagcucaacauggagacccugaacaugacgaugccgcugagcugcaccaagaacaacucccaccacuacauccgggucggcaacgagaccggccucgagcugacccugacgaacaccagcauccucaaccacaaguucugcaaccuguccgacgcccacaagcgcaaccuguacgaccacagccucauguccaucaucagcaccuuccaccuguccauccccaacuucaaccaguacgaggccaugagcugcgacuucaacgggggcaagaucaccgugcaguacaaccugucccacagcuucgccguggacgccgcggggcacugcggcacgcucgccaacgggguccugcagaccuucaugcggauggccuggggcggcuccuacaucgcccuggacagcgggcgcggcaacugggacugcaucaugaccuccuaccaguaccucaucauccagaacaccacgugggacgaccacugccaguucagccggcccucccccaucggguaccugggccugcucagccagcgcacccgggacaucuacaucagccgccggcugcugggcaccuucaccuggacgcucuccgacagcgaggggaacgagaccccgggcggguacugccugacccgcuggaugcugaucgaggcggagcucaagugcuucggcaacaccgccguggccaagugcaacgagaagcacgacgaggaguucugcgacaugcugcggcuguucgacuucaacaagcaggccauccgccggcucaagacgcccgcccagauguccauccagcugaucaacaaggcggugaacgcccugaucaacgaccagcucaucaugaagaaccaccuccgcgacaucauggggauccccuacugcaacuacagccgguacugcuaccugaaccacaccuccaccggcaagaccagccugccccgcugcugccugaucuccaacggcagcuaccugaacgagacgaaguucuccgacgacaucgagcagcaggccgacaacaugaucaccgagaugcugcagaaggaguacaucgaccggcaggggaagaccccgcucggccuggucgaccuguucguguucagcaccuccuucuaccucaucagcaucuuccugcaccuggugaagauccccacgcaccgccacaucgucgggaagcccugccccaagccgcaccggcucaaccacaugggcaucugcuccugcgggcuguacaagcagcccggcgugcccgugcgcuggaagcggugaggacuagucccuguucccagagcccacuuuuuuuucuuuuuuugaaauaaaauagccugucuuucagaucucaaaggcucuuuucagagccaccaaaaaaaaaaaaaaaaaaaaaaaaaaaaaaaaaaaaaaaaaaaaaaaaaaaaaaaaaaaaaaaaagaauu

SEQ ID NO: 31625 - RNA, 1717 nt, Artificial Sequence
  mRNA product Design a-1 (hSL-A64-N5) comprising derived and/or modified sequence from LASV(AV;Clade V)__CCA30314__GPCmut7 (opt1)
aggagagucccgcagucggcguccagcggcucugcuuguucgugugugugucguugcaggccuuauucaagcuuaccaugggccagaucgugaccuucuuccaggaggucccccacgugaucgaggaggugaugaacaucguccugaucgcccucagcauccuggccgugcugaaggggcucuacaacaucgcgaccugcggccugaucgggcugaucacguuccuccugcugugcggccgcuccugcagcuccaaccucuacaaggggguguacgagcugcagagccuggaccucaacauggagacccugaacaugaccaugccgcuguccugcaccaagaacaacagccaccacuacauccgggucggcaacgacacgggccucgagcugacccugaccaacaccuccauccucaaccacaaguucugcaaccugagcgacgcccacaagaaggaccuguacgaccacgcccucauguccaucaucagcacguuccaccuguccauccccaacuucaaccaguacgaggccaugagcugcgacuucaacgggggcaagaucuccgugcaguacaaccugagccacuccuacgccaucgacgcggccaaccacugcgggaccguggccaacggcauccuccagaccuucaugcgcauggccuggggcgggagcuacaucgcgcuggacuccggccgggggaacugggacugcaucaugaccagcuaccaguaccugaucauccagaacacgaccugggagaaccacugccaguucucccgccccagccccaucggcuaccucgggcugcugagccagcggacccgcgacaucuacaucucccggcgccuccugggcaccuucacguggacccugagcgacuccgagggcaacgccacccccgggggcuacugccucacccgguggaugcugaucgaggccgagcugaagugcuucgggaacacggccgucgccaagugcaacgagaagcacgacgaggaguucugcgacaugcuccgccuguucgacuucaacaagcaggcgaucagccggcugaaguccccggcccagaugagcauccagcucaucaacaaggccgugaacgcccugaucaacgaccagcugaucaugaagaaccaccuccgcgacaucaugggcauccccuacugcaacuacuccaaguacugcuaccugaaccacaccaucaccgggaagaccagccugcccaagugcugccucguguccaacggcagcuaccugaacgagacgcacuucuccgacgacaucgagcagcaggccgacaacaugaucaccgagaugcugcagaaggaguacauggagcggcagggcaagaccccgcuggggcucgucgaccuguucguguucagcaccuccuucuaccugaucagcaucuuccuccgccuggugaagauccccacgcaccggcacaucgucggcaagcccugccccaagccgcaccgccugaaccacauggggaucugcuccugcggccucuacaagcagcccggggugcccgugcgguggaagcgcugaggacuagucccuguucccagagcccacuuuuuuuucuuuuuuugaaauaaaauagccugucuuucagaucucaaaggcucuuuucagagccaccaaaaaaaaaaaaaaaaaaaaaaaaaaaaaaaaaaaaaaaaaaaaaaaaaaaaaaaaaaaaaaaaagaauu

SEQ ID NO: 31626 - RNA, 1714 nt, Artificial Sequence
  mRNA product Design a-1 (hSL-A64-N5) comprising derived and/or modified sequence from LASV(Togo/2016/7082;Clade VI)__AMR44577__GPCmut7 (opt1)
aggagagucccgcagucggcguccagcggcucugcuuguucgugugugugucguugcaggccuuauucaagcuuaccaugggccagaucaucaccuucuuccaggaggugccccacgucaucgaggaggugaugaacaucgugcugaucgcccucagccugcuggccauccucaagggggucuacaacguggcgaccugcggcaucaucgggcuggugacguuccuguuccucugcggccgcuccugcagccugaucuacaagggguccuacgagcugcagacccucgagcugaacauggagacccugaacaugaccaugccgcucagcugcacgaagaacuccagccaccacuacauccgggucggcaacgagaccggccuggagcugacccucaccaacacguccaucaucaaccacaaguucugcaaccugagcgacgcccacaagcgcaaccuguacgaccacgcccucauguccauccugagcaccuuccaccuguccauccccaacuucaaccaguacgaggccaugagcugcgacuucaacgggggcaagaucuccgugcaguacaaccucagccacgccuacgcgguggacgccgccgagcacugcgggaccgucgccaacggcgugcugcagaccuucaugcggauggcguggggcggguccuacaucgcccuggacagcggccgcgggaacugggacugcaucaugacguccuaccaguaccucaucauccagaacaccaccugggaggaccacugccaguucagccggcccucccccaucggcuaccuggggcugcucagccagcgcacccgggacaucuacaucagccgccggcugcugggcacguucaccuggacccucuccgacagcgagggcaacgagacccccgggggcuacugccugacgcgcuggaugcugaucgaggccgagcucaagugcuucgggaacaccgccguggccaagugcaacgagaagcacgacgaggaguucugcgacaugcugcggcuguucgacuucaacaagcaggcgauccagcgccucaaguccccggcccagaugagcauccagcugaucaacaaggccgucaacgcccugaucaacgaccagcucaucaugaagaaccaccuccgggacaugaugggcauccccuacugcaacuacuccaaguacugcuaccugaaccacaccagcuccgggcgcaccagccugcccaagugcugccugguguccaacggcagcuaccugaacgagacgcacuucuccgacgacaucgagcagcaggccgacaacaugaucaccgagaugcuccagaaggaguacaucgaccggcagggcaagaccccgcuggggcugguggaccuguucgucuucagcaccuccuucuaccucaucagcaucuuccugcaccugaucaagauccccacgcaccgccacaucgugggcaagcccugccccaagccgcaccggcucaaccacauggggaucugcuccugcggccuguacaagcagcccggggugcccacccgcuggaagcggugaggacuagucccuguucccagagcccacuuuuuuuucuuuuuuugaaauaaaauagccugucuuucagaucucaaaggcucuuuucagagccaccaaaaaaaaaaaaaaaaaaaaaaaaaaaaaaaaaaaaaaaaaaaaaaaaaaaaaaaaaaaaaaaaagaauu

SEQ ID NO: 31627 - RNA, 1714 nt, Artificial Sequence
  mRNA product Design a-1 (hSL-A64-N5) comprising derived and/or modified sequence from LASV(KAK-428;Clade n.d. (VII))__ANH09740__GPCmut7 (opt1)
aggagagucccgcagucggcguccagcggcucugcuuguucgugugugugucguugcaggccuuauucaagcuuaccaugggccagaucgugaccuucuuccaggaggucccccacgugaucgaggaggugaugaacaucguccugaucgcccucagccugcuggccauccucaaggggcuguacaacuucgcgaccugcggcgugaucgggcugaucacguuccuccugcugugcggccgcuccugcagcgccaccuacaaggggcaguacgagcuccagacccuggagcugaacauggagucccucaacaugaccaugccgcugagcugcacgaagaacaacucccaccacuacauccgggccggcaacaacaccggccuggagcucacccugaccaacacgagcaucaucucccacaaguucugcaaccugagcgacgcccacaagaagaaccucuacgaccacacccugauguccaucaucaccaccuuccaccugagcauccccaacuucaaccaguacgaggccauguccugcgacuucaacgggggcaagaucagcauccaguacaaccucucccacagcuacgcgggggacgccgcccagcacugcggcacgguggccaacgggguccugcagaccuucaugcgcauggcguggggcggcuccuaccuggcccucgacagcgggcggcgcggcugggacugcaucaucuccagcuaccaguaccugaucauccagaacaccaccugggacgaccacugccaguucucccggcccagccccaucggguaccugggcuucgugagccagaagacgcgcgacaucuacaucucccggcgccuccugggcaccuucaccuggacccugagcgacuccgaggggcacgacaugccgggcggguacugccucacgcgguggaugcugaucgaggccgaccugaagugcuucggcaacaccgccguggccaagugcaacgagaagcacgacgaggaguucugcgacauguggcgccucuucgacuucaacaagcaggcgauccagcggcugaaggcccccgcccagaugaacauccagcugaucaacaaggccgucaacgcccucaucaacgaccagcugaugaugaagaaccaccuccgcgacaucauggggauccccuacugcaacuacagcaaguucugcuaccugaacaacaccaccacgggccggaccucccugccccgcugcugccugaucagcaacggcuccuaccucaacgagacccacuucagcgacgacaucgagcagcaggcggacaacaugaucaccgagaugcugcagaaggaguacauggaccggcaggggaagacgccgcugggccucguggaccuguucguguucuccaccagcuucuaccugaucaccaucuuccugcaccucgucaagauccccacccaccgccacaucguggggaagcccugccccaagccgcaccggcugaaccacaugggcaucugcuccugcgggcuguacaagcagcccggcgugcccguccgcuggaagcggugaggacuagucccuguucccagagcccacuuuuuuuucuuuuuuugaaauaaaauagccugucuuucagaucucaaaggcucuuuucagagccaccaaaaaaaaaaaaaaaaaaaaaaaaaaaaaaaaaaaaaaaaaaaaaaaaaaaaaaaaaaaaaaaaagaauu

SEQ ID NO: 31628 - RNA, 1714 nt, Artificial Sequence; identical to SEQ ID NO: 31622
  mRNA product Design a-1 (hSL-A64-N5) comprising derived and/or modified sequence from LASV(Pinneo-NIG-1969;Clade I)__AIT17836__GPCmut7 (opt1)

SEQ ID NO: 31629 - RNA, 1714 nt, Artificial Sequence
  mRNA product Design a-1 (hSL-A64-N5) comprising derived and/or modified sequence from LASV(ISTH0009-NIG-2011;Clade II)__AIT17404__GPCmut7 (opt1)
aggagagucccgcagucggcguccagcggcucugcuuguucgugugugugucguugcaggccuuauucaagcuuaccaugggccagaucaucaccuucuuccaggaggugccccacgucaucgaggaggugaugaacaucgugcugaucgcccucagccugcuggccauccucaaggggaucuacaacgucgcgaccugcggccuguucgggcugguguccuuccuccugcugugcggccgcagcugcuccacgaccuacaaggggguguacgagcuccagacccuggagcuggacauggccagccucaacaugaccaugccgcuguccugcacgaagaacaacagccaccacuacaucauggucggcaacgagaccggccuggagcucacccugaccaacacguccaucaucaaccacaaguucugcaaccugagcgacgcccacaagaagaaccucuacgaccacgcccugauguccaucaucagcaccuuccaccuguccauccccaacuucaaccaguacgaggccaugagcugcgacuucaacgggggcaagaucuccgugcaguacaaccucagccacgcguacgccguggacgccgccaaccacugcgggaccaucgcgaacggcguccugcagaccuucaugcggauggccuggggcggguccuacaucgcccuggacagcggcaagggguccugggacugcaucaugacgagcuaccaguaccucaucauccagaacaccaccugggaggaccacugccaguucucccgccccagccccaucggcuaccuggggcugcucagccagcggacccgcgacaucuacaucucccggcgccugcugggcacguucaccuggacccucagcgacuccgagggcaacgagacccccgggggcuacugccugacgcgguggaugcugaucgaggccgagcucaagugcuucgggaacaccgccguggcgaagugcaacgagaagcacgacgaggaguucugcgacaugcugcgccuguucgacuucaacaagcaggccauccggcgccucaagaccccggcccagaugagcauccagcugaucaacaaggccgugaacgcccugaucaacgaccagcucaucaugaagaaccaccuccgggacaucaugggcauccccuacugcaacuacuccaaguacugcuaccugaaccacaccgucacggggaagaccagccugccccgcugcugccugguguccaacggcagcuaccugaacgagacccacuucuccgacgacaucgagcagcaggcggacaacaugaucaccgagcuccugcagaaggaguacauggaccggcagggcaagacgccgcuggggcugguggaccucuucgucuucagcaccuccuucuaccugaucagcaucuuccugcaccucaucaagauccccacccaccgccacaucaccggcaagcccugccccaagccgcaccggcugaaccacauggggaucugcuccugcggccuguacaagcaccccggggugcccgugaaguggaagcgcugaggacuagucccuguucccagagcccacuuuuuuuucuuuuuuugaaauaaaauagccugucuuucagaucucaaaggcucuuuucagagccaccaaaaaaaaaaaaaaaaaaaaaaaaaaaaaaaaaaaaaaaaaaaaaaaaaaaaaaaaaaaaaaaaagaauu

SEQ ID NO: 31630 - RNA, 1714 nt, Artificial Sequence
  mRNA product Design a-1 (hSL-A64-N5) comprising derived and/or modified sequence from LASV(ISTH2010-NIG-2012;Clade II)__AIT17482__GPCmut7 (opt1)
aggagagucccgcagucggcguccagcggcucugcuuguucgugugugugucguugcaggccuuauucaagcuuaccaugggccagaucaucaccuucuuccaggaggugccccacgucaucgaggaggugaugaacaucgugcugaucgcccucagccugcuggccauccucaaggggaucuacaacgucgcgaccugcggccuguucgggcugguguccuuccuccugcugugcggccgcagcugcuccacgaccuacaaggggguguacgagcuccagacccuggagcuggacauggccagccucaacaugaccaugccgcuguccugcacgaagaacaacagccaccacuacaucauggucggcaacgagaccggccuggagcucacccugaccaacacguccaucaucaaccacaaguucugcaaccugagcgacgcccacaagaagaaccucuacgaccacgcccugauguccaucaucagcaccuuccaccuguccauccccaacuucaaccaguacgaggccaugagcugcgacuucaacgggggcaagaucuccgugcaguacaaccucagccacgcguacgccguggacgccgccaaccacugcgggaccaucgcgaacggcguccugcagaccuucaugcggauggccuggggcggguccuacaucgcccuggacagcggcaagggguccugggacugcaucaugacgagcuaccaguaccucaucauccagaacaucaccugggaggaccacugccaguucucccgccccagccccaucggcuaccuggggcugcucagccagcggacccgcgacaucuacaucucccggcgccugcugggcaccuucacguggacccucagcgacuccgagggcaacgagacccccgggggcuacugccugacccgguggaugcugaucgaggccgagcucaagugcuucgggaacacggccguggcgaagugcaacgagaagcacgacgaggaguucugcgacaugcugcgccuguucgacuucaacaagcaggccauccggcgccucaagaccccggcccagaugagcauccagcugaucaacaaggccgugaacgcccugaucaacgaccagcucaucaugaagaaccaccuccgggacaucaugggcauccccuacugcaacuacuccaaguacugcuaccugaaccacaccgucaccgggaagacgagccugccccgcugcugccugguguccaacggcagcuaccugaacgagacccacuucuccgacgacaucgagcagcaggcggacaacaugaucaccgagcuccugcagaaggaguacaucgaccggcagggcaagaccccgcuggggcugguggaccucuucgucuucagcacguccuucuaccugaucagcaucuuccugcaccucgugaagauccccacccaccgccacguggucggcaagcccugccccaagccgcaccggcugaaccacauggggaucugcuccugcggccuguacaagcaccccggggugcccgugaaguggaagcgcugaggacuagucccuguucccagagcccacuuuuuuuucuuuuuuugaaauaaaauagccugucuuucagaucucaaaggcucuuuucagagccaccaaaaaaaaaaaaaaaaaaaaaaaaaaaaaaaaaaaaaaaaaaaaaaaaaaaaaaaaaaaaaaaaagaauu

SEQ ID NO: 31631 - RNA, 1714 nt, Artificial Sequence
  mRNA product Design a-1 (hSL-A64-N5) comprising derived and/or modified sequence from LASV(Lassa virus/H.sapiens-wt/NGA/2015/ISTH_0543;Clade II)__AVO03639__GPCmut7 (opt1)
aggagagucccgcagucggcguccagcggcucugcuuguucgugugugugucguugcaggccuuauucaagcuuaccaugggccagaucaucaccuucuuccaggaggugccccacgucaucgaggaggugaugaacaucgugcugaucgcccucagccugcuggccauccucaaggggaucuacaacgucgcgaccugcggccuguucgggcugguguccuuccuccugcugugcggccgcagcugcuccacgaccuacaaggggguguacgagcuccagacccuggagcuggacauggccaaccucaacaugaccaugccgcugagcugcacgaagaacaacucccaccacuacaucauggucggcaacgagaccggccuggagcucacccugaccaacacgagcaucaucaaccacaaguucugcaaccuguccgacgcccacaagaagaaccucuacgaccacgcccugaugagcaucaucuccaccuuccaccugagcauccccaacuucaaccaguacgaggccauguccugcgacuucaacgggggcaagaucagcgugcaguacaaccucucccacaccuacgcgguggacgccgccaaccacugcgggaccaucgccaacggcguccugcagacguucaugcggauggcguggggcgggagcuacaucgcccuggacuccggcaaggggagcugggacugcaucaugaccuccuaccaguaccucgugauccagaacaccaccugggaggaccacugccaguucagccgccccucccccaucggcuaccuggggcugcucagccagcggacgcgcgacaucuacaucagccggcgccugcugggcaccuucaccuggacccucuccgacagcgagggcaacgagacgcccgggggcuacugccugacccgguggaugcugaucgaggccgagcucaagugcuucgggaacaccgccguggccaagugcaacgagaagcacgacgaggaguucugcgacaugcugcgccuguucgacuucaacaagcaggcgauccggcgccucaagaccccggcccagauguccauccagcugaucaacaaggccgucaacgcccugaucaacgaccagcucaucaugaagaaccaccuccgggacaucaugggcauccccuacugcaacuacagcaaguacugcuaccugaaccacacggugaccgggaagaccucccugccccgcugcugccuggugagcaacggcuccuaccugaacgagacccacuucagcgacgacaucgagcagcaggccgacaacaugaucacggagcuccugcagaaggaguacaucgaccggcagggcaagaccccgcuggggcuggucgaccucuucguguucuccaccagcuucuaccugaucuccaucuuccugcaccucgugaagauccccacccaccgccacaucacgggcaagcccugccccaagccgcaccggcugaaccacauggggaucugcagcugcggccuguacaagcaccccgggguccccgugaaguggaagcgcugaggacuagucccuguucccagagcccacuuuuuuuucuuuuuuugaaauaaaauagccugucuuucagaucucaaaggcucuuuucagagccaccaaaaaaaaaaaaaaaaaaaaaaaaaaaaaaaaaaaaaaaaaaaaaaaaaaaaaaaaaaaaaaaaagaauu

SEQ ID NO: 31632 - RNA, 1714 nt, Artificial Sequence
  mRNA product Design a-1 (hSL-A64-N5) comprising derived and/or modified sequence from LASV(Lassa virus/H.sapiens-wt/NGA/2016/ISTH_0009;Clade II)__AVO03571__GPCmut7 (opt1)
aggagagucccgcagucggcguccagcggcucugcuuguucgugugugugucguugcaggccuuauucaagcuuaccaugggccagaucaucaccuucuuccaggaggugccccacgucaucgaggaggugaugaacaucgugcugaucgcccucagccugcuggccauccucaaggggaucuacaacgucgcgaccugcggccugcuggggcucguguccuuccugcugcucugcggccgcagcugcuccacgaccuacaaggggguguacgagcugcagacccuggagcucgacauggccagccugaacaugaccaugccgcuguccugcacgaagaacaacagccaccacuacaucauggucggcaacgagaccggccucgagcugacccugaccaacacguccaucaucaaccacaaguucugcaaccucagcgacgcccacaagaagaaccuguacgaccacgcccugauguccaucaucagcaccuuccaccucuccauccccaacuucaaccaguacgaggccaugagcugcgacuucaacgggggccggaucuccgugcaguacaaccugagccacuccuacgcgguggacgccgccaaccacugcgggaccaucgccaacggcguccugcagaccuucaugcgcauggcguggggcgggagcuacaucgcccucgacuccggcaaggggagcugggacugcaucaugacguccuaccaguaccugaucauccagaacaccaccugggaggaccacugccaguucagccggcccagccccaucggcuaccuggggcuccugucccagcgcacccgggacaucuacaucagccgccggcugcucggcacguucaccuggacccuguccgacagcgagggcaacgagacccccgggggcuacugccugacgcgcuggaugcucaucgaggccgagcugaagugcuucgggaacaccgccguggccaagugcaacgagaagcacgacgaggaguucugcgacaugcugcggcuguucgacuucaacaagcaggcgauccgccggcugaagaccccggcccagauguccauccagcugaucaacaaggccgugaacgcccucaucaacgaccagcugaucaugaagaaccaccuccgcgacaucaugggcauccccuacugcaacuacagcaaguacugcuaccucaaccacaccgucacggggaagaccucccugccccggugcugccuggugagcaacggcuccuaccucaacgagacccacuucagcgacgacaucgagcagcaggccgacaacaugaucaccgagcugcugcagaaggaguacaucgaccgccagggcaagacgccgcuggggcucguggaccuguucgucuucuccaccagcuucuaccugaucuccaucuuccuccaccuggugaagauccccacccaccggcacaucaccggcaagcccugccccaagccgcaccgccugaaccacauggggaucugcagcugcggccucuacaaccaccccggggugcccgucaaguggaagcggugaggacuagucccuguucccagagcccacuuuuuuuucuuuuuuugaaauaaaauagccugucuuucagaucucaaaggcucuuuucagagccaccaaaaaaaaaaaaaaaaaaaaaaaaaaaaaaaaaaaaaaaaaaaaaaaaaaaaaaaaaaaaaaaaagaauu

SEQ ID NO: 31633 - RNA, 1714 nt, Artificial Sequence
  mRNA product Design a-1 (hSL-A64-N5) comprising derived and/or modified sequence from LASV(Lassa virus/H.sapiens-wt/NGA/2016/ISTH_0017;Clade II)__AVO03567__GPCmut7 (opt1)
aggagagucccgcagucggcguccagcggcucugcuuguucgugugugugucguugcaggccuuauucaagcuuaccaugggccagaucaucaccuucuuccaggaggugccccacgucaucgaggaggugaugaacaucgugcugaucgcccucagccugcuggccauccucaaggggaucuacaacgucgcgaccugcggccuguucgggcugguguccuuccuccugcugugcggccgcagcugcuccacgaccuacaaggggguguacgagcuccagacccuggagcuggacauggccagccucaacaugaccaugccgcuguccugcacgaagaacaacagccaccacuacaucauggucggcaacgagaccggccuggagcucacccugaccaacacguccaucaucaaccacaaguucugcaaccugagcgacgcccacaagaagaaccucuacgaccacgcccugauguccaucaucagcaccuuccaccuguccauccccaacuucaaccaguacgaggccaugagcugcgacuucaacgggggcaagaucuccgugcaguacaaccucagccacaccuacgcgaucgacgccgccaaccacugcgggaccaucgccaacggcgugcugcagacguucaugcggauggcguggggcggguccuacaucgcccuggacagcggcaagggguccugggacugcaucaugaccagcuaccaguaccucaucauccagaacaccaccugggaggaccacugccaguucucccgccccagccccaucggcuaccuggggcugcucagccagcggacgcgcgacaucuacaucucccggcgccugcugggcaccuucaccuggacccucagcgacuccgagggcaacgagacgcccgggggcuacugccugacccgguggaugcugaucgaggccgagcucaagugcuucgggaacaccgccgucgccaagugcaacgagaagcacgacgaggaguucugcgacaugcugcgccuguucgacuucaacaagcaggcgauccggcgccucaagaccccggcccagaugagcauccagcugaucaacaaggccgugaacgcccugaucaacgaccagcucaucaugaagaaccaccuccgggacaucaugggcauccccuacugcaacuacuccaaguacugcuaccugaaccacacggugaccgggaagaccagccugccccgcugcugccuggucuccaacggcagcuaccugaacgagacccacuucuccgacgacaucgagcagcaggccgacaacaugaucacggagcuccugcagaaggaguacauggaccggcagggcaagaccccgcuggggcugguggaccucuucguguucagcaccuccuucuaccugaucagcaucuuccugcaccucguccgcauccccacccaccggcacgugaucggcaagcccugccccaagccgcaccgccugaaccacauggggaucugcuccugcggccuguacaagcaccccggggugcccgucaaguggaagcggugaggacuagucccuguucccagagcccacuuuuuuuucuuuuuuugaaauaaaauagccugucuuucagaucucaaaggcucuuuucagagccaccaaaaaaaaaaaaaaaaaaaaaaaaaaaaaaaaaaaaaaaaaaaaaaaaaaaaaaaaaaaaaaaaagaauu

SEQ ID NO: 31634 - RNA, 1714 nt, Artificial Sequence
  mRNA product Design a-1 (hSL-A64-N5) comprising derived and/or modified sequence from LASV(Lassa virus/H.sapiens-wt/NGA/2018/ISTH_0959;Clade II)__AVV65099__GPCmut7 (opt1)
aggagagucccgcagucggcguccagcggcucugcuuguucgugugugugucguugcaggccuuauucaagcuuaccaugggccagaucaucaccuucuuccaggaggugccccacgucaucgaggaggugaugaacaucgugcugaucgcccucagccugcuggccauccucaaggggaucuacaacgucgugaccugcggccuguucgggcugguguccuuccuccugcugugcggccgcagcugcuccacgaccuacaagggggucuacgagcuccagacccuggagcuggacauggcgagccucaacaugaccaugccgcuguccugcacgaagaacaacagccaccacuacaucauggugggcaacgagaccggccuggagcucacccugaccaacacguccaucaucaaccacaaguucugcaaccugagcgacgcccacaagaagaaccucuacgaccacgcccugauguccaucaucagcaccuuccaccuguccauccccaacuucaaccaguacgaggccaugagcugcgacuucaacgggggcaagaucuccgugcaguacaaccucagccacgccuacgcgaucgacgccgccaaccacugcgggaccaucgccaacggcguccugcagaccuucaugcggauggcguggggcggguccuacaucgcccuggacagcggcaagggguccugggacugcaucaugacgagcuaccaguaccucaucauccagaacaccaccugggaggaccacugccaguucucccgccccagccccaucggcuaccuggggcugcucagccagcggacccgcgacaucuacaucucccggcgccugcugggcacguucaccuggacccucagcgacuccgagggcaacgagacccccgggggcuacugccugacgcgguggaugcugaucgaggccgagcucaagugcuucgggaacaccgccguggccaagugcaacgagaagcacgacgaggaguucugcgacaugcugcgccuguucgacuucaacaagcaggcgauccggcgccucaagaccccggcccagaugagcauccagcugaucaacaaggccgugaacgcccugaucaacgaccagcucaucaugaagaaccaccuccgggacaucaugggcauccccuacugcaacuacuccaaguacugcuaccugaaccacaccgucacggggaagaccagccugccccgcugcugccugguguccaacggcagcuaccugaacgagacccacuucuccgacgacaucgagcagcaggccgacaacaugaucaccgagcuccugcagaaggaguacaucgaccggcagggcaagacgccgcuggggcugguggaccucuucgucuucagcaccuccuucuaccugaucagcaucuuccugcaccucgugaagauccccacccaccgccacgugaucggcaagcccugccccaagccgcaccggcugaaccacauggggaucugcuccugcggccuguacaagcaccccgggguccccgugaaguggaagcgcugaggacuagucccuguucccagagcccacuuuuuuuucuuuuuuugaaauaaaauagccugucuuucagaucucaaaggcucuuuucagagccaccaaaaaaaaaaaaaaaaaaaaaaaaaaaaaaaaaaaaaaaaaaaaaaaaaaaaaaaaaaaaaaaaagaauu

SEQ ID NO: 31635 - RNA, 1714 nt, Artificial Sequence
  mRNA product Design a-1 (hSL-A64-N5) comprising derived and/or modified sequence from LASV(LASV003-NIG-2008;Clade II)__AIT17580__GPCmut7 (opt1)
aggagagucccgcagucggcguccagcggcucugcuuguucgugugugugucguugcaggccuuauucaagcuuaccaugggccagaucaucaccuucuuccaggaggugccccacgucaucgaggaggugaugaacaucgugcugaucgcccucagccugcuggccauccucaaggggaucuacaacgucgcgaccugcggccuguucgggcugguguccuuccuccugcugugcggccgcagcugcuccacgaccuacaaggggguguacgagcuccagacccuggagcuggacauggccagccucaacaugaccaugccgcuguccugcacgaagaacaacagccaccacuacaucauggucggcaacgagaccggccuggagcucacccugaccaacacguccaucaucaaccacaaguucugcaaccugagcgacgcccacaagaagaaccucuacgaccacgcccugauguccaucaucagcaccuuccaccuguccauccccaacuucaaccaguacgaggccaugagcugcgacuucaacgggggcaagaucuccgugcaguacaaccucagccacaccuacgcgguggacgccgccaaccacugcgggaccaucgccaacggcguccugcagacguucaugcggauggcguggggcggguccuacaucgcccuggacagcggcaagggguccugggacugcaucaugaccagcuaccaguaccucaucauccagaacaccaccugggaggaccacugccaguucucccgccccagccccaucggcuaccuggggcugcucagccagcggacgcgcgacaucuacaucucccggcgccugcugggcaccuucaccuggacccucagcgacuccgagagcaacgagacgccgggcggguacugccugacccgguggaugcugaucgaggccgagcucaagugcuucggcaacaccgccguggccaagugcaacgagaagcacgacgaggaguucugcgacaugcugcgccuguucgacuucaacaagcaggcgauccggcgccucaaggcccccgcccagauguccauccagcugaucaacaaggccgugaacgcccugaucaacgaccagcucaucaugaagaaccaccuccgggacaucauggggauccccuacugcaacuacagcaaguacugcuaccugaaccacaccgucacgggccgcaccucccugccccggugcugccuggugagcaacggguccuaccugaacgagacccacuucagcgacgacaucgagcagcaggcggacaacaugaucaccgagcuccugcagaaggaguacauggaccgccagggcaagacgccgcugggccugguggaccucuucgucuucuccaccagcuucuaccugaucuccaucuuccugcaccucgugaagauccccacccaccggcacgugaucgggaagcccugccccaagccgcaccgccugaaccacaugggcaucugcagcugcgggcuguacaagcaccccggcguccccgugaaguggaagcggugaggacuagucccuguucccagagcccacuuuuuuuucuuuuuuugaaauaaaauagccugucuuucagaucucaaaggcucuuuucagagccaccaaaaaaaaaaaaaaaaaaaaaaaaaaaaaaaaaaaaaaaaaaaaaaaaaaaaaaaaaaaaaaaaagaauu

SEQ ID NO: 31636 - RNA, 1714 nt, Artificial Sequence
  mRNA product Design a-1 (hSL-A64-N5) comprising derived and/or modified sequence from LASV(LASV035-NIG-2009;Clade II)__AIT17588__GPCmut7 (opt1)
aggagagucccgcagucggcguccagcggcucugcuuguucgugugugugucguugcaggccuuauucaagcuuaccaugggccagaucaucaccuucuuccaggaggugccccacgucaucgaggaggugaugaacaucgugcugaucgcccucagccugcuggccauccucaaggggaucuacaacgucgcgaccugcggccuguucgggcugguguccuuccuccugcugugcggccgcagcugcuccacgaccuacaaggggguguacgagcuccagacccuggagcuggacauggccagccucaacaugaccaugccgcuguccugcacgaagaacaacagccaccacuacaucauggucggcaacgagaccggccuggagcucacccugaccaacacguccaucaucaaccacaaguucugcaaccugagcgacgcccacaagaagaaccucuacgaccacgcccugauguccaucaucagcaccuuccaccuguccauccccaacuucaaccaguacgaggccaugagcugcgacuucaacgggggcaagaucuccgugcaguacaaccucagccacgcguacgccguggacgccgccaaccacugcgggaccaucgcgaacggcguccugcagaccuucaugcggauggccuggggcggguccuacaucgcccuggacagcggcaagggguccugggacugcaucaugacgagcuaccaguaccucaucauccagaacaccaccugggaggaccacugccaguucucccgccccagccccaucggcuaccuggggcugcucagccagcggacccgcgacaucuacaucucccggcgccugcugggcacguucaccuggacccucagcgacuccgagggcaacgagacccccgggggcuacugccugacgcgguggaugcugaucgaggccgagcucaagugcuucgggaacaccgccguggcgaagugcaacgagaagcacgacgaggaguucugcgacaugcugcgccuguucgacuucaacaagcaggccauccggcgccucaaggccccggcccagaugagcauccagcugaucaacaaggccgugaacgcgcugaucaacgaccagcucaucaugaagaaccaccuccgggacaucaugggcauccccuacugcaacuacuccaaguacugcuaccugaaccacaccgucaccgggaagacgagccugccccgcugcugccugguguccaacggcagcuaccugaacgagacccacuucuccgacgacaucgagcagcaggccgacaacaugaucaccgagcuccugcagaaggaguacaucgaccggcagggcaagaccccgcuggggcugguggaccucuucgucuucagcacguccuucuaccugaucagcaucuuccugcaccucgugaagauccccacccaccgccacgugaucggcaagcccugccccaagccgcaccggcugaaccacauggggaucugcuccugcggccuguacaagcaccccgggguccccgugaaguggaagcgcugaggacuagucccuguucccagagcccacuuuuuuuucuuuuuuugaaauaaaauagccugucuuucagaucucaaaggcucuuuucagagccaccaaaaaaaaaaaaaaaaaaaaaaaaaaaaaaaaaaaaaaaaaaaaaaaaaaaaaaaaaaaaaaaaagaauu

SEQ ID NO: 31637 - RNA, 1714 nt, Artificial Sequence
  mRNA product Design a-1 (hSL-A64-N5) comprising derived and/or modified sequence from LASV(LASV1000-NIG-2009;Clade II)__AIT17782__GPCmut7 (opt1)
aggagagucccgcagucggcguccagcggcucugcuuguucgugugugugucguugcaggccuuauucaagcuuaccaugggccagaucaucaccuucuuccaggaggugccccacgucaucgaggaggugaugaacaucgugcugaucgcccucagccugcuggccauccucaaggggaucuacaacgucgcgaccugcggccuguucgggcugguguccuuccuccugcugugcggccgcagcugcuccacgaccuacaaggggguguacgagcuccagacccuggagcuggacauggccagccucaacaugaccaugccgcuguccugcacgaagaacaacagccaccacuacaucauggucggcaacgagaccggccuggagcucacccugaccaacacguccaucaucaaccacaaguucugcaaccugagcgacgcccacaagaagaaccucuacgaccacgcccugauguccaucaucagcaccuuccaccuguccauccccaacuucaaccaguacgaggccaugagcugcgacuucaacgggggcaagaucuccgugcaguacaaccucagccacaccuacgcgguggacgccgccaaccacugcgggaccaucgccaacggcguccugcagacguucaugcggauggcguggggcggguccuacaucgcccuggacagcggcaagggguccugggacugcaucaugaccagcuaccaguaccucaucauccagaacaccaccugggaggaccacugccaguucucccgccccagccccaucggcuaccuggggcugcucagccagcggacgcgcgacaucuacaucucccggcgccugcugggcaccuucaccuggacccucagcgacuccgagggcaacgagacgcccgggggcuacugccugacccgguggaugcugaucgaggccgagcucaagugcuucgggaacaccgccguggccaagugcaacgagaagcacgacgaggaguucugcgacaugcugcgccuguucgacuucaacaagcaggcgaucaagcggcucaagaccccggcccagaugagcauccagcugaucaacaaggccgugaacgcccugaucaacgaccagcucaucaugaagaaccaccuccgcgacaucaugggcauccccuacugcaacuacuccaaguacugcuaccugaaccacacggucaccgggaagaccagccugccccggugcugccugguguccaacggcagcuaccugaacgagacccacuucuccgacgacaucgagcagcaggccgacaacaugaucacggagcuccugcagaaggaguacaucgaccgccagggcaagaccccgcuggggcugguggaccucuucgucuucagcaccuccuucuaccugaucagcaucuuccugcaccucgugaagauccccacccaccggcacguggucggcaagcccugccccaagccgcaccgccugaaccacauggggaucugcuccugcggccuguacaagcaccccggggugcccgugaaguggaagcggugaggacuagucccuguucccagagcccacuuuuuuuucuuuuuuugaaauaaaauagccugucuuucagaucucaaaggcucuuuucagagccaccaaaaaaaaaaaaaaaaaaaaaaaaaaaaaaaaaaaaaaaaaaaaaaaaaaaaaaaaaaaaaaaaagaauu

SEQ ID NO: 31638 - RNA, 1714 nt, Artificial Sequence
  mRNA product Design a-1 (hSL-A64-N5) comprising derived and/or modified sequence from LASV(LASV221-NIG-2010;Clade II)__AIT17624__GPCmut7 (opt1)
aggagagucccgcagucggcguccagcggcucugcuuguucgugugugugucguugcaggccuuauucaagcuuaccaugggccagaucaucaccuucuuccaggaggugccccacgucaucgaggaggugaugaacaucgugcugaucgcccucagccugcuggccauccucaaggggaucuacaacgucgcgaccugcggccuguucgggcugguguccuuccuccugcugugcggccgcagcugcuccacgaccuacaaggggguguacgagcuccagacccuggagcuggacauggccagccucaacaugaccaugccgcuguccugcacgaagaacaacagccaccacuacaucauggucggcaacgagaccggccuggagcucacccugaccaacacguccaucaucaaccacaaguucugcaaccugagcgacgcccacaagaagaaccucuacgaccacgcccugauguccaucaucagcaccuuccaccuguccauccccaacuucaaccaguacgaggccaugagcugcgacuucaacgggggcaagaucuccgugcaguacaaccucagccacaccuacgcgaucgacgccgccaaccacugcgggaccaucgccaacggcgugcugcagacguucaugcggauggcguggggcggguccuacaucgcccuggacagcggcaagggguccugggacugcaucaugaccagcuaccaguaccucaucauccagaacaccaccugggaggaccacugccaguucucccgccccagccccaucggcuaccuggggcugcucagccagcggacgcgcgacaucuacaucucccggcgccugcugggcaccuucaccuggacccucagcgacuccgagggcaacgagacgcccgggggcuacugccugacccgguggaugcugaucgaggccgagcucaagugcuucgggaacaccgccgucgccaagugcaacgagaagcacgacgaggaguucugcgacaugcugcgccuguucgacuucaacaagcaggcgauccggcgccucaagaccccggcccagaugagcauccagcugaucaacaaggccgugaacgcccugaucaacgaccagcucaucaugaagaaccaccuccgggacaucaugggcauccccuacugcaacuacuccaaguacugcuaccugaaccacacggugaccgggaagaccagccugccccgcugcugccuggucuccaacggcagcuaccugaacgagacccacuucuccgacgacaucgagcagcaggccgacaacaugaucacggagaugcuccagaaggaguacauggaccggcagggcaagaccccgcuggggcugguggaccuguucguguucagcaccuccuucuaccucaucagcaucuuccugcaccuggucaagauccccacccaccgccacgugaucggcaagcccugccccaagccgcaccggcucaaccacauggggaucugcuccugcggccuguacaagcaccccggggugcccgucaaguggaagcgcugaggacuagucccuguucccagagcccacuuuuuuuucuuuuuuugaaauaaaauagccugucuuucagaucucaaaggcucuuuucagagccaccaaaaaaaaaaaaaaaaaaaaaaaaaaaaaaaaaaaaaaaaaaaaaaaaaaaaaaaaaaaaaaaaagaauu

SEQ ID NO: 31639 - RNA, 1714 nt, Artificial Sequence
  mRNA product Design a-1 (hSL-A64-N5) comprising derived and/or modified sequence from LASV(LASV237-NIG-2010;Clade II)__AIT17638__GPCmut7 (opt1)
aggagagucccgcagucggcguccagcggcucugcuuguucgugugugugucguugcaggccuuauucaagcuuaccaugggccagaucaucaccuucuuccaggaggugccccacgucaucgaggaggugaugaacaucgugcugaucgcccucagccugcuggccauccucaaggggaucuacaacgucgcgaccugcggccuguucgggcugguguccuuccuccugcugugcggccgcagcugcuccacgaccuacaaggggguguacgagcuccagacccuggagcuggacauggccagccucaacaugaccaugccgcuguccugcacgaagaacaacagccaccacuacaucauggucggcaacgagaccggccuggagcucacccugaccaacacguccaucaucaaccacaaguucugcaaccugagcgacgcccacaagaaggaccucuacgaccacgcccugauguccaucaucagcaccuuccaccuguccauccccaacuucaaccaguacgaggccaugagcugcgacuucaacgggggcaagaucuccgugcaguacaaccucagccacaccuacgcgguggacgccgccaaccacugcgggaccaucgccaacggcguccugcagacguucaugcggauggcguggggcggguccuacaucgcccuggacagcggcaagggguccugggacugcaucaugaccagcuaccaguaccucaucauccagaacaccaccugggaggaccacugccaguucucccgccccagccccaucggcuaccuggggcugcucagccagcggacgcgcgacaucuacaucucccggcgccugcugggcaccuucaccuggacccucagcgacuccgagggcaacgagacgcccgggggcuacugccugacccgguggaugcugaucgaggccgagcucaagugcuucgggaacaccgccguggccaagugcaacgagaagcacgacgaggaguucugcgacaugcugcgccuguucgacuucaacaagcaggcgauccggcgccucaagaccccggcccagaugagcauccagcugaucaacaaggccgugaacgcccugaucaacgaccagcucaucaugaagaaccaccuccgggacaucaugggcauccccuacugcaacuacuccaaguacugcuaccugaaccacacggucaccgggaagaccagccugccccgcugcugccugguguccaacggcagcuaccugaacgagacccacuucuccgacgacaucgagcagcaggccgacaacaugaucacggagcuccugcagaaggaguacauggaccggcagggcaagaccccgcuggggcugguggaccucuucgucuucagcaccuccuucuaccugaucagcaucuuccugcaccucaucaagauccccacccaccgccacaucacgggcaagcccugccccaagccgcaccggcugaaccacauggggaucugcuccugcggccuguacaagcaccccggggugcccgugaaguggaagcgcugaggacuagucccuguucccagagcccacuuuuuuuucuuuuuuugaaauaaaauagccugucuuucagaucucaaaggcucuuuucagagccaccaaaaaaaaaaaaaaaaaaaaaaaaaaaaaaaaaaaaaaaaaaaaaaaaaaaaaaaaaaaaaaaaagaauu

SEQ ID NO: 31640 - RNA, 1714 nt, Artificial Sequence
  mRNA product Design a-1 (hSL-A64-N5) comprising derived and/or modified sequence from LASV(LASV253-NIG-2011;Clade II)__AIT17670__GPCmut7 (opt1)
aggagagucccgcagucggcguccagcggcucugcuuguucgugugugugucguugcaggccuuauucaagcuuaccaugggccagaucaucaccuucuuccaggaggugccccacgucaucgaggaggugaugaacaucgugcugaucgcccucagccugcuggccauccucaaggggaucuacaacgucgcgaccugcggccuguucgggcugguguccuuccuccugcugugcggccgcagcugcuccacgaccuacaaggggguguacgagcuccagacccuggagcuggacauggccagccucaacaugaccaugccgcuguccugcacgaagaacaacagccaccacuacaucauggucggcaacgagaccggccuggagcucacccugaccaacacguccaucaucaaccacaaguucugcaaccugagcgacgcccacaagaagaaccucuacgaccacgcccugauguccaucaucagcaccuuccaccuguccauccccaacuucaaccaguacgaggccaugagcugcgacuucaacgggggcaagaucuccgugcaguacaaccucagccacaccuacgcgguggacgccgccaaccacugcgggaccaucgccaacggcguccugcagacguucaugcggauggcguggggcggguccuacaucgcccuggacagcggcaagggguccugggacugcaucaugaccagcuaccaguaccucaucauccagaacaccaccugggaggaccacugccaguucucccgccccagccccaucggcuaccuggggcugcucagccagcggacgcgcgacaucuacaucucccggcgccugcugggcaccuucaccuggacccucagcgacuccgagggcaacgagacgcccgggggcuacugccugacccgguggaugcugaucgaggccgagcucaagugcuucgggaacaccgccguggccaagugcaacgagaagcacgacgaggaguucugcgacaugcugcgccuguucgacuucaacaagcaggcgauccggcgccucaaggccccggcccagaugagcauccagcugaucaacaaggccgugaacgcccugaucaacgaccagcucaucaugaagaaccaccuccgggacaucaugggcauccccuacugcaacuacuccaaguacugcuaccugaaccacaccgucacggggcgcaccagccugccccggugcugccugguguccaacggcagcuaccugaacgagacccacuucuccgacgacaucgagcagcaggcggacaacaugaucaccgagcuccugcagaaggaguacaucgaccgccagggcaagacgccgcuggggcugguggaccucuucgucuucagcaccuccuucuaccugaucagcaucuuccugcaccucgugaagauccccacccaccggcacaucaucggcaagcccugccccaagccgcaccgccugaaccacauggggaucugcuccugcggccuguacaagcaccccggggugcccgucaaguggaagcggugaggacuagucccuguucccagagcccacuuuuuuuucuuuuuuugaaauaaaauagccugucuuucagaucucaaaggcucuuuucagagccaccaaaaaaaaaaaaaaaaaaaaaaaaaaaaaaaaaaaaaaaaaaaaaaaaaaaaaaaaaaaaaaaaagaauu

SEQ ID NO: 31641 - RNA, 1714 nt, Artificial Sequence
  mRNA product Design a-1 (hSL-A64-N5) comprising derived and/or modified sequence from LASV(LASV254-NIG-2011;Clade II)__AIT17674__GPCmut7 (opt1)
aggagagucccgcagucggcguccagcggcucugcuuguucgugugugugucguugcaggccuuauucaagcuuaccaugggccagaucaucaccuucuuccaggaggugccccacgucaucgaggaggugaugaacaucgugcugaucgcccucagccugcuggccauccucaaggggaucuacaacgucgcgaccugcggccuguucgggcugguguccuuccuccugcugugcggccgcagcugcuccacgaccuacaaggggguguacgagcuccagacccuggagcuggacaugaccaaccucaacaugacgaugccgcugagcugcaccaagaacaacucccaccacuacaucauggucggcaacgagaccggccuggagcucacccugacgaacaccagcaucaucaaccacaaguucugcaaccuguccgacgcccacaagaagaaccucuacaaccacgcccugaugagcaucaucuccaccuuccaccugagcauccccaacuucaaccaguacgaggccauguccugcgacuucaacgggggcaagaucagcgugcaguacaaccucucccacagcuacgccguggacgcggccaaccacugcgggaccaucgccaacggcguccugcagacguucaugcggauggccuggggcggguccuacaucgcgcuggacagcggcaaggggaacugggacugcaucaugaccuccuaccaguaccucaucauccagaacaccaccugggaggaccacugccaguucagccgccccucccccaucggcuaccuggggcugcucagccagcggacgcgcgacaucuacaucagccggcgccugcugggcaccuucaccuggacccucuccgacagcgagggcaacgagacgcccgggggcuacugccugacccgguggaugcugaucgaggccgagcucaagugcuucgggaacaccgccguggccaagugcaacgagaagcacgacgaggaguucugcgacaugcugcgccuguucgacuucaacaagcaggccauccggcgccucaagaccccggcgcaggccaacauccagcugaucaacaaggccgugaacgcccugaucaacgaccagcucaucaugaagaaccaccuccgggacaucaugggcauccccuacugcaacuacuccaaguacugcuaccugaaccacacggucaccgggaagaccagccugccccgcugcugccugguguccaacggcagcuaccugaacgagacccacuucuccgacgacaucgagcagcaggccgacaacaugaucacggagcuccugcagaaggaguacauggaccggcagggcaagaccccgcuggggcugguggaccucuucgucuucagcaccuccuucuaccugaucagcaucuuccugcaccucgugaagauccccacccaccgccacgugaucggcaagcccugccccaagccgcaccggcugaaccacauggggaucugcuccugcggccuguacaagcaccccgggguccccgugaaguggaagcgcugaggacuagucccuguucccagagcccacuuuuuuuucuuuuuuugaaauaaaauagccugucuuucagaucucaaaggcucuuuucagagccaccaaaaaaaaaaaaaaaaaaaaaaaaaaaaaaaaaaaaaaaaaaaaaaaaaaaaaaaaaaaaaaaaagaauu

SEQ ID NO: 31642 - RNA, 1714 nt, Artificial Sequence
  mRNA product Design a-1 (hSL-A64-N5) comprising derived and/or modified sequence from LASV(Nig08-A19;Clade III)__ADU56618__GPCmut7 (opt1)
aggagagucccgcagucggcguccagcggcucugcuuguucgugugugugucguugcaggccuuauucaagcuuaccaugggccagaucgugaccuucuuccaggaggucccccacgugaucgaggaggugaugaacaucguccugaucgcccucagcauccuggccauccugaaggggcucuacaacaucgcgaccugcggccugaucgggcuggugacguuccuccugcuguccggccgcagcugcuccaugaccuacaaggggguguacgagcuccagacccuggagcugaacaugaacacccucaacaugacgaugccgcugagcugcaccaagaacaacucccaccacuacaucauggucggcaacgagaccggccuggagcucacccugacgaacaccagccugcuccaccacaaguucugcaaccuguccgacgcccacaagaagaaccuguacgaccacacccucaugagcaucaucuccaccuuccaccugagcauccccaacuucaaccaguacgaggccauguccugcgacuucaacgggggcaagaucacggugcaguacaaccugagccacuccuacgccaucgacgccgcgaaccacugcgggaccguggccaacggcguccuccagaccuucaugcggauggccuggggcgggagcuacaucgcccuggacuccggccgcgggaagugggacugcaucaugaccagcuaccaguaccugaucauccagaacacgaccugggaggaccacugccaguucucccggcccagccccaucggcuaccucgggcugcugucccagcgcacccgggacaucuacaucagccgccggcuccugggcaccuucacguggacccugagcgacuccgagggcaacgagacccccgggggcuacugccucacccgcuggaugcugaucgaggcggagcugaagugcuucgggaacacggccguggccaagugcaacgagaagcacgacgaggaguucugcgacaugcuccggcuguucgacuucaacaagcaggccauccgccggcugaaggccccggcgcagaugagcauccagcucaucaacaaggccgugaacgcccugaucaacgaccagcugaucaugaagaaccaccuccgcgacaucaugggcauccccuacugcaacuacuccaaguacugcuaccugaaccacaccagcaccgggcggaccucccugccccgcugcugccucgucagcaacggcuccuaccugaacgagacgcacuucagcgacgacaucgagcagcaggccgacaacaugaucaccgagaugcugcagaaggaguaccuggaccggcagggcaagaccccgcucgggcugguggaccuguucguguucuccaccagcuucuaccucaucuccaucuuccugcaccuggucaagauccccacgcaccgccacaucgugggcaagcccugccccaagccgcaccggcucaaccacauggggaucugcagcugcggccuguacaagcagcccggggugcccguccgcuggaagcggugaggacuagucccuguucccagagcccacuuuuuuuucuuuuuuugaaauaaaauagccugucuuucagaucucaaaggcucuuuucagagccaccaaaaaaaaaaaaaaaaaaaaaaaaaaaaaaaaaaaaaaaaaaaaaaaaaaaaaaaaaaaaaaaaagaauu

SEQ ID NO: 31643 - RNA, 1717 nt, Artificial Sequence
  mRNA product Design a-1 (hSL-A64-N5) comprising derived and/or modified sequence from LASV(G1180-SLE-2010;Clade IV)__AIT17168__GPCmut7 (opt1)
aggagagucccgcagucggcguccagcggcucugcuuguucgugugugugucguugcaggccuuauucaagcuuaccaugggccagaucgugaccuucuuccaggaggucccccacgugaucgaggaggugaugaacaucguccugaucgcccucagcauccuggccgugcugaaggggcucuacaacuucgcgaccugcggccugguggggcugcucacguuccugcugcucugcggccgcuccugcaccgccagccgguacaagggggucuacgagcugcagacccuggagcucaacauggagacccugaacaugacgaugccgcuguccugcaccaagaacaacagccaccacuacaucauggugggcaacgagaccggccucgagcugacccugacgaacaccuccaucaucaaccacaaguucugcaaccucagcgacgcccacaagaagaaccuguacgaccacgcccugauguccaucaucagcaccuuccaccucuccauccccaacuucaaccaguacgaggccaugagcugcgacuucaacgggggcaagaucuccgugcaguacaaccugagccacuccuacgcgggggacgccgccaaccacugcggcaccgucgccaacggggugcugcagacguucaugcgcauggcguggggcggcagcuacaucgcccucgacuccgggcacggcagcugggacugcaucaugaccuccuaccaguaccugaucauccagaacaccaccugggaggaccacugccaguucagccggcccucccccaucggguaccugggccuccugagccagcgcacgcgggacaucuacaucagccgccggcugcucggcaccuucaccuggacccuguccgacagcgaggggaaggacacgccgggcggguacugccugacccgcuggaugcucaucgaggccgagcugaagugcuucggcaacaccgccguggccaagugcaacgagaagcacgacgaggaguucugcgacaugcugcggcuguucgacuucaacaagcaggcgauccagcgccugaaggcccccgcccagauguccauccagcugaucaacaaggccgucaacgcccucaucaacgaccagcugaucaugaagaaccaccuccgggacaucauggggauccccuacugcaacuacagcaaguacugcuaccucaaccacaccacgaccggcaagaccucccugcccaagugcugccuggugagcaacggcuccuaccucaacgagacccacuucagcgacgacaucgagcagcaggcggacaacaugaucacggagaugcugcagaaggaguacauggagcgccaggggaagaccccgcugggccugguggaccucuucgucuucuccaccagcuucuaccugaucuccaucuuccugcaccucgugaagauccccacccaccggcacaucgugggcaagagcugccccaagccccaccgccugaaccacauggggaucugcuccugcgggcuguacaagcagccgggcguccccgugaaguggaagcggugaggacuagucccuguucccagagcccacuuuuuuuucuuuuuuugaaauaaaauagccugucuuucagaucucaaaggcucuuuucagagccaccaaaaaaaaaaaaaaaaaaaaaaaaaaaaaaaaaaaaaaaaaaaaaaaaaaaaaaaaaaaaaaaaagaauu

SEQ ID NO: 31644 - RNA, 1717 nt, Artificial Sequence
  mRNA product Design a-1 (hSL-A64-N5) comprising derived and/or modified sequence from LASV(G1442-SLE-2011;Clade IV)__AIT17180__GPCmut7 (opt1)
aggagagucccgcagucggcguccagcggcucugcuuguucgugugugugucguugcaggccuuauucaagcuuaccaugggccagaucgugaccuucuuccaggaggucccccacgugaucgaggaggugaugaacaucguccugaucgcccucagcauccuggccgugcugaaggggcucuacaacguggcgaccugcggccugaucgggcuggucacguuccuccugcugugcggccgcuccugcaccaccacccucuacaaggggguguacgagcugcagacgcuggagcucaacauggagacccugaacaugaccaugccgcugagcugcaccaagaacaacucccaccacuacauccgggugggcaacgagacgggccucgagcugacccugaccaacaccagcaucaucaaccacaaguucugcaaccucuccgacgcccacaagaagaaccuguacgaccacgcccugaugagcaucaucuccacguuccaccucagcauccccaacuucaaccaguacgaggccauguccugcgacuucaacgggggcaagaucagcguccaguacaaccugucccacagcuacgccggggacgcggccaaccacugcggcaccguggccaacggggugcugcagaccuucaugcgcauggccuggggcggcuccuacaucgcgcucgacagcgggcggggcaacugggacugcaucaugaccuccuaccaguaccugaucauccagaacacgaccugggacgaccacugccaguucagccgccccucccccaucggguaccugggccuccugagccagcggacccgcgacgucuacaucucccggcgccugcucggcaccuucacguggacccugagcgacagcgaggggaaggacaccccgggcggguacugccugacccgguggaugcucaucgaggccgagcugaagugcuucggcaacacggccguggccaagugcaacgagaagcacgacgaggaguucugcgacaugcugcgccucuucgacuucaacaagcaggccauccagcggcugaaggcgcccgcccagauguccauccagcugaucaacaaggccgugaacgcccucaucaacgaccagcugaucaugaagaaccaccuccgcgacaucauggggauccccuacugcaacuacagcaaguacugcuaccugaacaacaccgccaccggcaagaccucccugcccaagugcugccugaucagcaacggcuccuaccucaacgagacgcacuucagcgacgacaucgagcaggaggcggacaacaugaucaccgagaugcugcagaaggaguacauggagcggcaggggaagaccccgcugggccuggucgaccucuucguguucuccaccagcuucuaccugaucuccaucuuccugcaccucgugaagauccccacgcaccgccacaucgucggcaagagcugccccaagccccaccggcugaaccacauggggaucugcuccugcgggcuguacaagcagccgggcgugcccgugcgcuggaagcggugaggacuagucccuguucccagagcccacuuuuuuuucuuuuuuugaaauaaaauagccugucuuucagaucucaaaggcucuuuucagagccaccaaaaaaaaaaaaaaaaaaaaaaaaaaaaaaaaaaaaaaaaaaaaaaaaaaaaaaaaaaaaaaaaagaauu

SEQ ID NO: 31645 - RNA, 1717 nt, Artificial Sequence
  mRNA product Design a-1 (hSL-A64-N5) comprising derived and/or modified sequence from LASV(G3010-SLE-2013;Clade IV)__AIT17344__GPCmut7 (opt1)
aggagagucccgcagucggcguccagcggcucugcuuguucgugugugugucguugcaggccuuauucaagcuuaccaugggccagaucgugaccuucuuccaggaggucccccacgugaucgaggaggugaugaacaucguccugaucgcccucagcauccuggccgugcugaaggggcucuacaacuucgcgaccugcggccugguggggcuggucacguuccuccugcugugcggccgcuccugcaccaccagccucuacaaggggguguacgagcugcagacccuggagcucaacauggagacgcugaacaugaccaugccgcuguccugcaccaagaacaacagccaccacuacaucauggugggcaacgagaccggccucgagcugacgcugaccaacaccuccaucaucaaccacaaguucugcaaccucagcgacgcccacaagaagaaccuguacaaccacgcccugauguccaucaucagcaccuuccaccucuccauccccaacuucaaccaguacgaggccaugagcugcgacuucaacgggggcaagaucuccguccaguacaaccugagccacuccuacgccggggacgcggccagccacugcggcacgguggccaacggggugcugcagaccuucaugcggauggccuggggcggcuccuacaucgcgcucgacagcggguacggcaagugggacugcaucaugaccuccuaccaguaccugaucauccagaacaccacgugggaggaccacugccaguucagccgccccucccccaucggguaccugggccuccugagccagcggacccgcgacaucuacaucagccggcgccugcucggcaccuucaccuggacgcuguccgacagcgaggggaaggacaccccgggcggguacugccugacccgguggaugcucaucgaggccgagcugaagugcuucggcaacaccgccgucgccaagugcaacgagaagcacgacgaggaguucugcgacaugcugcgccucuucgacuucaacaagcaggccauccagcggcugaagacgcccgcgcagauguccauccagcugaucaacaaggccgugaacgcccucaucaacgaccagcugaucaugaagaaccaccuccgcgacaucauggggauccccuacugcaacuacagcaaguacugcuaccugaaccacaccaccaccggcaagacgucccugcccaagugcugccuggugagcaacggcuccuaccucaacgagacccacuucagcgacgacaucgagcagcaggccgacaacaugaucaccgagaugcugcagaaggaguacauggagcggcaggggaagaccccgcugggccuggucgaccucuucguguucuccacgagcuucuaccugaucuccaucuuccugcaccucgugaagauccccacccaccgccacaucgucggcaagagcugccccaagccccaccggcugaaccacauggggaucugcuccugcgggcuguacaagcagccgggcgugcccgugcgcuggaagcggugaggacuagucccuguucccagagcccacuuuuuuuucuuuuuuugaaauaaaauagccugucuuucagaucucaaaggcucuuuucagagccaccaaaaaaaaaaaaaaaaaaaaaaaaaaaaaaaaaaaaaaaaaaaaaaaaaaaaaaaaaaaaaaaaagaauu

SEQ ID NO: 31646 - RNA, 1717 nt, Artificial Sequence
  mRNA product Design a-1 (hSL-A64-N5) comprising derived and/or modified sequence from LASV(G502-SLE-2009;Clade IV)__AIT17126__GPCmut7 (opt1)
aggagagucccgcagucggcguccagcggcucugcuuguucgugugugugucguugcaggccuuauucaagcuuaccaugggccagaucgugaccuucuuccaggaggucccccacgugaucgaggaggugaugaacaucguccugaucgcccucagcauccuggccgugcugaaggggcucuacaacuucgcgaccugcggccugguggggcugcucacguuccugcugcucugcggccgcuccugcaccaccgggcuguacaagggcgucuacgagcugcagacccucgagcugaacauggagacgcugaacaugaccaugccgcucagcugcaccaagaacaacucccaccacuacaucauggugggcaacgagaccgggcuggagcugacgcucaccaacaccagcaucaucaaccacaaguucugcaaccuguccgacgcccacaagaagaaccuguacgaccacgcccucaugagcaucaucuccaccuuccaccugagcauccccaacuucaaccaguacgaggccauguccugcgacuucaacggcgggaagaucagcgugcaguacaaccugucccacagcuacgccggcgacgcggccgaccacugcgggacggucgccaacggcgugcuccagaccuucaugcggauggccuggggcggguccuacaucgcgcuggacagcggccgcgggcggugggacugcaucaugaccuccuaccaguaccugaucauccagaacaccacgugggaggaccacugccaguucagccgccccucccccaucggcuaccucggccugcugagccagcggacccgcgacaucuacaucucccggcgccuccuggggaccuucaccuggacgcugagcgacagcgagggcaaggacacccccgggggcuacugccucacccgguggaugcugaucgaggccgagcugaagugcuucgggaacaccgccguggccaagugcaacgagaagcacgacgaggaguucugcgacaugcuccgccuguucgacuucaacaagcaggccauccagcggcugaaggcgccggcccagauguccauccagcucaucaacaaggccgucaacgcccugaucaacgaccagcuggugaugaagaaccaccuccgcgacaucaugggcauccccuacugcaacuacagccgguacugcuaccugaaccacacgaccaccggccgcaccucccugcccaagugcugccucgugagcaacggguccuaccugaacgagacgcacuucagcgacgacaucgagcagcaggccgacaacaugaucaccgagaugcugcagaaggaguacauggagcggcagggcaagaccccgcuggggcucgucgaccuguucguguucuccaccagcuucuaccugaucuccaucuuccuccaccuggugaagauccccacgcaccgccacaucgucggcaagagcugccccaagccccaccggcugaaccacauggggaucugcuccugcggccucuacaagcagccgggcgugcccgugaaguggaagcgcugaggacuagucccuguucccagagcccacuuuuuuuucuuuuuuugaaauaaaauagccugucuuucagaucucaaaggcucuuuucagagccaccaaaaaaaaaaaaaaaaaaaaaaaaaaaaaaaaaaaaaaaaaaaaaaaaaaaaaaaaaaaaaaaaagaauu

SEQ ID NO: 31647 - RNA, 1717 nt, Artificial Sequence
  mRNA product Design a-1 (hSL-A64-N5) comprising derived and/or modified sequence from LASV(G733-SLE-2010;Clade IV)__AIT17154__GPCmut7 (opt1)
aggagagucccgcagucggcguccagcggcucugcuuguucgugugugugucguugcaggccuuauucaagcuuaccaugggccagaucgugaccuucuuccaggaggucccccacgugaucgaggaggugaugaacaucguccugaucgcccucagcauccuggccgugcugaaggggcucuacaacuucgcgaccugcggcaucguggggcuggucuccuuccugcuccugugcggccgcagcugcacgaccucccuguacaaggggguguacgagcuccagacccuggagcugaacauggagacccucaacaugacgaugccgcugagcugcaccaagaacaacucccaccacuacaucauggugggcaacgagaccggccuggagcucacccugacgaacaccagcaucaucaaccacaaguucugcaaccuguccgacgcccacaagaagaaccucuacgaccacgcccugaugagcaucaucuccaccuuccaccugagcauccccaacuucaaccaguacgaggccauguccugcgacuucaacgggggcaagaucagcguccaguacaaccucucccacagcuacgccggggacgcggccaaccacugcggcaccaucgccaacggggugcugcagacguucaugcggauggccuggggcggcuccuacaucgcgcuggacagcgggcgcgaccggugggacugcaucaugaccuccuaccaguaccucaucauccagaacaccaccugggaggaccacugccaguucagccgccccucccccaucggcuaccuggggcugcucagccagcggacgcgcgacaucuacaucagccggcgccugcugggcaccuucaccuggacccucuccgacagcgagggcaaggacacgcccgggggcuacugccugacccgguggaugcugaucgaggccgagcucaagugcuucgggaacaccgccguggccaagugcaacgagaagcacgacgaggaguucugcgacaugcugcgccuguucgacuucaacaagcaggccauccagcggcucaaggcgccggcccagauguccauccagcugaucaacaaggccgucaacgcccugaucaacgaccagcucaucaugaagaaccaccuccgcgacaucaugggcauccccuacugcaacuacagcaaguacugcuaccugaaccacaccacgaccgggaagaccucccugcccaagugcugccuggugagcaacggcuccuaccugaacgagacccacuucagcgacgacaucgagcagcaggccgacaacaugaucacggagaugcuccagaaggaguacauggagcggcagggcaagaccccgcuggggcugguggaccuguucgucuucuccaccagcuucuaccucaucuccaucuuccugcaccuggugaagauccccacccaccgccacguggucggcaagagcugccccaagccccaccggcucaaccacauggggaucugcuccugcggccuguacgggcagccgggcgugcccgugaaguggaagcgcugaggacuagucccuguucccagagcccacuuuuuuuucuuuuuuugaaauaaaauagccugucuuucagaucucaaaggcucuuuucagagccaccaaaaaaaaaaaaaaaaaaaaaaaaaaaaaaaaaaaaaaaaaaaaaaaaaaaaaaaaaaaaaaaaagaauu

SEQ ID NO: 31648 - RNA, 1717 nt, Artificial Sequence
  mRNA product Design a-1 (hSL-A64-N5) comprising derived and/or modified sequence from MOPV/LASV reassortant(IGS-1;Clade IV)__AFY05576__GPCmut7 (opt1)
aggagagucccgcagucggcguccagcggcucugcuuguucgugugugugucguugcaggccuuauucaagcuuaccaugggccagaucgugaccuucuuccaggaggucccccacgugaucgaggaggugaugaacaucguccugaucgcccucagcgugcuggccgugcugaaggggcucuacaacuucgcgaccugcggccuggucgggcuggugacguuccuccugcugugcggccgcuccugcaccaccagccucuacaaggggguguacgagcugcagacccuggagcucaacauggagacgcugaacaugaccaugccgcuguccugcaccaagaacaacagccaccacuacaucauggucggcaacgagaccggccucgagcugacgcugaccaacaccuccaucaucaaccacaaguucugcaaccucagcgacgcccacaagaagaaccuguacgaccacgcccugauguccaucaucagcaccuuccaccucuccauccccaacuucaaccaguacgaggccaugagcugcgacuucaacgggggcaagaucuccgugcaguacaaccugagccacuccuacgccggggacgcggccaaccacugcggcacgguggccaacgggguccugcagaccuucaugcggauggccuggggcggcagcuacaucgcgcucgacuccgggcgcggcaacugggacugcaucaugaccagcuaccaguaccugaucauccagaacaccacgugggaggaccacugccaguucucccggcccagccccaucggguaccugggccuccugucccagcgcacccgggacaucuacaucagccgccggcugcucggcaccuucaccuggacgcugagcgacuccgagggggaggacaccccgggcggguacugccugacccgcuggaugcucaucgaggccgagcugaagugcuucggcaacaccgccguggccaagugcaacgagaagcacgacgaggaguucugcgacaugcugcggcuguucgacuucaacaagcaggccauccagcgccugaaggcgcccgcccagaugagcauccagcugaucaacaaggccgugaacgcccucaucaacgaccagcugaucaugaagaaccaccuccgggacaucauggggauccccuacugcaacuacuccaaguacugcuaccucaaccacacgaccaccggccgcaccagccugcccaagugcugccuggucuccaacggcagcuaccucaacgagacgcacuucuccgacgacaucgagcagcaggccgacaacaugaucaccgagaugcugcagaaggaguacauggagcggcaggggaagaccccgcugggccugguggaccucuucguguucagcaccuccuucuaccugaucagcaucuuccugcaccucgucaagauccccacgcaccgccacaucguggggaaguccugccccaagccccaccggcugaaccacaugggcaucugcagcugcgggcuguacaagcagccgggcgugcccgucaaguggaagcgcugaggacuagucccuguucccagagcccacuuuuuuuucuuuuuuugaaauaaaauagccugucuuucagaucucaaaggcucuuuucagagccaccaaaaaaaaaaaaaaaaaaaaaaaaaaaaaaaaaaaaaaaaaaaaaaaaaaaaaaaaaaaaaaaaagaauu

SEQ ID NO: 31649 - RNA, 1717 nt, Artificial Sequence
  mRNA product Design a-1 (hSL-A64-N5) comprising derived and/or modified sequence from LASV(LM765-SLE-2012;Clade IV)__AIT17814__GPCmut7 (opt1)
aggagagucccgcagucggcguccagcggcucugcuuguucgugugugugucguugcaggccuuauucaagcuuaccaugggccagaucgugaccuucuuccaggaggucccccacgugaucgaggaggugaugaacaucguccugaucgcccucagcauccuggccgugcugaaggggcucuacaacuucgcgaccugcggccugguggggcuggucacguuccuccugcugugcggccgcuccugcaccaccagccucuacaaggggguguacgagcugcagacccuggagcucaacauggagacgcugaacaugaccaugccgcuguccugcaccaagaacaacagccaccacuacaucauggugggcaacgagaccggccucgagcugacgcugaccaacaccuccaucaucgaccacaaguucugcaaccucagcgacgcccaccggaagaaccuguacgaccacgcccugauguccaucaucagcaccuuccaccucuccauccccaacuucaaccaguacgaggccaugagcugcgacuucaacgggggcaagaucuccguccaguacaaccugagccacuccuacgccaaggacgcggccgaccacugcgggacgguggccaacggcgugcugcagaccuucaugcgcauggccuggggcgggagcuacaucgcgcucgacuccggccgggggcgcugggacugcaucaugaccagcuaccaguaccugaucauccagaacaccacgugggaggaccacugccaguucucccggcccagccccaucggcuaccuggggcuccugucccagcgcacccgggacaucuacaucagccgccggcugcucggcaccuucaccuggacgcugagcgacuccgagggcaaggacacccccgggggcuacugccugacccgcuggaugcucaucgaggccgagcugaagugcuucgggaacaccgccgucgccaagugcaacgagaagcacgacgaggaguucugcgacaugcugcggcuguucgacuucaacaagcaggccauccagcgccugaaggcgccggcccagaugagcauccagcugaucaacaaggccgugaacgcccucaucaacgaccagcugaucaugaagaaccaccuccgggacaucaugggcauccccuacugcaacuacuccaaguacugcuaccucaaccacacgaccaccgggaagaccagccugcccaagugcugccugguguccaacggcagcuaccucaacgagacgcacuucuccgacgacaucgagcagcaggccgacaacaugaucaccgagaugcugcagaaggaguacauggagcgccagggcaagaccccgcuggggcuggucgaccucuucguguucagcaccuccuucuaccugaucagcaucuuccugcaccucgugaagauccccacgcaccggcacaucgucggcaagcccugccccaagccgcaccgccugaaccacauggggaucugcuccugcggccuguacaagcagcccggggugcccgugaaguggaagcggugaggacuagucccuguucccagagcccacuuuuuuuucuuuuuuugaaauaaaauagccugucuuucagaucucaaaggcucuuuucagagccaccaaaaaaaaaaaaaaaaaaaaaaaaaaaaaaaaaaaaaaaaaaaaaaaaaaaaaaaaaaaaaaaaagaauu

SEQ ID NO: 31650 - RNA, 1717 nt, Artificial Sequence
  mRNA product Design a-1 (hSL-A64-N5) comprising derived and/or modified sequence from LASV(LM776-SLE-2012;Clade IV)__AIT17824__GPCmut7 (opt1)
aggagagucccgcagucggcguccagcggcucugcuuguucgugugugugucguugcaggccuuauucaagcuuaccaugggccagaucgugaccuucuuccaggaggucccccacgugaucgaggaggugaugaacaucguccugaucgcccucagcauccuggccgugcugaaggggcucuacaacuucgcgaccugcggccugguggggcuggucacguuccuccugcugugcggccgcuccugcaccaccagcguguacaaggggguguacgagcuccagacccuggagcugaacauggagacgcucaacaugaccaugccgcuguccugcaccaagaacaacagccaccacuacaucauggucggcaacgagaccggccuggagcucacgcugaccaacaccuccaucaucaaccacaaguucugcaaccugagcgacgcccacaagaagaaccucuacgaccacgcccugauguccaucaucagcaccuuccaccuguccauccccaacuucaaccaguacgaggccaugagcugcgacuucaacgggggcaagaucuccgugcaguacaaccucagccacuccuacgccggggacgcggccaaccacugcggcacgguggccaacgggguccugcagaccuucaugcggauggccuggggcggcagcuacaucgcgcuggacuccgggcacggcaagugggacugcaucaugaccagcuaccaguaccucaucauccagaacaccacgugggaggaccacugccaguucucccgccccagccccaucggguaccugggccugcucucccagcggacccgcgacaucuacaucagccggcgccugcugggcaccuucaccuggacgcucagcgacuccgaggggaaggacaccccgggcggguacugccugacccgguggaugcugaucgaggccgagcucaagugcuucggcaacaccgccguggccaagugcaacgagaagcacgacgaggaguucugcgacaugcugcgccuguucgacuucaacaagcaggccauccagcggcucaaggcgcccgcccagaugagcauccagcugaucaacaaggccgugaacgcccugaucaacgaccagcucaucaugaagaaccaccuccgcgacaucauggggauccccuacugcaacuacuccaaguacugcuaccugaaccacacgaccaccggcaagaccagccugcccaagugcugccuggucuccaacggcagcuaccugaacgagacgcacuucuccgacgacaucgagcagcaggccgacaacaugaucaccgagaugcuccagaaggaguacauggagcggcaggggaagaccccgcugggccugguggaccuguucguguucagcaccuccuucuaccucaucagcaucuuccugcaccuggucaagauccccacgcaccgccacaucguggggaaguccugccccaagccccaccggcucaaccacaugggcaucugcagcugcgggcuguacaagcagccgggcgugcccguccgcuggaagcggugaggacuagucccuguucccagagcccacuuuuuuuucuuuuuuugaaauaaaauagccugucuuucagaucucaaaggcucuuuucagagccaccaaaaaaaaaaaaaaaaaaaaaaaaaaaaaaaaaaaaaaaaaaaaaaaaaaaaaaaaaaaaaaaaagaauu

SEQ ID NO: 31651 - RNA, 1717 nt, Artificial Sequence
  mRNA product Design a-1 (hSL-A64-N5) comprising derived and/or modified sequence from LASV(Mad39;Clade IV)__ANH09722__GPCmut7 (opt1)
aggagagucccgcagucggcguccagcggcucugcuuguucgugugugugucguugcaggccuuauucaagcuuaccaugggccagaucgugaccuucuuccaggaggucccccacgugaucgaggaggugaugaacaucguccugaucgcccucagcauccuggccgugcugaaggggcucuacaacguggcgaccugcggccugaucgggcuggucacguuccuccugcugugcggccgcuccugcaccaccacccucuacaaggggguguacgagcugcaggcccuggagcucaacauggagacgcugaacaugaccaugccgcugagcugcaccaagaacaacucccaccacuacauccgggugggcaacgagaccggccucgagcugacgcugaccaacaccagccucaucaaccacaaguucugcaaccuguccgacgcccacaagaagaaccuguacgaccacgcccucaugagcaucaucuccaccuuccaccugagcauccccaacuucaaccaguacgaggccauguccugcgacuucaacgacgggaagaucagcguccaguacaaccugucccacacguacgcgggcgacaccgccaaccacugcgggaccguggccaacggcgugcuccagaccuucaugcgcauggccuggggcgggagcuacaucgcgcuggacuccggccgcgggggcugggacugcaucaugacgagcuaccaguaccugaucauccagaacaccaccugggaggaccacugccaguucucccggcccagccccaucggguaccucggccugcugucccagcggacccgcgacaucuacaucagccggcgccuccugggcacguucaccuggacccuguccgacagcgaggggaaggacaccccgggcggguacugccucacgcgguggaugcugaucgaggccgagcugaagugcuucggcaacaccgccgucgccaagugcaacgagaagcacgacgaggaguucugcgacaugcuccgccuguucgacuucaacaagcaggccauccagcggcugaaggcgcccgcccagaugagcauccagcucaucaacaaggccgugaacgcccugaucaacgaccagcugaucaugaagaaccaccuccgcgacaucauggggauccccuacugcaacuacuccaaguacugcuaccugaaccacaccgugaccggcaagacgagccugcccaagugcugccucgucuccaacggcagcuaccugaacgagacccacuucuccgacgacaucgagcagcaggccgacaacaugaucaccgagaugcugcagaaggaguacauggagcggcaggggaagaccccgcugggccucguggaccuguucguguucagcacguccuucuaccugaucagcaucuuccuccaccuggucaagauccccacccaccgccacgugguggggaagcccugccccaagccgcaccggcugaaccacaugggcaucugcuccugcggguucuacaagcagcccggcguccccgugcgcuggaagcggugaggacuagucccuguucccagagcccacuuuuuuuucuuuuuuugaaauaaaauagccugucuuucagaucucaaaggcucuuuucagagccaccaaaaaaaaaaaaaaaaaaaaaaaaaaaaaaaaaaaaaaaaaaaaaaaaaaaaaaaaaaaaaaaaagaauu

SEQ ID NO: 31652 - RNA, 1717 nt, Artificial Sequence
  mRNA product Design a-1 (hSL-A64-N5) comprising derived and/or modified sequence from LASV(Z0947-SLE-2011;Clade IV)__AIT17840__GPCmut7 (opt1)
aggagagucccgcagucggcguccagcggcucugcuuguucgugugugugucguugcaggccuuauucaagcuuaccaugggccagaucgugaccuucuuccaggaggucccccacgugaucgaggaggugaugaacaucguccugaucgcccucagcauccuggccgugcugaaggggcucuacaacuucgcgaccugcggccugguggggcuggucacguuccuccugcugugcggccgcuccugcaccaucagccucuacaaggggguguacgagcugcagacccuggagcucaacauggagacccugaacaugacgaugccgcuguccugcaccaagaacaacagccaccacuacaucauggugggcaacgagaccggccucgagcugacccugacgaacaccuccaucaucaaccacaaguucugcaaccucagcgacgcccacaagaagaaccuguacgaccacgcccugauguccaucaucagcaccuuccaccucuccauccccaacuucaaccaguacgaggccaugagcugcgacuucaacgggggcaagaucuccguccaguacaaccugagccacuccuacgccggggacgcggccaaccacugcggcaccguggccaacggggugcugcagacguucaugcggauggccuggggcggcagcuacaucgcgcucgacuccgggcgcgaccggugggacugcaucaugaccagcuaccaguaccugaucauccagaacaccaccugggaggaccacugccaguucucccgccccagccccaucggcuaccuggggcuccugucccagcggacgcgcgacaucuacaucagccggcgccugcucggcaccuucaccuggacccugagcgacuccgagggcaaggacacgcccgggggcuacugccugacccgguggaugcucaucgaggccgagcugaagugcuucgggaacaccgccgucgccaagugcaacgagaagcacgacgaggaguucugcgacaugcugcgccucuucgacuucaacaagcaggccauccagcggcugaaggcgccggcccagaugagcauccagcugaucaacaaggccgugaacgcccucaucaacgaccagcugaucaugaagaaccaccuccgcgacaucaugggcauccccuacugcaacuacuccaaguacugcuaccugaaccacaccacgaccgggaagaccagccugcccaagugcugccugguguccaacggcagcuaccucaacgagacccacuucuccgacgacaucgagcagcaggccgacaacaugaucacggagaugcugcagaaggaguacauggagcggcagggcaagaccccgcuggggcuggucgaccucuucguguucagcaccuccuucuaccugaucagcaucuuccugcaccucgugaagauccccacccaccgccacaucgucggcaagcccugccccaagccgcaccggcugaaccacauggggaucugcuccugcggccuguacaagcagcccggggugcccgugaaguggaagcgcugaggacuagucccuguucccagagcccacuuuuuuuucuuuuuuugaaauaaaauagccugucuuucagaucucaaaggcucuuuucagagccaccaaaaaaaaaaaaaaaaaaaaaaaaaaaaaaaaaaaaaaaaaaaaaaaaaaaaaaaaaaaaaaaaagaauu

SEQ ID NO: 31653 - RNA, 1717 nt, Artificial Sequence
  mRNA product Design a-1 (hSL-A64-N5) comprising derived and/or modified sequence from LASV(Josiah;Clade IV)__NP_694870__GPCmut7 (opt4)
aggagagucccgcagucggcguccagcggcucugcuuguucgugugugugucguugcaggccuuauucaagcuuaccaugggccagaucgugaccuucuuccaggaggugccccacgugaucgaggaggugaugaacaucgugcugaucgcccugagcgugcuggccgugcugaagggccuguacaacuucgccaccugcggccuggugggccuggugaccuuccugcugcugugcggcagaagcugcaccaccagccuguacaagggcguguacgagcugcagacccuggagcugaacauggagacccugaacaugaccaugccccugagcugcaccaagaacaacagccaccacuacaucauggugggcaacgagaccggccuggagcugacccugaccaacaccagcaucaucaaccacaaguucugcaaccugagcgacgcccacaagaagaaccuguacgaccacgcccugaugagcaucaucagcaccuuccaccugagcauccccaacuucaaccaguacgaggccaugagcugcgacuucaacggcggcaagaucagcgugcaguacaaccugagccacagcuacgccggcgacgccgccaaccacugcggcaccguggccaacggcgugcugcagaccuucaugagaauggccuggggcggcagcuacaucgcccuggacagcggcagaggcaacugggacugcaucaugaccagcuaccaguaccugaucauccagaacaccaccugggaggaccacugccaguucagcagacccagccccaucggcuaccugggccugcugagccagagaaccagagacaucuacaucagcagaagacugcugggcaccuucaccuggacccugagcgacagcgagggcaaggacacccccggcggcuacugccugaccagauggaugcugaucgaggccgagcugaagugcuucggcaacaccgccguggccaagugcaacgagaagcacgacgaggaguucugcgacaugcugagacuguucgacuucaacaagcaggccauccagagacugaaggcccccgcccagaugagcauccagcugaucaacaaggccgugaacgcccugaucaacgaccagcugaucaugaagaaccaccugagagacaucaugggcauccccuacugcaacuacagcaaguacugcuaccugaaccacaccaccaccggcagaaccagccugcccaagugcugccuggugagcaacggcagcuaccugaacgagacccacuucagcgacgacaucgagcagcaggccgacaacaugaucaccgagaugcugcagaaggaguacauggagagacagggcaagaccccccugggccugguggaccuguucguguucagcaccagcuucuaccugaucagcaucuuccugcaccuggugaagauccccacccacagacacaucgugggcaagagcugccccaagccccacagacugaaccacaugggcaucugcagcugcggccuguacaagcagcccggcgugcccgugaaguggaagagaugaggacuagucccuguucccagagcccacuuuuuuuucuuuuuuugaaauaaaauagccugucuuucagaucucaaaggcucuuuucagagccaccaaaaaaaaaaaaaaaaaaaaaaaaaaaaaaaaaaaaaaaaaaaaaaaaaaaaaaaaaaaaaaaaagaauu

SEQ ID NO: 31654 - RNA, 1714 nt, Artificial Sequence
  mRNA product Design a-1 (hSL-A64-N5) comprising derived and/or modified sequence from LASV(LP;Clade I)__AAF86701__GPCmut7 (opt4)
aggagagucccgcagucggcguccagcggcucugcuuguucgugugugugucguugcaggccuuauucaagcuuaccaugggccagaucaucaccuucuuccaggaggugccccacgugaucgaggaggugaugaacaucgugcugaucgcccugagccugcuggccauccugaagggccuguacaacaucgccaccugcggcaucaucggccugguggccuuccuguuccugugcggcaagagcugcagccugacccugaagggcggcuacgagcugcagacccuggagcugaacauggagacccugaacaugaccaugccccugagcugcaccaagaacagcagccaccacuacaucagagugggcaacgagaccggccuggagcugacccugaccaacaccagcaucaucaaccacaaguucugcaaccugagcgacgcccacaagaagaaccuguacgaccacgcccugaugagcaucaucagcaccuuccaccugagcauccccaacuucaaccaguacgaggccaugagcugcgacuucaacggcggcaagaucagcgugcaguacaaccugagccacagcuacgccggcgacgccgccgagcacugcggcaccguggccaacggcgugcugcagaccuucaugagaauggccuggggcggcagauacaucgcccuggacagcggcaagggcaacugggacugcaucaugaccagcuaccaguaccugaucauccagaacaccaccugggaggaccacugccaguucagcagacccagccccaucggcuaccugggccugcugagccagagaaccagagacaucuacaucagcagaagacugcugggcaccuucaccuggacccugagcgacagcgagggcaacgagacccccggcggcuacugccugaccagauggaugcugaucgaggccgagcugaagugcuucggcaacaccgccguggccaagugcaacgagaagcacgacgaggaguucugcgacaugcugagacuguucgacuucaacaagcaggccaucagaagacugaaggcccccgcccagaugagcauccagcugaucaacaaggccgugaacgcccugaucaacgaccagcugaucaugaagaaccaccugagagacaucaugggcauccccuacugcaacuacagcaaguacugcuaccugaaccacaccagcagcggcagaaccagccugcccaagugcugccugaucagcaacggcagcuaccugaacgagacccaguucagcgacgacaucgagcagcaggccgacaacaugaucaccgagaugcugcagaaggaguacaucgagagacagggcaagaccccccugggccugguggacaucuucaucuucagcaccagcuucuaccugaucagcaucuuccugcaccugaucaagauccccacccacagacacaucgugggcaagcccugccccaagccccacagacugaaccacaugggcgugugcagcugcggccuguacaagcaccccggcgugcccaccaaguggaagagaugaggacuagucccuguucccagagcccacuuuuuuuucuuuuuuugaaauaaaauagccugucuuucagaucucaaaggcucuuuucagagccaccaaaaaaaaaaaaaaaaaaaaaaaaaaaaaaaaaaaaaaaaaaaaaaaaaaaaaaaaaaaaaaaaagaauu

SEQ ID NO: 31655 - RNA, 1714 nt, Artificial Sequence
  mRNA product Design a-1 (hSL-A64-N5) comprising derived and/or modified sequence from LASV(803213;Clade II)__AAF86703__GPCmut7 (opt4)
aggagagucccgcagucggcguccagcggcucugcuuguucgugugugugucguugcaggccuuauucaagcuuaccaugggccagaucaucaccuucuuccaggaggugccccacgugaucgaggaggugaugaacaucgugcugaucgcccugagccugcuggccauccugaagggcaucuacaacguggccaccugcggccuguucggccugaucagcuuccugcugcugugcggcagaagcugcagcgugaccuacaagggcguguacgagcugcagacccuggagcugaacauggccaaccugaacaugaccaugccccugagcugcaccaagaacaacagccaccacuacaucauggugggcaacgagaccggccuggagcugacccugaccaacaccagcaucaucaaccacaaguucugcaaccugagcgacgcccacaagaagaaccuguacgaccacgcccugaugagcaucaucagcaccuuccaccugagcauccccaacuucaaccaguacgaggccaugagcugcgacuucaacggcggcaagaucagcgugcaguacaaccugagccacagcuucgccguggacgccgccaaccacugcggcaccaucgccaacggcgugcugcagaccuucaugagaauggccuggggcggcagcuacaucgcccuggacagcggcaagggcaacugggacugcaucaugaccagcuaccaguaccugaucauccagaacaccaccugggaggaccacugccaguucagcagacccagccccaucggcuaccugggccugcugagccagagaaccagagacaucuacaucagcagaagacugcugggcaccuucaccuggacccugagcgacagcgagggcaacgaggcccccggcggcuacugccugaccagauggaugcugaucgaggccgagcugaagugcuucggcaacaccgccguggccaagugcaacgagaagcacgacgaggaguucugcgacaugcugagacuguucgacuucaacaagcaggccaucaagagacugaagacccccgcccagaugagcauccagcugaucaacaaggccgugaacgcccugaucaacgaccagcugaucaugaagaaccaccugagagacaucaugggcauccccuacugcaacuacagcagauacugcuaccugaaccacaccgugaccggcaagaccagccugcccagaugcugccuggugagcaacggcagcuaccugaacgagacccacuucagcgacgacaucgagcagcaggccgacaacaugaucaccgagaugcugcagaaggaguacauggacagacagggcaagaccccccugggccugguggaccuguucguguucagcaccagcuucuaccugaucagcaucuuccugcaccuggugaagauccccacccacagacacaucgugggcaagcccugccccaagccccacagacugaaccacaugggcaucugcagcugcggccuguacaagcaccccggcgugcccgugaaguggaagagaugaggacuagucccuguucccagagcccacuuuuuuuucuuuuuuugaaauaaaauagccugucuuucagaucucaaaggcucuuuucagagccaccaaaaaaaaaaaaaaaaaaaaaaaaaaaaaaaaaaaaaaaaaaaaaaaaaaaaaaaaaaaaaaaaagaauu

SEQ ID NO: 31656 - RNA, 1714 nt, Artificial Sequence
  mRNA product Design a-1 (hSL-A64-N5) comprising derived and/or modified sequence from LASV(GA391;Clade III)__CAA36645__GPCmut7 (opt4)
aggagagucccgcagucggcguccagcggcucugcuuguucgugugugugucguugcaggccuuauucaagcuuaccaugggccagaucgugaccuucuuccaggaggugccccacgugaucgaggaggugaugaacaucgugcugaucgcccugagcauccuggccauccugaagggccuguacaacguggccaccugcggccugaucggccuggugaccuuccugcugcugagcggcagaagcugcagccugaucuacaagggcaccuacgagcugcagacccuggagcugaacauggagacccugaacaugaccaugccccugagcugcaccaagaacaacagccaccacuacaucagagugggcaacgagaccggccuggagcugacccugaccaacaccagcauccugaaccacaaguucugcaaccugagcgacgcccacaagagaaaccuguacgaccacagccugaugagcaucaucagcaccuuccaccugagcauccccaacuucaaccaguacgaggccaugagcugcgacuucaacggcggcaagaucaccgugcaguacaaccugagccacagcuucgccguggacgccgccggccacugcggcacccuggccaacggcgugcugcagaccuucaugagaauggccuggggcggcagcuacaucgcccuggacagcggcagaggcaacugggacugcaucaugaccagcuaccaguaccugaucauccagaacaccaccugggacgaccacugccaguucagcagacccagccccaucggcuaccugggccugcugagccagagaaccagagacaucuacaucagcagaagacugcugggcaccuucaccuggacccugagcgacagcgagggcaacgagacccccggcggcuacugccugaccagauggaugcugaucgaggccgagcugaagugcuucggcaacaccgccguggccaagugcaacgagaagcacgacgaggaguucugcgacaugcugagacuguucgacuucaacaagcaggccaucagaagacugaagacccccgcccagaugagcauccagcugaucaacaaggccgugaacgcccugaucaacgaccagcugaucaugaagaaccaccugagagacaucaugggcauccccuacugcaacuacagcagauacugcuaccugaaccacaccagcaccggcaagaccagccugcccagaugcugccugaucagcaacggcagcuaccugaacgagaccaaguucagcgacgacaucgagcagcaggccgacaacaugaucaccgagaugcugcagaaggaguacaucgacagacagggcaagaccccccugggccugguggaccuguucguguucagcaccagcuucuaccugaucagcaucuuccugcaccuggugaagauccccacccacagacacaucgugggcaagcccugccccaagccccacagacugaaccacaugggcaucugcagcugcggccuguacaagcagcccggcgugcccgugagauggaagagaugaggacuagucccuguucccagagcccacuuuuuuuucuuuuuuugaaauaaaauagccugucuuucagaucucaaaggcucuuuucagagccaccaaaaaaaaaaaaaaaaaaaaaaaaaaaaaaaaaaaaaaaaaaaaaaaaaaaaaaaaaaaaaaaaagaauu

SEQ ID NO: 31657 - RNA, 1717 nt, Artificial Sequence
  mRNA product Design a-1 (hSL-A64-N5) comprising derived and/or modified sequence from LASV(AV;Clade V)__CCA30314__GPCmut7 (opt4)
aggagagucccgcagucggcguccagcggcucugcuuguucgugugugugucguugcaggccuuauucaagcuuaccaugggccagaucgugaccuucuuccaggaggugccccacgugaucgaggaggugaugaacaucgugcugaucgcccugagcauccuggccgugcugaagggccuguacaacaucgccaccugcggccugaucggccugaucaccuuccugcugcugugcggcagaagcugcagcagcaaccuguacaagggcguguacgagcugcagagccuggaccugaacauggagacccugaacaugaccaugccccugagcugcaccaagaacaacagccaccacuacaucagagugggcaacgacaccggccuggagcugacccugaccaacaccagcauccugaaccacaaguucugcaaccugagcgacgcccacaagaaggaccuguacgaccacgcccugaugagcaucaucagcaccuuccaccugagcauccccaacuucaaccaguacgaggccaugagcugcgacuucaacggcggcaagaucagcgugcaguacaaccugagccacagcuacgccaucgacgccgccaaccacugcggcaccguggccaacggcauccugcagaccuucaugagaauggccuggggcggcagcuacaucgcccuggacagcggcagaggcaacugggacugcaucaugaccagcuaccaguaccugaucauccagaacaccaccugggagaaccacugccaguucagcagacccagccccaucggcuaccugggccugcugagccagagaaccagagacaucuacaucagcagaagacugcugggcaccuucaccuggacccugagcgacagcgagggcaacgccacccccggcggcuacugccugaccagauggaugcugaucgaggccgagcugaagugcuucggcaacaccgccguggccaagugcaacgagaagcacgacgaggaguucugcgacaugcugagacuguucgacuucaacaagcaggccaucagcagacugaagagccccgcccagaugagcauccagcugaucaacaaggccgugaacgcccugaucaacgaccagcugaucaugaagaaccaccugagagacaucaugggcauccccuacugcaacuacagcaaguacugcuaccugaaccacaccaucaccggcaagaccagccugcccaagugcugccuggugagcaacggcagcuaccugaacgagacccacuucagcgacgacaucgagcagcaggccgacaacaugaucaccgagaugcugcagaaggaguacauggagagacagggcaagaccccccugggccugguggaccuguucguguucagcaccagcuucuaccugaucagcaucuuccugagacuggugaagauccccacccacagacacaucgugggcaagcccugccccaagccccacagacugaaccacaugggcaucugcagcugcggccuguacaagcagcccggcgugcccgugagauggaagagaugaggacuagucccuguucccagagcccacuuuuuuuucuuuuuuugaaauaaaauagccugucuuucagaucucaaaggcucuuuucagagccaccaaaaaaaaaaaaaaaaaaaaaaaaaaaaaaaaaaaaaaaaaaaaaaaaaaaaaaaaaaaaaaaaagaauu

SEQ ID NO: 31658 - RNA, 1714 nt, Artificial Sequence
  mRNA product Design a-1 (hSL-A64-N5) comprising derived and/or modified sequence from LASV(Togo/2016/7082;Clade VI)__AMR44577__GPCmut7 (opt4)
aggagagucccgcagucggcguccagcggcucugcuuguucgugugugugucguugcaggccuuauucaagcuuaccaugggccagaucaucaccuucuuccaggaggugccccacgugaucgaggaggugaugaacaucgugcugaucgcccugagccugcuggccauccugaagggcguguacaacguggccaccugcggcaucaucggccuggugaccuuccuguuccugugcggcagaagcugcagccugaucuacaagggcagcuacgagcugcagacccuggagcugaacauggagacccugaacaugaccaugccccugagcugcaccaagaacagcagccaccacuacaucagagugggcaacgagaccggccuggagcugacccugaccaacaccagcaucaucaaccacaaguucugcaaccugagcgacgcccacaagagaaaccuguacgaccacgcccugaugagcauccugagcaccuuccaccugagcauccccaacuucaaccaguacgaggccaugagcugcgacuucaacggcggcaagaucagcgugcaguacaaccugagccacgccuacgccguggacgccgccgagcacugcggcaccguggccaacggcgugcugcagaccuucaugagaauggccuggggcggcagcuacaucgcccuggacagcggcagaggcaacugggacugcaucaugaccagcuaccaguaccugaucauccagaacaccaccugggaggaccacugccaguucagcagacccagccccaucggcuaccugggccugcugagccagagaaccagagacaucuacaucagcagaagacugcugggcaccuucaccuggacccugagcgacagcgagggcaacgagacccccggcggcuacugccugaccagauggaugcugaucgaggccgagcugaagugcuucggcaacaccgccguggccaagugcaacgagaagcacgacgaggaguucugcgacaugcugagacuguucgacuucaacaagcaggccauccagagacugaagagccccgcccagaugagcauccagcugaucaacaaggccgugaacgcccugaucaacgaccagcugaucaugaagaaccaccugagagacaugaugggcauccccuacugcaacuacagcaaguacugcuaccugaaccacaccagcagcggcagaaccagccugcccaagugcugccuggugagcaacggcagcuaccugaacgagacccacuucagcgacgacaucgagcagcaggccgacaacaugaucaccgagaugcugcagaaggaguacaucgacagacagggcaagaccccccugggccugguggaccuguucguguucagcaccagcuucuaccugaucagcaucuuccugcaccugaucaagauccccacccacagacacaucgugggcaagcccugccccaagccccacagacugaaccacaugggcaucugcagcugcggccuguacaagcagcccggcgugcccaccagauggaagagaugaggacuagucccuguucccagagcccacuuuuuuuucuuuuuuugaaauaaaauagccugucuuucagaucucaaaggcucuuuucagagccaccaaaaaaaaaaaaaaaaaaaaaaaaaaaaaaaaaaaaaaaaaaaaaaaaaaaaaaaaaaaaaaaaagaauu

SEQ ID NO: 31659 - RNA, 1714 nt, Artificial Sequence
  mRNA product Design a-1 (hSL-A64-N5) comprising derived and/or modified sequence from LASV(KAK-428;Clade n.d. (VII))__ANH09740__GPCmut7 (opt4)
aggagagucccgcagucggcguccagcggcucugcuuguucgugugugugucguugcaggccuuauucaagcuuaccaugggccagaucgugaccuucuuccaggaggugccccacgugaucgaggaggugaugaacaucgugcugaucgcccugagccugcuggccauccugaagggccuguacaacuucgccaccugcggcgugaucggccugaucaccuuccugcugcugugcggcagaagcugcagcgccaccuacaagggccaguacgagcugcagacccuggagcugaacauggagagccugaacaugaccaugccccugagcugcaccaagaacaacagccaccacuacaucagagccggcaacaacaccggccuggagcugacccugaccaacaccagcaucaucagccacaaguucugcaaccugagcgacgcccacaagaagaaccuguacgaccacacccugaugagcaucaucaccaccuuccaccugagcauccccaacuucaaccaguacgaggccaugagcugcgacuucaacggcggcaagaucagcauccaguacaaccugagccacagcuacgccggcgacgccgcccagcacugcggcaccguggccaacggcgugcugcagaccuucaugagaauggccuggggcggcagcuaccuggcccuggacagcggcagaagaggcugggacugcaucaucagcagcuaccaguaccugaucauccagaacaccaccugggacgaccacugccaguucagcagacccagccccaucggcuaccugggcuucgugagccagaagaccagagacaucuacaucagcagaagacugcugggcaccuucaccuggacccugagcgacagcgagggccacgacaugcccggcggcuacugccugaccagauggaugcugaucgaggccgaccugaagugcuucggcaacaccgccguggccaagugcaacgagaagcacgacgaggaguucugcgacauguggagacuguucgacuucaacaagcaggccauccagagacugaaggcccccgcccagaugaacauccagcugaucaacaaggccgugaacgcccugaucaacgaccagcugaugaugaagaaccaccugagagacaucaugggcauccccuacugcaacuacagcaaguucugcuaccugaacaacaccaccaccggcagaaccagccugcccagaugcugccugaucagcaacggcagcuaccugaacgagacccacuucagcgacgacaucgagcagcaggccgacaacaugaucaccgagaugcugcagaaggaguacauggacagacagggcaagaccccccugggccugguggaccuguucguguucagcaccagcuucuaccugaucaccaucuuccugcaccuggugaagauccccacccacagacacaucgugggcaagcccugccccaagccccacagacugaaccacaugggcaucugcagcugcggccuguacaagcagcccggcgugcccgugagauggaagagaugaggacuagucccuguucccagagcccacuuuuuuuucuuuuuuugaaauaaaauagccugucuuucagaucucaaaggcucuuuucagagccaccaaaaaaaaaaaaaaaaaaaaaaaaaaaaaaaaaaaaaaaaaaaaaaaaaaaaaaaaaaaaaaaaagaauu

SEQ ID NO: 31660 - RNA, 1714 nt, Artificial Sequence; identical to SEQ ID NO: 31654
  mRNA product Design a-1 (hSL-A64-N5) comprising derived and/or modified sequence from LASV(Pinneo-NIG-1969;Clade I)__AIT17836__GPCmut7 (opt4)

SEQ ID NO: 31661 - RNA, 1714 nt, Artificial Sequence
  mRNA product Design a-1 (hSL-A64-N5) comprising derived and/or modified sequence from LASV(ISTH0009-NIG-2011;Clade II)__AIT17404__GPCmut7 (opt4)
aggagagucccgcagucggcguccagcggcucugcuuguucgugugugugucguugcaggccuuauucaagcuuaccaugggccagaucaucaccuucuuccaggaggugccccacgugaucgaggaggugaugaacaucgugcugaucgcccugagccugcuggccauccugaagggcaucuacaacguggccaccugcggccuguucggccuggugagcuuccugcugcugugcggcagaagcugcagcaccaccuacaagggcguguacgagcugcagacccuggagcuggacauggccagccugaacaugaccaugccccugagcugcaccaagaacaacagccaccacuacaucauggugggcaacgagaccggccuggagcugacccugaccaacaccagcaucaucaaccacaaguucugcaaccugagcgacgcccacaagaagaaccuguacgaccacgcccugaugagcaucaucagcaccuuccaccugagcauccccaacuucaaccaguacgaggccaugagcugcgacuucaacggcggcaagaucagcgugcaguacaaccugagccacgccuacgccguggacgccgccaaccacugcggcaccaucgccaacggcgugcugcagaccuucaugagaauggccuggggcggcagcuacaucgcccuggacagcggcaagggcagcugggacugcaucaugaccagcuaccaguaccugaucauccagaacaccaccugggaggaccacugccaguucagcagacccagccccaucggcuaccugggccugcugagccagagaaccagagacaucuacaucagcagaagacugcugggcaccuucaccuggacccugagcgacagcgagggcaacgagacccccggcggcuacugccugaccagauggaugcugaucgaggccgagcugaagugcuucggcaacaccgccguggccaagugcaacgagaagcacgacgaggaguucugcgacaugcugagacuguucgacuucaacaagcaggccaucagaagacugaagacccccgcccagaugagcauccagcugaucaacaaggccgugaacgcccugaucaacgaccagcugaucaugaagaaccaccugagagacaucaugggcauccccuacugcaacuacagcaaguacugcuaccugaaccacaccgugaccggcaagaccagccugcccagaugcugccuggugagcaacggcagcuaccugaacgagacccacuucagcgacgacaucgagcagcaggccgacaacaugaucaccgagcugcugcagaaggaguacauggacagacagggcaagaccccccugggccugguggaccuguucguguucagcaccagcuucuaccugaucagcaucuuccugcaccugaucaagauccccacccacagacacaucaccggcaagcccugccccaagccccacagacugaaccacaugggcaucugcagcugcggccuguacaagcaccccggcgugcccgugaaguggaagagaugaggacuagucccuguucccagagcccacuuuuuuuucuuuuuuugaaauaaaauagccugucuuucagaucucaaaggcucuuuucagagccaccaaaaaaaaaaaaaaaaaaaaaaaaaaaaaaaaaaaaaaaaaaaaaaaaaaaaaaaaaaaaaaaaagaauu

SEQ ID NO: 31662 - RNA, 1714 nt, Artificial Sequence
  mRNA product Design a-1 (hSL-A64-N5) comprising derived and/or modified sequence from LASV(ISTH2010-NIG-2012;Clade II)__AIT17482__GPCmut7 (opt4)
aggagagucccgcagucggcguccagcggcucugcuuguucgugugugugucguugcaggccuuauucaagcuuaccaugggccagaucaucaccuucuuccaggaggugccccacgugaucgaggaggugaugaacaucgugcugaucgcccugagccugcuggccauccugaagggcaucuacaacguggccaccugcggccuguucggccuggugagcuuccugcugcugugcggcagaagcugcagcaccaccuacaagggcguguacgagcugcagacccuggagcuggacauggccagccugaacaugaccaugccccugagcugcaccaagaacaacagccaccacuacaucauggugggcaacgagaccggccuggagcugacccugaccaacaccagcaucaucaaccacaaguucugcaaccugagcgacgcccacaagaagaaccuguacgaccacgcccugaugagcaucaucagcaccuuccaccugagcauccccaacuucaaccaguacgaggccaugagcugcgacuucaacggcggcaagaucagcgugcaguacaaccugagccacgccuacgccguggacgccgccaaccacugcggcaccaucgccaacggcgugcugcagaccuucaugagaauggccuggggcggcagcuacaucgcccuggacagcggcaagggcagcugggacugcaucaugaccagcuaccaguaccugaucauccagaacaucaccugggaggaccacugccaguucagcagacccagccccaucggcuaccugggccugcugagccagagaaccagagacaucuacaucagcagaagacugcugggcaccuucaccuggacccugagcgacagcgagggcaacgagacccccggcggcuacugccugaccagauggaugcugaucgaggccgagcugaagugcuucggcaacaccgccguggccaagugcaacgagaagcacgacgaggaguucugcgacaugcugagacuguucgacuucaacaagcaggccaucagaagacugaagacccccgcccagaugagcauccagcugaucaacaaggccgugaacgcccugaucaacgaccagcugaucaugaagaaccaccugagagacaucaugggcauccccuacugcaacuacagcaaguacugcuaccugaaccacaccgugaccggcaagaccagccugcccagaugcugccuggugagcaacggcagcuaccugaacgagacccacuucagcgacgacaucgagcagcaggccgacaacaugaucaccgagcugcugcagaaggaguacaucgacagacagggcaagaccccccugggccugguggaccuguucguguucagcaccagcuucuaccugaucagcaucuuccugcaccuggugaagauccccacccacagacacguggugggcaagcccugccccaagccccacagacugaaccacaugggcaucugcagcugcggccuguacaagcaccccggcgugcccgugaaguggaagagaugaggacuagucccuguucccagagcccacuuuuuuuucuuuuuuugaaauaaaauagccugucuuucagaucucaaaggcucuuuucagagccaccaaaaaaaaaaaaaaaaaaaaaaaaaaaaaaaaaaaaaaaaaaaaaaaaaaaaaaaaaaaaaaaaagaauu

SEQ ID NO: 31663 - RNA, 1714 nt, Artificial Sequence
  mRNA product Design a-1 (hSL-A64-N5) comprising derived and/or modified sequence from LASV(Lassa virus/H.sapiens-wt/NGA/2015/ISTH_0543;Clade II)__AVO03639__GPCmut7 (opt4)
aggagagucccgcagucggcguccagcggcucugcuuguucgugugugugucguugcaggccuuauucaagcuuaccaugggccagaucaucaccuucuuccaggaggugccccacgugaucgaggaggugaugaacaucgugcugaucgcccugagccugcuggccauccugaagggcaucuacaacguggccaccugcggccuguucggccuggugagcuuccugcugcugugcggcagaagcugcagcaccaccuacaagggcguguacgagcugcagacccuggagcuggacauggccaaccugaacaugaccaugccccugagcugcaccaagaacaacagccaccacuacaucauggugggcaacgagaccggccuggagcugacccugaccaacaccagcaucaucaaccacaaguucugcaaccugagcgacgcccacaagaagaaccuguacgaccacgcccugaugagcaucaucagcaccuuccaccugagcauccccaacuucaaccaguacgaggccaugagcugcgacuucaacggcggcaagaucagcgugcaguacaaccugagccacaccuacgccguggacgccgccaaccacugcggcaccaucgccaacggcgugcugcagaccuucaugagaauggccuggggcggcagcuacaucgcccuggacagcggcaagggcagcugggacugcaucaugaccagcuaccaguaccuggugauccagaacaccaccugggaggaccacugccaguucagcagacccagccccaucggcuaccugggccugcugagccagagaaccagagacaucuacaucagcagaagacugcugggcaccuucaccuggacccugagcgacagcgagggcaacgagacccccggcggcuacugccugaccagauggaugcugaucgaggccgagcugaagugcuucggcaacaccgccguggccaagugcaacgagaagcacgacgaggaguucugcgacaugcugagacuguucgacuucaacaagcaggccaucagaagacugaagacccccgcccagaugagcauccagcugaucaacaaggccgugaacgcccugaucaacgaccagcugaucaugaagaaccaccugagagacaucaugggcauccccuacugcaacuacagcaaguacugcuaccugaaccacaccgugaccggcaagaccagccugcccagaugcugccuggugagcaacggcagcuaccugaacgagacccacuucagcgacgacaucgagcagcaggccgacaacaugaucaccgagcugcugcagaaggaguacaucgacagacagggcaagaccccccugggccugguggaccuguucguguucagcaccagcuucuaccugaucagcaucuuccugcaccuggugaagauccccacccacagacacaucaccggcaagcccugccccaagccccacagacugaaccacaugggcaucugcagcugcggccuguacaagcaccccggcgugcccgugaaguggaagagaugaggacuagucccuguucccagagcccacuuuuuuuucuuuuuuugaaauaaaauagccugucuuucagaucucaaaggcucuuuucagagccaccaaaaaaaaaaaaaaaaaaaaaaaaaaaaaaaaaaaaaaaaaaaaaaaaaaaaaaaaaaaaaaaaagaauu

SEQ ID NO: 31664 - RNA, 1714 nt, Artificial Sequence
  mRNA product Design a-1 (hSL-A64-N5) comprising derived and/or modified sequence from LASV(Lassa virus/H.sapiens-wt/NGA/2016/ISTH_0009;Clade II)__AVO03571__GPCmut7 (opt4)
aggagagucccgcagucggcguccagcggcucugcuuguucgugugugugucguugcaggccuuauucaagcuuaccaugggccagaucaucaccuucuuccaggaggugccccacgugaucgaggaggugaugaacaucgugcugaucgcccugagccugcuggccauccugaagggcaucuacaacguggccaccugcggccugcugggccuggugagcuuccugcugcugugcggcagaagcugcagcaccaccuacaagggcguguacgagcugcagacccuggagcuggacauggccagccugaacaugaccaugccccugagcugcaccaagaacaacagccaccacuacaucauggugggcaacgagaccggccuggagcugacccugaccaacaccagcaucaucaaccacaaguucugcaaccugagcgacgcccacaagaagaaccuguacgaccacgcccugaugagcaucaucagcaccuuccaccugagcauccccaacuucaaccaguacgaggccaugagcugcgacuucaacggcggcagaaucagcgugcaguacaaccugagccacagcuacgccguggacgccgccaaccacugcggcaccaucgccaacggcgugcugcagaccuucaugagaauggccuggggcggcagcuacaucgcccuggacagcggcaagggcagcugggacugcaucaugaccagcuaccaguaccugaucauccagaacaccaccugggaggaccacugccaguucagcagacccagccccaucggcuaccugggccugcugagccagagaaccagagacaucuacaucagcagaagacugcugggcaccuucaccuggacccugagcgacagcgagggcaacgagacccccggcggcuacugccugaccagauggaugcugaucgaggccgagcugaagugcuucggcaacaccgccguggccaagugcaacgagaagcacgacgaggaguucugcgacaugcugagacuguucgacuucaacaagcaggccaucagaagacugaagacccccgcccagaugagcauccagcugaucaacaaggccgugaacgcccugaucaacgaccagcugaucaugaagaaccaccugagagacaucaugggcauccccuacugcaacuacagcaaguacugcuaccugaaccacaccgugaccggcaagaccagccugcccagaugcugccuggugagcaacggcagcuaccugaacgagacccacuucagcgacgacaucgagcagcaggccgacaacaugaucaccgagcugcugcagaaggaguacaucgacagacagggcaagaccccccugggccugguggaccuguucguguucagcaccagcuucuaccugaucagcaucuuccugcaccuggugaagauccccacccacagacacaucaccggcaagcccugccccaagccccacagacugaaccacaugggcaucugcagcugcggccuguacaaccaccccggcgugcccgugaaguggaagagaugaggacuagucccuguucccagagcccacuuuuuuuucuuuuuuugaaauaaaauagccugucuuucagaucucaaaggcucuuuucagagccaccaaaaaaaaaaaaaaaaaaaaaaaaaaaaaaaaaaaaaaaaaaaaaaaaaaaaaaaaaaaaaaaaagaauu

SEQ ID NO: 31665 - RNA, 1714 nt, Artificial Sequence
  mRNA product Design a-1 (hSL-A64-N5) comprising derived and/or modified sequence from LASV(Lassa virus/H.sapiens-wt/NGA/2016/ISTH_0017;Clade II)__AVO03567__GPCmut7 (opt4)
aggagagucccgcagucggcguccagcggcucugcuuguucgugugugugucguugcaggccuuauucaagcuuaccaugggccagaucaucaccuucuuccaggaggugccccacgugaucgaggaggugaugaacaucgugcugaucgcccugagccugcuggccauccugaagggcaucuacaacguggccaccugcggccuguucggccuggugagcuuccugcugcugugcggcagaagcugcagcaccaccuacaagggcguguacgagcugcagacccuggagcuggacauggccagccugaacaugaccaugccccugagcugcaccaagaacaacagccaccacuacaucauggugggcaacgagaccggccuggagcugacccugaccaacaccagcaucaucaaccacaaguucugcaaccugagcgacgcccacaagaagaaccuguacgaccacgcccugaugagcaucaucagcaccuuccaccugagcauccccaacuucaaccaguacgaggccaugagcugcgacuucaacggcggcaagaucagcgugcaguacaaccugagccacaccuacgccaucgacgccgccaaccacugcggcaccaucgccaacggcgugcugcagaccuucaugagaauggccuggggcggcagcuacaucgcccuggacagcggcaagggcagcugggacugcaucaugaccagcuaccaguaccugaucauccagaacaccaccugggaggaccacugccaguucagcagacccagccccaucggcuaccugggccugcugagccagagaaccagagacaucuacaucagcagaagacugcugggcaccuucaccuggacccugagcgacagcgagggcaacgagacccccggcggcuacugccugaccagauggaugcugaucgaggccgagcugaagugcuucggcaacaccgccguggccaagugcaacgagaagcacgacgaggaguucugcgacaugcugagacuguucgacuucaacaagcaggccaucagaagacugaagacccccgcccagaugagcauccagcugaucaacaaggccgugaacgcccugaucaacgaccagcugaucaugaagaaccaccugagagacaucaugggcauccccuacugcaacuacagcaaguacugcuaccugaaccacaccgugaccggcaagaccagccugcccagaugcugccuggugagcaacggcagcuaccugaacgagacccacuucagcgacgacaucgagcagcaggccgacaacaugaucaccgagcugcugcagaaggaguacauggacagacagggcaagaccccccugggccugguggaccuguucguguucagcaccagcuucuaccugaucagcaucuuccugcaccuggugagaauccccacccacagacacgugaucggcaagcccugccccaagccccacagacugaaccacaugggcaucugcagcugcggccuguacaagcaccccggcgugcccgugaaguggaagagaugaggacuagucccuguucccagagcccacuuuuuuuucuuuuuuugaaauaaaauagccugucuuucagaucucaaaggcucuuuucagagccaccaaaaaaaaaaaaaaaaaaaaaaaaaaaaaaaaaaaaaaaaaaaaaaaaaaaaaaaaaaaaaaaaagaauu

SEQ ID NO: 31666 - RNA, 1714 nt, Artificial Sequence
  mRNA product Design a-1 (hSL-A64-N5) comprising derived and/or modified sequence from LASV(Lassa virus/H.sapiens-wt/NGA/2018/ISTH_0959;Clade II)__AVV65099__GPCmut7 (opt4)
aggagagucccgcagucggcguccagcggcucugcuuguucgugugugugucguugcaggccuuauucaagcuuaccaugggccagaucaucaccuucuuccaggaggugccccacgugaucgaggaggugaugaacaucgugcugaucgcccugagccugcuggccauccugaagggcaucuacaacguggugaccugcggccuguucggccuggugagcuuccugcugcugugcggcagaagcugcagcaccaccuacaagggcguguacgagcugcagacccuggagcuggacauggccagccugaacaugaccaugccccugagcugcaccaagaacaacagccaccacuacaucauggugggcaacgagaccggccuggagcugacccugaccaacaccagcaucaucaaccacaaguucugcaaccugagcgacgcccacaagaagaaccuguacgaccacgcccugaugagcaucaucagcaccuuccaccugagcauccccaacuucaaccaguacgaggccaugagcugcgacuucaacggcggcaagaucagcgugcaguacaaccugagccacgccuacgccaucgacgccgccaaccacugcggcaccaucgccaacggcgugcugcagaccuucaugagaauggccuggggcggcagcuacaucgcccuggacagcggcaagggcagcugggacugcaucaugaccagcuaccaguaccugaucauccagaacaccaccugggaggaccacugccaguucagcagacccagccccaucggcuaccugggccugcugagccagagaaccagagacaucuacaucagcagaagacugcugggcaccuucaccuggacccugagcgacagcgagggcaacgagacccccggcggcuacugccugaccagauggaugcugaucgaggccgagcugaagugcuucggcaacaccgccguggccaagugcaacgagaagcacgacgaggaguucugcgacaugcugagacuguucgacuucaacaagcaggccaucagaagacugaagacccccgcccagaugagcauccagcugaucaacaaggccgugaacgcccugaucaacgaccagcugaucaugaagaaccaccugagagacaucaugggcauccccuacugcaacuacagcaaguacugcuaccugaaccacaccgugaccggcaagaccagccugcccagaugcugccuggugagcaacggcagcuaccugaacgagacccacuucagcgacgacaucgagcagcaggccgacaacaugaucaccgagcugcugcagaaggaguacaucgacagacagggcaagaccccccugggccugguggaccuguucguguucagcaccagcuucuaccugaucagcaucuuccugcaccuggugaagauccccacccacagacacgugaucggcaagcccugccccaagccccacagacugaaccacaugggcaucugcagcugcggccuguacaagcaccccggcgugcccgugaaguggaagagaugaggacuagucccuguucccagagcccacuuuuuuuucuuuuuuugaaauaaaauagccugucuuucagaucucaaaggcucuuuucagagccaccaaaaaaaaaaaaaaaaaaaaaaaaaaaaaaaaaaaaaaaaaaaaaaaaaaaaaaaaaaaaaaaaagaauu

SEQ ID NO: 31667 - RNA, 1714 nt, Artificial Sequence
  mRNA product Design a-1 (hSL-A64-N5) comprising derived and/or modified sequence from LASV(LASV003-NIG-2008;Clade II)__AIT17580__GPCmut7 (opt4)
aggagagucccgcagucggcguccagcggcucugcuuguucgugugugugucguugcaggccuuauucaagcuuaccaugggccagaucaucaccuucuuccaggaggugccccacgugaucgaggaggugaugaacaucgugcugaucgcccugagccugcuggccauccugaagggcaucuacaacguggccaccugcggccuguucggccuggugagcuuccugcugcugugcggcagaagcugcagcaccaccuacaagggcguguacgagcugcagacccuggagcuggacauggccagccugaacaugaccaugccccugagcugcaccaagaacaacagccaccacuacaucauggugggcaacgagaccggccuggagcugacccugaccaacaccagcaucaucaaccacaaguucugcaaccugagcgacgcccacaagaagaaccuguacgaccacgcccugaugagcaucaucagcaccuuccaccugagcauccccaacuucaaccaguacgaggccaugagcugcgacuucaacggcggcaagaucagcgugcaguacaaccugagccacaccuacgccguggacgccgccaaccacugcggcaccaucgccaacggcgugcugcagaccuucaugagaauggccuggggcggcagcuacaucgcccuggacagcggcaagggcagcugggacugcaucaugaccagcuaccaguaccugaucauccagaacaccaccugggaggaccacugccaguucagcagacccagccccaucggcuaccugggccugcugagccagagaaccagagacaucuacaucagcagaagacugcugggcaccuucaccuggacccugagcgacagcgagagcaacgagacccccggcggcuacugccugaccagauggaugcugaucgaggccgagcugaagugcuucggcaacaccgccguggccaagugcaacgagaagcacgacgaggaguucugcgacaugcugagacuguucgacuucaacaagcaggccaucagaagacugaaggcccccgcccagaugagcauccagcugaucaacaaggccgugaacgcccugaucaacgaccagcugaucaugaagaaccaccugagagacaucaugggcauccccuacugcaacuacagcaaguacugcuaccugaaccacaccgugaccggcagaaccagccugcccagaugcugccuggugagcaacggcagcuaccugaacgagacccacuucagcgacgacaucgagcagcaggccgacaacaugaucaccgagcugcugcagaaggaguacauggacagacagggcaagaccccccugggccugguggaccuguucguguucagcaccagcuucuaccugaucagcaucuuccugcaccuggugaagauccccacccacagacacgugaucggcaagcccugccccaagccccacagacugaaccacaugggcaucugcagcugcggccuguacaagcaccccggcgugcccgugaaguggaagagaugaggacuagucccuguucccagagcccacuuuuuuuucuuuuuuugaaauaaaauagccugucuuucagaucucaaaggcucuuuucagagccaccaaaaaaaaaaaaaaaaaaaaaaaaaaaaaaaaaaaaaaaaaaaaaaaaaaaaaaaaaaaaaaaaagaauu

SEQ ID NO: 31668 - RNA, 1714 nt, Artificial Sequence
  mRNA product Design a-1 (hSL-A64-N5) comprising derived and/or modified sequence from LASV(LASV035-NIG-2009;Clade II)__AIT17588__GPCmut7 (opt4)
aggagagucccgcagucggcguccagcggcucugcuuguucgugugugugucguugcaggccuuauucaagcuuaccaugggccagaucaucaccuucuuccaggaggugccccacgugaucgaggaggugaugaacaucgugcugaucgcccugagccugcuggccauccugaagggcaucuacaacguggccaccugcggccuguucggccuggugagcuuccugcugcugugcggcagaagcugcagcaccaccuacaagggcguguacgagcugcagacccuggagcuggacauggccagccugaacaugaccaugccccugagcugcaccaagaacaacagccaccacuacaucauggugggcaacgagaccggccuggagcugacccugaccaacaccagcaucaucaaccacaaguucugcaaccugagcgacgcccacaagaagaaccuguacgaccacgcccugaugagcaucaucagcaccuuccaccugagcauccccaacuucaaccaguacgaggccaugagcugcgacuucaacggcggcaagaucagcgugcaguacaaccugagccacgccuacgccguggacgccgccaaccacugcggcaccaucgccaacggcgugcugcagaccuucaugagaauggccuggggcggcagcuacaucgcccuggacagcggcaagggcagcugggacugcaucaugaccagcuaccaguaccugaucauccagaacaccaccugggaggaccacugccaguucagcagacccagccccaucggcuaccugggccugcugagccagagaaccagagacaucuacaucagcagaagacugcugggcaccuucaccuggacccugagcgacagcgagggcaacgagacccccggcggcuacugccugaccagauggaugcugaucgaggccgagcugaagugcuucggcaacaccgccguggccaagugcaacgagaagcacgacgaggaguucugcgacaugcugagacuguucgacuucaacaagcaggccaucagaagacugaaggcccccgcccagaugagcauccagcugaucaacaaggccgugaacgcccugaucaacgaccagcugaucaugaagaaccaccugagagacaucaugggcauccccuacugcaacuacagcaaguacugcuaccugaaccacaccgugaccggcaagaccagccugcccagaugcugccuggugagcaacggcagcuaccugaacgagacccacuucagcgacgacaucgagcagcaggccgacaacaugaucaccgagcugcugcagaaggaguacaucgacagacagggcaagaccccccugggccugguggaccuguucguguucagcaccagcuucuaccugaucagcaucuuccugcaccuggugaagauccccacccacagacacgugaucggcaagcccugccccaagccccacagacugaaccacaugggcaucugcagcugcggccuguacaagcaccccggcgugcccgugaaguggaagagaugaggacuagucccuguucccagagcccacuuuuuuuucuuuuuuugaaauaaaauagccugucuuucagaucucaaaggcucuuuucagagccaccaaaaaaaaaaaaaaaaaaaaaaaaaaaaaaaaaaaaaaaaaaaaaaaaaaaaaaaaaaaaaaaaagaauu

SEQ ID NO: 31669 - RNA, 1714 nt, Artificial Sequence
  mRNA product Design a-1 (hSL-A64-N5) comprising derived and/or modified sequence from LASV(LASV1000-NIG-2009;Clade II)__AIT17782__GPCmut7 (opt4)
aggagagucccgcagucggcguccagcggcucugcuuguucgugugugugucguugcaggccuuauucaagcuuaccaugggccagaucaucaccuucuuccaggaggugccccacgugaucgaggaggugaugaacaucgugcugaucgcccugagccugcuggccauccugaagggcaucuacaacguggccaccugcggccuguucggccuggugagcuuccugcugcugugcggcagaagcugcagcaccaccuacaagggcguguacgagcugcagacccuggagcuggacauggccagccugaacaugaccaugccccugagcugcaccaagaacaacagccaccacuacaucauggugggcaacgagaccggccuggagcugacccugaccaacaccagcaucaucaaccacaaguucugcaaccugagcgacgcccacaagaagaaccuguacgaccacgcccugaugagcaucaucagcaccuuccaccugagcauccccaacuucaaccaguacgaggccaugagcugcgacuucaacggcggcaagaucagcgugcaguacaaccugagccacaccuacgccguggacgccgccaaccacugcggcaccaucgccaacggcgugcugcagaccuucaugagaauggccuggggcggcagcuacaucgcccuggacagcggcaagggcagcugggacugcaucaugaccagcuaccaguaccugaucauccagaacaccaccugggaggaccacugccaguucagcagacccagccccaucggcuaccugggccugcugagccagagaaccagagacaucuacaucagcagaagacugcugggcaccuucaccuggacccugagcgacagcgagggcaacgagacccccggcggcuacugccugaccagauggaugcugaucgaggccgagcugaagugcuucggcaacaccgccguggccaagugcaacgagaagcacgacgaggaguucugcgacaugcugagacuguucgacuucaacaagcaggccaucaagagacugaagacccccgcccagaugagcauccagcugaucaacaaggccgugaacgcccugaucaacgaccagcugaucaugaagaaccaccugagagacaucaugggcauccccuacugcaacuacagcaaguacugcuaccugaaccacaccgugaccggcaagaccagccugcccagaugcugccuggugagcaacggcagcuaccugaacgagacccacuucagcgacgacaucgagcagcaggccgacaacaugaucaccgagcugcugcagaaggaguacaucgacagacagggcaagaccccccugggccugguggaccuguucguguucagcaccagcuucuaccugaucagcaucuuccugcaccuggugaagauccccacccacagacacguggugggcaagcccugccccaagccccacagacugaaccacaugggcaucugcagcugcggccuguacaagcaccccggcgugcccgugaaguggaagagaugaggacuagucccuguucccagagcccacuuuuuuuucuuuuuuugaaauaaaauagccugucuuucagaucucaaaggcucuuuucagagccaccaaaaaaaaaaaaaaaaaaaaaaaaaaaaaaaaaaaaaaaaaaaaaaaaaaaaaaaaaaaaaaaaagaauu

SEQ ID NO: 31670 - RNA, 1714 nt, Artificial Sequence
  mRNA product Design a-1 (hSL-A64-N5) comprising derived and/or modified sequence from LASV(LASV221-NIG-2010;Clade II)__AIT17624__GPCmut7 (opt4)
aggagagucccgcagucggcguccagcggcucugcuuguucgugugugugucguugcaggccuuauucaagcuuaccaugggccagaucaucaccuucuuccaggaggugccccacgugaucgaggaggugaugaacaucgugcugaucgcccugagccugcuggccauccugaagggcaucuacaacguggccaccugcggccuguucggccuggugagcuuccugcugcugugcggcagaagcugcagcaccaccuacaagggcguguacgagcugcagacccuggagcuggacauggccagccugaacaugaccaugccccugagcugcaccaagaacaacagccaccacuacaucauggugggcaacgagaccggccuggagcugacccugaccaacaccagcaucaucaaccacaaguucugcaaccugagcgacgcccacaagaagaaccuguacgaccacgcccugaugagcaucaucagcaccuuccaccugagcauccccaacuucaaccaguacgaggccaugagcugcgacuucaacggcggcaagaucagcgugcaguacaaccugagccacaccuacgccaucgacgccgccaaccacugcggcaccaucgccaacggcgugcugcagaccuucaugagaauggccuggggcggcagcuacaucgcccuggacagcggcaagggcagcugggacugcaucaugaccagcuaccaguaccugaucauccagaacaccaccugggaggaccacugccaguucagcagacccagccccaucggcuaccugggccugcugagccagagaaccagagacaucuacaucagcagaagacugcugggcaccuucaccuggacccugagcgacagcgagggcaacgagacccccggcggcuacugccugaccagauggaugcugaucgaggccgagcugaagugcuucggcaacaccgccguggccaagugcaacgagaagcacgacgaggaguucugcgacaugcugagacuguucgacuucaacaagcaggccaucagaagacugaagacccccgcccagaugagcauccagcugaucaacaaggccgugaacgcccugaucaacgaccagcugaucaugaagaaccaccugagagacaucaugggcauccccuacugcaacuacagcaaguacugcuaccugaaccacaccgugaccggcaagaccagccugcccagaugcugccuggugagcaacggcagcuaccugaacgagacccacuucagcgacgacaucgagcagcaggccgacaacaugaucaccgagaugcugcagaaggaguacauggacagacagggcaagaccccccugggccugguggaccuguucguguucagcaccagcuucuaccugaucagcaucuuccugcaccuggugaagauccccacccacagacacgugaucggcaagcccugccccaagccccacagacugaaccacaugggcaucugcagcugcggccuguacaagcaccccggcgugcccgugaaguggaagagaugaggacuagucccuguucccagagcccacuuuuuuuucuuuuuuugaaauaaaauagccugucuuucagaucucaaaggcucuuuucagagccaccaaaaaaaaaaaaaaaaaaaaaaaaaaaaaaaaaaaaaaaaaaaaaaaaaaaaaaaaaaaaaaaaagaauu

SEQ ID NO: 31671 - RNA, 1714 nt, Artificial Sequence
  mRNA product Design a-1 (hSL-A64-N5) comprising derived and/or modified sequence from LASV(LASV237-NIG-2010;Clade II)__AIT17638__GPCmut7 (opt4)
aggagagucccgcagucggcguccagcggcucugcuuguucgugugugugucguugcaggccuuauucaagcuuaccaugggccagaucaucaccuucuuccaggaggugccccacgugaucgaggaggugaugaacaucgugcugaucgcccugagccugcuggccauccugaagggcaucuacaacguggccaccugcggccuguucggccuggugagcuuccugcugcugugcggcagaagcugcagcaccaccuacaagggcguguacgagcugcagacccuggagcuggacauggccagccugaacaugaccaugccccugagcugcaccaagaacaacagccaccacuacaucauggugggcaacgagaccggccuggagcugacccugaccaacaccagcaucaucaaccacaaguucugcaaccugagcgacgcccacaagaaggaccuguacgaccacgcccugaugagcaucaucagcaccuuccaccugagcauccccaacuucaaccaguacgaggccaugagcugcgacuucaacggcggcaagaucagcgugcaguacaaccugagccacaccuacgccguggacgccgccaaccacugcggcaccaucgccaacggcgugcugcagaccuucaugagaauggccuggggcggcagcuacaucgcccuggacagcggcaagggcagcugggacugcaucaugaccagcuaccaguaccugaucauccagaacaccaccugggaggaccacugccaguucagcagacccagccccaucggcuaccugggccugcugagccagagaaccagagacaucuacaucagcagaagacugcugggcaccuucaccuggacccugagcgacagcgagggcaacgagacccccggcggcuacugccugaccagauggaugcugaucgaggccgagcugaagugcuucggcaacaccgccguggccaagugcaacgagaagcacgacgaggaguucugcgacaugcugagacuguucgacuucaacaagcaggccaucagaagacugaagacccccgcccagaugagcauccagcugaucaacaaggccgugaacgcccugaucaacgaccagcugaucaugaagaaccaccugagagacaucaugggcauccccuacugcaacuacagcaaguacugcuaccugaaccacaccgugaccggcaagaccagccugcccagaugcugccuggugagcaacggcagcuaccugaacgagacccacuucagcgacgacaucgagcagcaggccgacaacaugaucaccgagcugcugcagaaggaguacauggacagacagggcaagaccccccugggccugguggaccuguucguguucagcaccagcuucuaccugaucagcaucuuccugcaccugaucaagauccccacccacagacacaucaccggcaagcccugccccaagccccacagacugaaccacaugggcaucugcagcugcggccuguacaagcaccccggcgugcccgugaaguggaagagaugaggacuagucccuguucccagagcccacuuuuuuuucuuuuuuugaaauaaaauagccugucuuucagaucucaaaggcucuuuucagagccaccaaaaaaaaaaaaaaaaaaaaaaaaaaaaaaaaaaaaaaaaaaaaaaaaaaaaaaaaaaaaaaaaagaauu

SEQ ID NO: 31672 - RNA, 1714 nt, Artificial Sequence
  mRNA product Design a-1 (hSL-A64-N5) comprising derived and/or modified sequence from LASV(LASV253-NIG-2011;Clade II)__AIT17670__GPCmut7 (opt4)
aggagagucccgcagucggcguccagcggcucugcuuguucgugugugugucguugcaggccuuauucaagcuuaccaugggccagaucaucaccuucuuccaggaggugccccacgugaucgaggaggugaugaacaucgugcugaucgcccugagccugcuggccauccugaagggcaucuacaacguggccaccugcggccuguucggccuggugagcuuccugcugcugugcggcagaagcugcagcaccaccuacaagggcguguacgagcugcagacccuggagcuggacauggccagccugaacaugaccaugccccugagcugcaccaagaacaacagccaccacuacaucauggugggcaacgagaccggccuggagcugacccugaccaacaccagcaucaucaaccacaaguucugcaaccugagcgacgcccacaagaagaaccuguacgaccacgcccugaugagcaucaucagcaccuuccaccugagcauccccaacuucaaccaguacgaggccaugagcugcgacuucaacggcggcaagaucagcgugcaguacaaccugagccacaccuacgccguggacgccgccaaccacugcggcaccaucgccaacggcgugcugcagaccuucaugagaauggccuggggcggcagcuacaucgcccuggacagcggcaagggcagcugggacugcaucaugaccagcuaccaguaccugaucauccagaacaccaccugggaggaccacugccaguucagcagacccagccccaucggcuaccugggccugcugagccagagaaccagagacaucuacaucagcagaagacugcugggcaccuucaccuggacccugagcgacagcgagggcaacgagacccccggcggcuacugccugaccagauggaugcugaucgaggccgagcugaagugcuucggcaacaccgccguggccaagugcaacgagaagcacgacgaggaguucugcgacaugcugagacuguucgacuucaacaagcaggccaucagaagacugaaggcccccgcccagaugagcauccagcugaucaacaaggccgugaacgcccugaucaacgaccagcugaucaugaagaaccaccugagagacaucaugggcauccccuacugcaacuacagcaaguacugcuaccugaaccacaccgugaccggcagaaccagccugcccagaugcugccuggugagcaacggcagcuaccugaacgagacccacuucagcgacgacaucgagcagcaggccgacaacaugaucaccgagcugcugcagaaggaguacaucgacagacagggcaagaccccccugggccugguggaccuguucguguucagcaccagcuucuaccugaucagcaucuuccugcaccuggugaagauccccacccacagacacaucaucggcaagcccugccccaagccccacagacugaaccacaugggcaucugcagcugcggccuguacaagcaccccggcgugcccgugaaguggaagagaugaggacuagucccuguucccagagcccacuuuuuuuucuuuuuuugaaauaaaauagccugucuuucagaucucaaaggcucuuuucagagccaccaaaaaaaaaaaaaaaaaaaaaaaaaaaaaaaaaaaaaaaaaaaaaaaaaaaaaaaaaaaaaaaaagaauu

SEQ ID NO: 31673 - RNA, 1714 nt, Artificial Sequence
  mRNA product Design a-1 (hSL-A64-N5) comprising derived and/or modified sequence from LASV(LASV254-NIG-2011;Clade II)__AIT17674__GPCmut7 (opt4)
aggagagucccgcagucggcguccagcggcucugcuuguucgugugugugucguugcaggccuuauucaagcuuaccaugggccagaucaucaccuucuuccaggaggugccccacgugaucgaggaggugaugaacaucgugcugaucgcccugagccugcuggccauccugaagggcaucuacaacguggccaccugcggccuguucggccuggugagcuuccugcugcugugcggcagaagcugcagcaccaccuacaagggcguguacgagcugcagacccuggagcuggacaugaccaaccugaacaugaccaugccccugagcugcaccaagaacaacagccaccacuacaucauggugggcaacgagaccggccuggagcugacccugaccaacaccagcaucaucaaccacaaguucugcaaccugagcgacgcccacaagaagaaccuguacaaccacgcccugaugagcaucaucagcaccuuccaccugagcauccccaacuucaaccaguacgaggccaugagcugcgacuucaacggcggcaagaucagcgugcaguacaaccugagccacagcuacgccguggacgccgccaaccacugcggcaccaucgccaacggcgugcugcagaccuucaugagaauggccuggggcggcagcuacaucgcccuggacagcggcaagggcaacugggacugcaucaugaccagcuaccaguaccugaucauccagaacaccaccugggaggaccacugccaguucagcagacccagccccaucggcuaccugggccugcugagccagagaaccagagacaucuacaucagcagaagacugcugggcaccuucaccuggacccugagcgacagcgagggcaacgagacccccggcggcuacugccugaccagauggaugcugaucgaggccgagcugaagugcuucggcaacaccgccguggccaagugcaacgagaagcacgacgaggaguucugcgacaugcugagacuguucgacuucaacaagcaggccaucagaagacugaagacccccgcccaggccaacauccagcugaucaacaaggccgugaacgcccugaucaacgaccagcugaucaugaagaaccaccugagagacaucaugggcauccccuacugcaacuacagcaaguacugcuaccugaaccacaccgugaccggcaagaccagccugcccagaugcugccuggugagcaacggcagcuaccugaacgagacccacuucagcgacgacaucgagcagcaggccgacaacaugaucaccgagcugcugcagaaggaguacauggacagacagggcaagaccccccugggccugguggaccuguucguguucagcaccagcuucuaccugaucagcaucuuccugcaccuggugaagauccccacccacagacacgugaucggcaagcccugccccaagccccacagacugaaccacaugggcaucugcagcugcggccuguacaagcaccccggcgugcccgugaaguggaagagaugaggacuagucccuguucccagagcccacuuuuuuuucuuuuuuugaaauaaaauagccugucuuucagaucucaaaggcucuuuucagagccaccaaaaaaaaaaaaaaaaaaaaaaaaaaaaaaaaaaaaaaaaaaaaaaaaaaaaaaaaaaaaaaaaagaauu

SEQ ID NO: 31674 - RNA, 1714 nt, Artificial Sequence
  mRNA product Design a-1 (hSL-A64-N5) comprising derived and/or modified sequence from LASV(Nig08-A19;Clade III)__ADU56618__GPCmut7 (opt4)
aggagagucccgcagucggcguccagcggcucugcuuguucgugugugugucguugcaggccuuauucaagcuuaccaugggccagaucgugaccuucuuccaggaggugccccacgugaucgaggaggugaugaacaucgugcugaucgcccugagcauccuggccauccugaagggccuguacaacaucgccaccugcggccugaucggccuggugaccuuccugcugcugagcggcagaagcugcagcaugaccuacaagggcguguacgagcugcagacccuggagcugaacaugaacacccugaacaugaccaugccccugagcugcaccaagaacaacagccaccacuacaucauggugggcaacgagaccggccuggagcugacccugaccaacaccagccugcugcaccacaaguucugcaaccugagcgacgcccacaagaagaaccuguacgaccacacccugaugagcaucaucagcaccuuccaccugagcauccccaacuucaaccaguacgaggccaugagcugcgacuucaacggcggcaagaucaccgugcaguacaaccugagccacagcuacgccaucgacgccgccaaccacugcggcaccguggccaacggcgugcugcagaccuucaugagaauggccuggggcggcagcuacaucgcccuggacagcggcagaggcaagugggacugcaucaugaccagcuaccaguaccugaucauccagaacaccaccugggaggaccacugccaguucagcagacccagccccaucggcuaccugggccugcugagccagagaaccagagacaucuacaucagcagaagacugcugggcaccuucaccuggacccugagcgacagcgagggcaacgagacccccggcggcuacugccugaccagauggaugcugaucgaggccgagcugaagugcuucggcaacaccgccguggccaagugcaacgagaagcacgacgaggaguucugcgacaugcugagacuguucgacuucaacaagcaggccaucagaagacugaaggcccccgcccagaugagcauccagcugaucaacaaggccgugaacgcccugaucaacgaccagcugaucaugaagaaccaccugagagacaucaugggcauccccuacugcaacuacagcaaguacugcuaccugaaccacaccagcaccggcagaaccagccugcccagaugcugccuggugagcaacggcagcuaccugaacgagacccacuucagcgacgacaucgagcagcaggccgacaacaugaucaccgagaugcugcagaaggaguaccuggacagacagggcaagaccccccugggccugguggaccuguucguguucagcaccagcuucuaccugaucagcaucuuccugcaccuggugaagauccccacccacagacacaucgugggcaagcccugccccaagccccacagacugaaccacaugggcaucugcagcugcggccuguacaagcagcccggcgugcccgugagauggaagagaugaggacuagucccuguucccagagcccacuuuuuuuucuuuuuuugaaauaaaauagccugucuuucagaucucaaaggcucuuuucagagccaccaaaaaaaaaaaaaaaaaaaaaaaaaaaaaaaaaaaaaaaaaaaaaaaaaaaaaaaaaaaaaaaaagaauu

SEQ ID NO: 31675 - RNA, 1717 nt, Artificial Sequence
  mRNA product Design a-1 (hSL-A64-N5) comprising derived and/or modified sequence from LASV(G1180-SLE-2010;Clade IV)__AIT17168__GPCmut7 (opt4)
aggagagucccgcagucggcguccagcggcucugcuuguucgugugugugucguugcaggccuuauucaagcuuaccaugggccagaucgugaccuucuuccaggaggugccccacgugaucgaggaggugaugaacaucgugcugaucgcccugagcauccuggccgugcugaagggccuguacaacuucgccaccugcggccuggugggccugcugaccuuccugcugcugugcggcagaagcugcaccgccagcagauacaagggcguguacgagcugcagacccuggagcugaacauggagacccugaacaugaccaugccccugagcugcaccaagaacaacagccaccacuacaucauggugggcaacgagaccggccuggagcugacccugaccaacaccagcaucaucaaccacaaguucugcaaccugagcgacgcccacaagaagaaccuguacgaccacgcccugaugagcaucaucagcaccuuccaccugagcauccccaacuucaaccaguacgaggccaugagcugcgacuucaacggcggcaagaucagcgugcaguacaaccugagccacagcuacgccggcgacgccgccaaccacugcggcaccguggccaacggcgugcugcagaccuucaugagaauggccuggggcggcagcuacaucgcccuggacagcggccacggcagcugggacugcaucaugaccagcuaccaguaccugaucauccagaacaccaccugggaggaccacugccaguucagcagacccagccccaucggcuaccugggccugcugagccagagaaccagagacaucuacaucagcagaagacugcugggcaccuucaccuggacccugagcgacagcgagggcaaggacacccccggcggcuacugccugaccagauggaugcugaucgaggccgagcugaagugcuucggcaacaccgccguggccaagugcaacgagaagcacgacgaggaguucugcgacaugcugagacuguucgacuucaacaagcaggccauccagagacugaaggcccccgcccagaugagcauccagcugaucaacaaggccgugaacgcccugaucaacgaccagcugaucaugaagaaccaccugagagacaucaugggcauccccuacugcaacuacagcaaguacugcuaccugaaccacaccaccaccggcaagaccagccugcccaagugcugccuggugagcaacggcagcuaccugaacgagacccacuucagcgacgacaucgagcagcaggccgacaacaugaucaccgagaugcugcagaaggaguacauggagagacagggcaagaccccccugggccugguggaccuguucguguucagcaccagcuucuaccugaucagcaucuuccugcaccuggugaagauccccacccacagacacaucgugggcaagagcugccccaagccccacagacugaaccacaugggcaucugcagcugcggccuguacaagcagcccggcgugcccgugaaguggaagagaugaggacuagucccuguucccagagcccacuuuuuuuucuuuuuuugaaauaaaauagccugucuuucagaucucaaaggcucuuuucagagccaccaaaaaaaaaaaaaaaaaaaaaaaaaaaaaaaaaaaaaaaaaaaaaaaaaaaaaaaaaaaaaaaaagaauu

SEQ ID NO: 31676 - RNA, 1717 nt, Artificial Sequence
  mRNA product Design a-1 (hSL-A64-N5) comprising derived and/or modified sequence from LASV(G1442-SLE-2011;Clade IV)__AIT17180__GPCmut7 (opt4)
aggagagucccgcagucggcguccagcggcucugcuuguucgugugugugucguugcaggccuuauucaagcuuaccaugggccagaucgugaccuucuuccaggaggugccccacgugaucgaggaggugaugaacaucgugcugaucgcccugagcauccuggccgugcugaagggccuguacaacguggccaccugcggccugaucggccuggugaccuuccugcugcugugcggcagaagcugcaccaccacccuguacaagggcguguacgagcugcagacccuggagcugaacauggagacccugaacaugaccaugccccugagcugcaccaagaacaacagccaccacuacaucagagugggcaacgagaccggccuggagcugacccugaccaacaccagcaucaucaaccacaaguucugcaaccugagcgacgcccacaagaagaaccuguacgaccacgcccugaugagcaucaucagcaccuuccaccugagcauccccaacuucaaccaguacgaggccaugagcugcgacuucaacggcggcaagaucagcgugcaguacaaccugagccacagcuacgccggcgacgccgccaaccacugcggcaccguggccaacggcgugcugcagaccuucaugagaauggccuggggcggcagcuacaucgcccuggacagcggcagaggcaacugggacugcaucaugaccagcuaccaguaccugaucauccagaacaccaccugggacgaccacugccaguucagcagacccagccccaucggcuaccugggccugcugagccagagaaccagagacguguacaucagcagaagacugcugggcaccuucaccuggacccugagcgacagcgagggcaaggacacccccggcggcuacugccugaccagauggaugcugaucgaggccgagcugaagugcuucggcaacaccgccguggccaagugcaacgagaagcacgacgaggaguucugcgacaugcugagacuguucgacuucaacaagcaggccauccagagacugaaggcccccgcccagaugagcauccagcugaucaacaaggccgugaacgcccugaucaacgaccagcugaucaugaagaaccaccugagagacaucaugggcauccccuacugcaacuacagcaaguacugcuaccugaacaacaccgccaccggcaagaccagccugcccaagugcugccugaucagcaacggcagcuaccugaacgagacccacuucagcgacgacaucgagcaggaggccgacaacaugaucaccgagaugcugcagaaggaguacauggagagacagggcaagaccccccugggccugguggaccuguucguguucagcaccagcuucuaccugaucagcaucuuccugcaccuggugaagauccccacccacagacacaucgugggcaagagcugccccaagccccacagacugaaccacaugggcaucugcagcugcggccuguacaagcagcccggcgugcccgugagauggaagagaugaggacuagucccuguucccagagcccacuuuuuuuucuuuuuuugaaauaaaauagccugucuuucagaucucaaaggcucuuuucagagccaccaaaaaaaaaaaaaaaaaaaaaaaaaaaaaaaaaaaaaaaaaaaaaaaaaaaaaaaaaaaaaaaaagaauu

SEQ ID NO: 31677 - RNA, 1717 nt, Artificial Sequence
  mRNA product Design a-1 (hSL-A64-N5) comprising derived and/or modified sequence from LASV(G3010-SLE-2013;Clade IV)__AIT17344__GPCmut7 (opt4)
aggagagucccgcagucggcguccagcggcucugcuuguucgugugugugucguugcaggccuuauucaagcuuaccaugggccagaucgugaccuucuuccaggaggugccccacgugaucgaggaggugaugaacaucgugcugaucgcccugagcauccuggccgugcugaagggccuguacaacuucgccaccugcggccuggugggccuggugaccuuccugcugcugugcggcagaagcugcaccaccagccuguacaagggcguguacgagcugcagacccuggagcugaacauggagacccugaacaugaccaugccccugagcugcaccaagaacaacagccaccacuacaucauggugggcaacgagaccggccuggagcugacccugaccaacaccagcaucaucaaccacaaguucugcaaccugagcgacgcccacaagaagaaccuguacaaccacgcccugaugagcaucaucagcaccuuccaccugagcauccccaacuucaaccaguacgaggccaugagcugcgacuucaacggcggcaagaucagcgugcaguacaaccugagccacagcuacgccggcgacgccgccagccacugcggcaccguggccaacggcgugcugcagaccuucaugagaauggccuggggcggcagcuacaucgcccuggacagcggcuacggcaagugggacugcaucaugaccagcuaccaguaccugaucauccagaacaccaccugggaggaccacugccaguucagcagacccagccccaucggcuaccugggccugcugagccagagaaccagagacaucuacaucagcagaagacugcugggcaccuucaccuggacccugagcgacagcgagggcaaggacacccccggcggcuacugccugaccagauggaugcugaucgaggccgagcugaagugcuucggcaacaccgccguggccaagugcaacgagaagcacgacgaggaguucugcgacaugcugagacuguucgacuucaacaagcaggccauccagagacugaagacccccgcccagaugagcauccagcugaucaacaaggccgugaacgcccugaucaacgaccagcugaucaugaagaaccaccugagagacaucaugggcauccccuacugcaacuacagcaaguacugcuaccugaaccacaccaccaccggcaagaccagccugcccaagugcugccuggugagcaacggcagcuaccugaacgagacccacuucagcgacgacaucgagcagcaggccgacaacaugaucaccgagaugcugcagaaggaguacauggagagacagggcaagaccccccugggccugguggaccuguucguguucagcaccagcuucuaccugaucagcaucuuccugcaccuggugaagauccccacccacagacacaucgugggcaagagcugccccaagccccacagacugaaccacaugggcaucugcagcugcggccuguacaagcagcccggcgugcccgugagauggaagagaugaggacuagucccuguucccagagcccacuuuuuuuucuuuuuuugaaauaaaauagccugucuuucagaucucaaaggcucuuuucagagccaccaaaaaaaaaaaaaaaaaaaaaaaaaaaaaaaaaaaaaaaaaaaaaaaaaaaaaaaaaaaaaaaaagaauu

SEQ ID NO: 31678 - RNA, 1717 nt, Artificial Sequence
  mRNA product Design a-1 (hSL-A64-N5) comprising derived and/or modified sequence from LASV(G502-SLE-2009;Clade IV)__AIT17126__GPCmut7 (opt4)
aggagagucccgcagucggcguccagcggcucugcuuguucgugugugugucguugcaggccuuauucaagcuuaccaugggccagaucgugaccuucuuccaggaggugccccacgugaucgaggaggugaugaacaucgugcugaucgcccugagcauccuggccgugcugaagggccuguacaacuucgccaccugcggccuggugggccugcugaccuuccugcugcugugcggcagaagcugcaccaccggccuguacaagggcguguacgagcugcagacccuggagcugaacauggagacccugaacaugaccaugccccugagcugcaccaagaacaacagccaccacuacaucauggugggcaacgagaccggccuggagcugacccugaccaacaccagcaucaucaaccacaaguucugcaaccugagcgacgcccacaagaagaaccuguacgaccacgcccugaugagcaucaucagcaccuuccaccugagcauccccaacuucaaccaguacgaggccaugagcugcgacuucaacggcggcaagaucagcgugcaguacaaccugagccacagcuacgccggcgacgccgccgaccacugcggcaccguggccaacggcgugcugcagaccuucaugagaauggccuggggcggcagcuacaucgcccuggacagcggcagaggcagaugggacugcaucaugaccagcuaccaguaccugaucauccagaacaccaccugggaggaccacugccaguucagcagacccagccccaucggcuaccugggccugcugagccagagaaccagagacaucuacaucagcagaagacugcugggcaccuucaccuggacccugagcgacagcgagggcaaggacacccccggcggcuacugccugaccagauggaugcugaucgaggccgagcugaagugcuucggcaacaccgccguggccaagugcaacgagaagcacgacgaggaguucugcgacaugcugagacuguucgacuucaacaagcaggccauccagagacugaaggcccccgcccagaugagcauccagcugaucaacaaggccgugaacgcccugaucaacgaccagcuggugaugaagaaccaccugagagacaucaugggcauccccuacugcaacuacagcagauacugcuaccugaaccacaccaccaccggcagaaccagccugcccaagugcugccuggugagcaacggcagcuaccugaacgagacccacuucagcgacgacaucgagcagcaggccgacaacaugaucaccgagaugcugcagaaggaguacauggagagacagggcaagaccccccugggccugguggaccuguucguguucagcaccagcuucuaccugaucagcaucuuccugcaccuggugaagauccccacccacagacacaucgugggcaagagcugccccaagccccacagacugaaccacaugggcaucugcagcugcggccuguacaagcagcccggcgugcccgugaaguggaagagaugaggacuagucccuguucccagagcccacuuuuuuuucuuuuuuugaaauaaaauagccugucuuucagaucucaaaggcucuuuucagagccaccaaaaaaaaaaaaaaaaaaaaaaaaaaaaaaaaaaaaaaaaaaaaaaaaaaaaaaaaaaaaaaaaagaauu

SEQ ID NO: 31679 - RNA, 1717 nt, Artificial Sequence
  mRNA product Design a-1 (hSL-A64-N5) comprising derived and/or modified sequence from LASV(G733-SLE-2010;Clade IV)__AIT17154__GPCmut7 (opt4)
aggagagucccgcagucggcguccagcggcucugcuuguucgugugugugucguugcaggccuuauucaagcuuaccaugggccagaucgugaccuucuuccaggaggugccccacgugaucgaggaggugaugaacaucgugcugaucgcccugagcauccuggccgugcugaagggccuguacaacuucgccaccugcggcaucgugggccuggugagcuuccugcugcugugcggcagaagcugcaccaccagccuguacaagggcguguacgagcugcagacccuggagcugaacauggagacccugaacaugaccaugccccugagcugcaccaagaacaacagccaccacuacaucauggugggcaacgagaccggccuggagcugacccugaccaacaccagcaucaucaaccacaaguucugcaaccugagcgacgcccacaagaagaaccuguacgaccacgcccugaugagcaucaucagcaccuuccaccugagcauccccaacuucaaccaguacgaggccaugagcugcgacuucaacggcggcaagaucagcgugcaguacaaccugagccacagcuacgccggcgacgccgccaaccacugcggcaccaucgccaacggcgugcugcagaccuucaugagaauggccuggggcggcagcuacaucgcccuggacagcggcagagacagaugggacugcaucaugaccagcuaccaguaccugaucauccagaacaccaccugggaggaccacugccaguucagcagacccagccccaucggcuaccugggccugcugagccagagaaccagagacaucuacaucagcagaagacugcugggcaccuucaccuggacccugagcgacagcgagggcaaggacacccccggcggcuacugccugaccagauggaugcugaucgaggccgagcugaagugcuucggcaacaccgccguggccaagugcaacgagaagcacgacgaggaguucugcgacaugcugagacuguucgacuucaacaagcaggccauccagagacugaaggcccccgcccagaugagcauccagcugaucaacaaggccgugaacgcccugaucaacgaccagcugaucaugaagaaccaccugagagacaucaugggcauccccuacugcaacuacagcaaguacugcuaccugaaccacaccaccaccggcaagaccagccugcccaagugcugccuggugagcaacggcagcuaccugaacgagacccacuucagcgacgacaucgagcagcaggccgacaacaugaucaccgagaugcugcagaaggaguacauggagagacagggcaagaccccccugggccugguggaccuguucguguucagcaccagcuucuaccugaucagcaucuuccugcaccuggugaagauccccacccacagacacguggugggcaagagcugccccaagccccacagacugaaccacaugggcaucugcagcugcggccuguacggccagcccggcgugcccgugaaguggaagagaugaggacuagucccuguucccagagcccacuuuuuuuucuuuuuuugaaauaaaauagccugucuuucagaucucaaaggcucuuuucagagccaccaaaaaaaaaaaaaaaaaaaaaaaaaaaaaaaaaaaaaaaaaaaaaaaaaaaaaaaaaaaaaaaaagaauu

SEQ ID NO: 31680 - RNA, 1717 nt, Artificial Sequence
  mRNA product Design a-1 (hSL-A64-N5) comprising derived and/or modified sequence from MOPV/LASV reassortant(IGS-1;Clade IV)__AFY05576__GPCmut7 (opt4)
aggagagucccgcagucggcguccagcggcucugcuuguucgugugugugucguugcaggccuuauucaagcuuaccaugggccagaucgugaccuucuuccaggaggugccccacgugaucgaggaggugaugaacaucgugcugaucgcccugagcgugcuggccgugcugaagggccuguacaacuucgccaccugcggccuggugggccuggugaccuuccugcugcugugcggcagaagcugcaccaccagccuguacaagggcguguacgagcugcagacccuggagcugaacauggagacccugaacaugaccaugccccugagcugcaccaagaacaacagccaccacuacaucauggugggcaacgagaccggccuggagcugacccugaccaacaccagcaucaucaaccacaaguucugcaaccugagcgacgcccacaagaagaaccuguacgaccacgcccugaugagcaucaucagcaccuuccaccugagcauccccaacuucaaccaguacgaggccaugagcugcgacuucaacggcggcaagaucagcgugcaguacaaccugagccacagcuacgccggcgacgccgccaaccacugcggcaccguggccaacggcgugcugcagaccuucaugagaauggccuggggcggcagcuacaucgcccuggacagcggcagaggcaacugggacugcaucaugaccagcuaccaguaccugaucauccagaacaccaccugggaggaccacugccaguucagcagacccagccccaucggcuaccugggccugcugagccagagaaccagagacaucuacaucagcagaagacugcugggcaccuucaccuggacccugagcgacagcgagggcgaggacacccccggcggcuacugccugaccagauggaugcugaucgaggccgagcugaagugcuucggcaacaccgccguggccaagugcaacgagaagcacgacgaggaguucugcgacaugcugagacuguucgacuucaacaagcaggccauccagagacugaaggcccccgcccagaugagcauccagcugaucaacaaggccgugaacgcccugaucaacgaccagcugaucaugaagaaccaccugagagacaucaugggcauccccuacugcaacuacagcaaguacugcuaccugaaccacaccaccaccggcagaaccagccugcccaagugcugccuggugagcaacggcagcuaccugaacgagacccacuucagcgacgacaucgagcagcaggccgacaacaugaucaccgagaugcugcagaaggaguacauggagagacagggcaagaccccccugggccugguggaccuguucguguucagcaccagcuucuaccugaucagcaucuuccugcaccuggugaagauccccacccacagacacaucgugggcaagagcugccccaagccccacagacugaaccacaugggcaucugcagcugcggccuguacaagcagcccggcgugcccgugaaguggaagagaugaggacuagucccuguucccagagcccacuuuuuuuucuuuuuuugaaauaaaauagccugucuuucagaucucaaaggcucuuuucagagccaccaaaaaaaaaaaaaaaaaaaaaaaaaaaaaaaaaaaaaaaaaaaaaaaaaaaaaaaaaaaaaaaaagaauu

SEQ ID NO: 31681 - RNA, 1717 nt, Artificial Sequence
  mRNA product Design a-1 (hSL-A64-N5) comprising derived and/or modified sequence from LASV(LM765-SLE-2012;Clade IV)__AIT17814__GPCmut7 (opt4)
aggagagucccgcagucggcguccagcggcucugcuuguucgugugugugucguugcaggccuuauucaagcuuaccaugggccagaucgugaccuucuuccaggaggugccccacgugaucgaggaggugaugaacaucgugcugaucgcccugagcauccuggccgugcugaagggccuguacaacuucgccaccugcggccuggugggccuggugaccuuccugcugcugugcggcagaagcugcaccaccagccuguacaagggcguguacgagcugcagacccuggagcugaacauggagacccugaacaugaccaugccccugagcugcaccaagaacaacagccaccacuacaucauggugggcaacgagaccggccuggagcugacccugaccaacaccagcaucaucgaccacaaguucugcaaccugagcgacgcccacagaaagaaccuguacgaccacgcccugaugagcaucaucagcaccuuccaccugagcauccccaacuucaaccaguacgaggccaugagcugcgacuucaacggcggcaagaucagcgugcaguacaaccugagccacagcuacgccaaggacgccgccgaccacugcggcaccguggccaacggcgugcugcagaccuucaugagaauggccuggggcggcagcuacaucgcccuggacagcggcagaggcagaugggacugcaucaugaccagcuaccaguaccugaucauccagaacaccaccugggaggaccacugccaguucagcagacccagccccaucggcuaccugggccugcugagccagagaaccagagacaucuacaucagcagaagacugcugggcaccuucaccuggacccugagcgacagcgagggcaaggacacccccggcggcuacugccugaccagauggaugcugaucgaggccgagcugaagugcuucggcaacaccgccguggccaagugcaacgagaagcacgacgaggaguucugcgacaugcugagacuguucgacuucaacaagcaggccauccagagacugaaggcccccgcccagaugagcauccagcugaucaacaaggccgugaacgcccugaucaacgaccagcugaucaugaagaaccaccugagagacaucaugggcauccccuacugcaacuacagcaaguacugcuaccugaaccacaccaccaccggcaagaccagccugcccaagugcugccuggugagcaacggcagcuaccugaacgagacccacuucagcgacgacaucgagcagcaggccgacaacaugaucaccgagaugcugcagaaggaguacauggagagacagggcaagaccccccugggccugguggaccuguucguguucagcaccagcuucuaccugaucagcaucuuccugcaccuggugaagauccccacccacagacacaucgugggcaagcccugccccaagccccacagacugaaccacaugggcaucugcagcugcggccuguacaagcagcccggcgugcccgugaaguggaagagaugaggacuagucccuguucccagagcccacuuuuuuuucuuuuuuugaaauaaaauagccugucuuucagaucucaaaggcucuuuucagagccaccaaaaaaaaaaaaaaaaaaaaaaaaaaaaaaaaaaaaaaaaaaaaaaaaaaaaaaaaaaaaaaaaagaauu

SEQ ID NO: 31682 - RNA, 1717 nt, Artificial Sequence
  mRNA product Design a-1 (hSL-A64-N5) comprising derived and/or modified sequence from LASV(LM776-SLE-2012;Clade IV)__AIT17824__GPCmut7 (opt4)
aggagagucccgcagucggcguccagcggcucugcuuguucgugugugugucguugcaggccuuauucaagcuuaccaugggccagaucgugaccuucuuccaggaggugccccacgugaucgaggaggugaugaacaucgugcugaucgcccugagcauccuggccgugcugaagggccuguacaacuucgccaccugcggccuggugggccuggugaccuuccugcugcugugcggcagaagcugcaccaccagcguguacaagggcguguacgagcugcagacccuggagcugaacauggagacccugaacaugaccaugccccugagcugcaccaagaacaacagccaccacuacaucauggugggcaacgagaccggccuggagcugacccugaccaacaccagcaucaucaaccacaaguucugcaaccugagcgacgcccacaagaagaaccuguacgaccacgcccugaugagcaucaucagcaccuuccaccugagcauccccaacuucaaccaguacgaggccaugagcugcgacuucaacggcggcaagaucagcgugcaguacaaccugagccacagcuacgccggcgacgccgccaaccacugcggcaccguggccaacggcgugcugcagaccuucaugagaauggccuggggcggcagcuacaucgcccuggacagcggccacggcaagugggacugcaucaugaccagcuaccaguaccugaucauccagaacaccaccugggaggaccacugccaguucagcagacccagccccaucggcuaccugggccugcugagccagagaaccagagacaucuacaucagcagaagacugcugggcaccuucaccuggacccugagcgacagcgagggcaaggacacccccggcggcuacugccugaccagauggaugcugaucgaggccgagcugaagugcuucggcaacaccgccguggccaagugcaacgagaagcacgacgaggaguucugcgacaugcugagacuguucgacuucaacaagcaggccauccagagacugaaggcccccgcccagaugagcauccagcugaucaacaaggccgugaacgcccugaucaacgaccagcugaucaugaagaaccaccugagagacaucaugggcauccccuacugcaacuacagcaaguacugcuaccugaaccacaccaccaccggcaagaccagccugcccaagugcugccuggugagcaacggcagcuaccugaacgagacccacuucagcgacgacaucgagcagcaggccgacaacaugaucaccgagaugcugcagaaggaguacauggagagacagggcaagaccccccugggccugguggaccuguucguguucagcaccagcuucuaccugaucagcaucuuccugcaccuggugaagauccccacccacagacacaucgugggcaagagcugccccaagccccacagacugaaccacaugggcaucugcagcugcggccuguacaagcagcccggcgugcccgugagauggaagagaugaggacuagucccuguucccagagcccacuuuuuuuucuuuuuuugaaauaaaauagccugucuuucagaucucaaaggcucuuuucagagccaccaaaaaaaaaaaaaaaaaaaaaaaaaaaaaaaaaaaaaaaaaaaaaaaaaaaaaaaaaaaaaaaaagaauu

SEQ ID NO: 31683 - RNA, 1717 nt, Artificial Sequence
  mRNA product Design a-1 (hSL-A64-N5) comprising derived and/or modified sequence from LASV(Mad39;Clade IV)__ANH09722__GPCmut7 (opt4)
aggagagucccgcagucggcguccagcggcucugcuuguucgugugugugucguugcaggccuuauucaagcuuaccaugggccagaucgugaccuucuuccaggaggugccccacgugaucgaggaggugaugaacaucgugcugaucgcccugagcauccuggccgugcugaagggccuguacaacguggccaccugcggccugaucggccuggugaccuuccugcugcugugcggcagaagcugcaccaccacccuguacaagggcguguacgagcugcaggcccuggagcugaacauggagacccugaacaugaccaugccccugagcugcaccaagaacaacagccaccacuacaucagagugggcaacgagaccggccuggagcugacccugaccaacaccagccugaucaaccacaaguucugcaaccugagcgacgcccacaagaagaaccuguacgaccacgcccugaugagcaucaucagcaccuuccaccugagcauccccaacuucaaccaguacgaggccaugagcugcgacuucaacgacggcaagaucagcgugcaguacaaccugagccacaccuacgccggcgacaccgccaaccacugcggcaccguggccaacggcgugcugcagaccuucaugagaauggccuggggcggcagcuacaucgcccuggacagcggcagaggcggcugggacugcaucaugaccagcuaccaguaccugaucauccagaacaccaccugggaggaccacugccaguucagcagacccagccccaucggcuaccugggccugcugagccagagaaccagagacaucuacaucagcagaagacugcugggcaccuucaccuggacccugagcgacagcgagggcaaggacacccccggcggcuacugccugaccagauggaugcugaucgaggccgagcugaagugcuucggcaacaccgccguggccaagugcaacgagaagcacgacgaggaguucugcgacaugcugagacuguucgacuucaacaagcaggccauccagagacugaaggcccccgcccagaugagcauccagcugaucaacaaggccgugaacgcccugaucaacgaccagcugaucaugaagaaccaccugagagacaucaugggcauccccuacugcaacuacagcaaguacugcuaccugaaccacaccgugaccggcaagaccagccugcccaagugcugccuggugagcaacggcagcuaccugaacgagacccacuucagcgacgacaucgagcagcaggccgacaacaugaucaccgagaugcugcagaaggaguacauggagagacagggcaagaccccccugggccugguggaccuguucguguucagcaccagcuucuaccugaucagcaucuuccugcaccuggugaagauccccacccacagacacguggugggcaagcccugccccaagccccacagacugaaccacaugggcaucugcagcugcggcuucuacaagcagcccggcgugcccgugagauggaagagaugaggacuagucccuguucccagagcccacuuuuuuuucuuuuuuugaaauaaaauagccugucuuucagaucucaaaggcucuuuucagagccaccaaaaaaaaaaaaaaaaaaaaaaaaaaaaaaaaaaaaaaaaaaaaaaaaaaaaaaaaaaaaaaaaagaauu

SEQ ID NO: 31684 - RNA, 1717 nt, Artificial Sequence
  mRNA product Design a-1 (hSL-A64-N5) comprising derived and/or modified sequence from LASV(Z0947-SLE-2011;Clade IV)__AIT17840__GPCmut7 (opt4)
aggagagucccgcagucggcguccagcggcucugcuuguucgugugugugucguugcaggccuuauucaagcuuaccaugggccagaucgugaccuucuuccaggaggugccccacgugaucgaggaggugaugaacaucgugcugaucgcccugagcauccuggccgugcugaagggccuguacaacuucgccaccugcggccuggugggccuggugaccuuccugcugcugugcggcagaagcugcaccaucagccuguacaagggcguguacgagcugcagacccuggagcugaacauggagacccugaacaugaccaugccccugagcugcaccaagaacaacagccaccacuacaucauggugggcaacgagaccggccuggagcugacccugaccaacaccagcaucaucaaccacaaguucugcaaccugagcgacgcccacaagaagaaccuguacgaccacgcccugaugagcaucaucagcaccuuccaccugagcauccccaacuucaaccaguacgaggccaugagcugcgacuucaacggcggcaagaucagcgugcaguacaaccugagccacagcuacgccggcgacgccgccaaccacugcggcaccguggccaacggcgugcugcagaccuucaugagaauggccuggggcggcagcuacaucgcccuggacagcggcagagacagaugggacugcaucaugaccagcuaccaguaccugaucauccagaacaccaccugggaggaccacugccaguucagcagacccagccccaucggcuaccugggccugcugagccagagaaccagagacaucuacaucagcagaagacugcugggcaccuucaccuggacccugagcgacagcgagggcaaggacacccccggcggcuacugccugaccagauggaugcugaucgaggccgagcugaagugcuucggcaacaccgccguggccaagugcaacgagaagcacgacgaggaguucugcgacaugcugagacuguucgacuucaacaagcaggccauccagagacugaaggcccccgcccagaugagcauccagcugaucaacaaggccgugaacgcccugaucaacgaccagcugaucaugaagaaccaccugagagacaucaugggcauccccuacugcaacuacagcaaguacugcuaccugaaccacaccaccaccggcaagaccagccugcccaagugcugccuggugagcaacggcagcuaccugaacgagacccacuucagcgacgacaucgagcagcaggccgacaacaugaucaccgagaugcugcagaaggaguacauggagagacagggcaagaccccccugggccugguggaccuguucguguucagcaccagcuucuaccugaucagcaucuuccugcaccuggugaagauccccacccacagacacaucgugggcaagcccugccccaagccccacagacugaaccacaugggcaucugcagcugcggccuguacaagcagcccggcgugcccgugaaguggaagagaugaggacuagucccuguucccagagcccacuuuuuuuucuuuuuuugaaauaaaauagccugucuuucagaucucaaaggcucuuuucagagccaccaaaaaaaaaaaaaaaaaaaaaaaaaaaaaaaaaaaaaaaaaaaaaaaaaaaaaaaaaaaaaaaaagaauu

SEQ ID NO: 31685 - RNA, 1717 nt, Artificial Sequence
  mRNA product Design a-1 (hSL-A64-N5) comprising derived and/or modified sequence from LASV(Josiah;Clade IV)__NP_694870__GPCmut7 (opt5)
aggagagucccgcagucggcguccagcggcucugcuuguucgugugugugucguugcaggccuuauucaagcuuaccaugggccagaucgugaccuucuuucaagaggucccccacguuauugaagaggugaugaacaucgugcugauugcccucagcguccuggcugugcuuaaggggcuguacaauuucgccacaugcggacucguuggccuggugacguuucuucugcucugugggagauccugcaccacaucucuguauaaaggagucuacgaacugcagacccucgagcugaacauggaaacacuuaauaugaccaugccucugagcuguacaaagaacaauucccaucacuauaucauggugggcaacgagaccgggcucgagcugacgcuuaccaauacaucuauuaucaaccauaaauucugcaaucugagcgacgcgcacaagaaaaaccucuacgaucaugcucugauguccaucauuucuaccuuucaccugagcaucccgaauuucaaccaguaugaagccauguccugugacuuuaauggaggcaagauuagcguucaguacaaccucucucacuccuaugccggcgaugcugccaaucauugcgggacaguggcuaacggaguccugcaaaccuucaugcggauggccuggggcgggagcuacaucgcgcuugacucuggacgcggcaacugggauuguauuaugacguccuaccaguaucugaucauucagaauacaaccugggaggaccacugccaguuuagcagacccucuccuaucggguaccucggacugcuuucccaacggacacgcgauaucuauauuagcagacggcugcucggcaccuucaccuggacacuguccgacucugaaggcaaggauacgcccgggggauacugucugacccgcuggaugcucaucgaggccgagcugaaaugcuuuggcaacacagcuguggccaaguguaaugaaaaacaugacgaggaguucugcgauaugcuuagacuguuugacuucaacaagcaggcuauucagcggcucaaagccccugcgcagaugagcauccaacugauuaauaaggccgugaacgcucuuaucaaugaucagcugaucaugaagaaccaccuccgcgacauuauggggauccccuauugcaauuacuccaaauauuguuaccugaaccacaccacaaccggaagaacgagccugccuaagugcugucucgucucuaauggcuccuaccugaacgaaacacauuucagcgacgauauugaacagcaagccgacaauaugaucaccgagaugcuucagaaagaguauauggaacggcaggggaagaccccgcugggacucguugaucuguuuguguucucuaccagcuuuuaccugauuuccaucuuccuucaccucgugaaaauccccacacaucgccacauugucggcaagucuugcccuaaaccccauagacugaaccacaugggcaucuguagcugcgggcuguauaagcagccuggagugcccguuaaguggaaacggugaggacuagucccuguucccagagcccacuuuuuuuucuuuuuuugaaauaaaauagccugucuuucagaucucaaaggcucuuuucagagccaccaaaaaaaaaaaaaaaaaaaaaaaaaaaaaaaaaaaaaaaaaaaaaaaaaaaaaaaaaaaaaaaaagaauu

SEQ ID NO: 31686 - RNA, 1714 nt, Artificial Sequence
  mRNA product Design a-1 (hSL-A64-N5) comprising derived and/or modified sequence from LASV(LP;Clade I)__AAF86701__GPCmut7 (opt5)
aggagagucccgcagucggcguccagcggcucugcuuguucgugugugugucguugcaggccuuauucaagcuuaccaugggccagaucauuaccuucuuucaagaggugccccacgucaucgaagagguuaugaacauugugcugaucgcccucagccugcuugcuauucugaaggggcucuacaauaucgccacaugcggaaucauuggccugguggcguuccuuuuucugugugggaaauccugcucucucacgcugaagggaggcuaugaacugcagacccucgagcugaacauggaaacacuuaauaugaccaugccucugagcuguaccaaaaacuccucucaucacuacaucagagucgggaaugagacaggacucgagcugacacuuaccaacacgagcauuaucaaucauaaguucugcaaccuguccgacgcucacaaaaagaaucucuaugaucaugcccugaugucuauuaucagcaccuuucaccuguccauuccgaacuucaaucaguacgaagccaugagcugugacuuuaacggcggcaagaucucugugcaguauaaucucucccacagcuacgcuggggaugccgcugagcauugcggaacaguugccaacggcgugcugcaaaccuucaugcggauggcguggggagggcgcuauaucgcccuugacucuggcaaagggaauugggauuguauuaugacauccuaccaguaccugaucauucagaacaccacgugggaagaccacugccaguuuagcagacccucuccuaucggauaucucggccugcuuucccaacggacacgcgauauuuacaucagcagacggcugcucggcaccuucacauggacccuguccgacucugaggggaacgagacccccggaggcuauugucugacacgcuggaugcucaucgaagcugagcugaagugcuuugggaauacggccgucgcuaaauguaacgaaaagcaugaugaggaguucugcgacaugcuuagacuguuugauuucaauaaacaggccauucggcgccucaaggcgccugcccagaugagcauccagcugauuaacaaggcugugaaugcccuuaucaacgaccaacugauuaugaaaaaucaccucagagauaucaugggaauccccuacugcaacuauuccaaguacuguuaucugaaucacaccagcucuggccggacaucccugccuaaaugcugucucauuagcaacgggucuuaccugaaugaaacccaguucagcgacgacaucgagcagcaagcugauaacaugauuacagaaaugcuucagaaggaguacaucgaacgccagggaaaaaccccgcugggccucguugacauuuuuaucuucuccacgucuuuuuaucugauuagcaucuuccugcaucuuaucaagauucccacacacagacauaucgugggcaaaccuugccccaagccucaccggcucaaucauaugggggucuguuccugcggacuguacaagcaccccggcgugccgaccaaauggaagcgcugaggacuagucccuguucccagagcccacuuuuuuuucuuuuuuugaaauaaaauagccugucuuucagaucucaaaggcucuuuucagagccaccaaaaaaaaaaaaaaaaaaaaaaaaaaaaaaaaaaaaaaaaaaaaaaaaaaaaaaaaaaaaaaaaagaauu

SEQ ID NO: 31687 - RNA, 1714 nt, Artificial Sequence
  mRNA product Design a-1 (hSL-A64-N5) comprising derived and/or modified sequence from LASV(803213;Clade II)__AAF86703__GPCmut7 (opt5)
aggagagucccgcagucggcguccagcggcucugcuuguucgugugugugucguugcaggccuuauucaagcuuaccaugggccagaucauuaccuucuuucaagaggugccccacgucaucgaagagguuaugaacauugugcugaucgcccucagccugcuugcuauucugaaggggaucuacaauguggccacaugcggacucuucggccugaucuccuuucuucugcucugugggagaucuugcagcgucacguauaaaggaguguacgaacugcagacccuggagcucaacauggcgaaucugaacaugacaaugccucuuuccuguaccaagaauaacucucaucacuauauuaugguuggcaaugaaacagggcuggagcucacccugacaaacaccagcaucauuaaucauaaauucugcaaccuuuccgacgcucacaagaaaaaucuguacgaucaugcccucaugucuaucauuagcacguuucaccuguccaucccgaacuucaaucaguaugaggccaugagcugugacuuuaacggaggcaagauuucugugcaguacaaucugucccacagcuucgcugucgaugccgcuaaccauugcggcaccaucgccaacggggugcuccaaacauuuaugcggauggcguggggaggcucuuauaucgcccuggacuccgggaagggaaauugggauuguauuaugaccagcuaccaguaccuuaucauucagaacacaaccugggaagaccacugccaguucucucgccccuccccuaucggcuaucuggggcuccugagccaaagaacgcgggauauuuacaucucccgcagacuucugggaacauuuaccuggacacucucugacagcgagggcaaugaagcucccggcggguauugucugacccgguggaugcugaucgaggccgagcucaaaugcuucggaaacaccgcuguugccaaguguaaugaaaaacaugaugaggaauuuugcgacaugcugcgccuuuucgauuucaacaagcaggcgauuaaaagacugaagacgccugcccagauguccauccagcucauuaauaaggcugugaacgcccugaucaaugaccaacuuauuaugaaaaaccaucugcgggauaucaugggcauccccuacugcaauuauagccgcuacuguuaucucaaccacacagucaccgggaagacaucucugccuagaugcugucugguguccaauggaagcuaccucaacgagacccacuuuucugacgacauugaacagcaggcugauaauaugaucacagagaugcugcaaaaagaguacauggaccggcagggcaagaccccgcuugggcugguggaucucuucgucuuuagcacguccuucuaucugauuucuaucuuucugcaccuuguuaaaauucccacacaucgccacaucgugggaaagccuugccccaaaccucauagacucaaccacaugggcauuuguagcugcggccuguacaagcaccccggggugccggucaaguggaaacggugaggacuagucccuguucccagagcccacuuuuuuuucuuuuuuugaaauaaaauagccugucuuucagaucucaaaggcucuuuucagagccaccaaaaaaaaaaaaaaaaaaaaaaaaaaaaaaaaaaaaaaaaaaaaaaaaaaaaaaaaaaaaaaaaagaauu

SEQ ID NO: 31688 - RNA, 1714 nt, Artificial Sequence
  mRNA product Design a-1 (hSL-A64-N5) comprising derived and/or modified sequence from LASV(GA391;Clade III)__CAA36645__GPCmut7 (opt5)
aggagagucccgcagucggcguccagcggcucugcuuguucgugugugugucguugcaggccuuauucaagcuuaccaugggccagaucgugaccuucuuucaagaggucccccacguuauugaagaggugaugaacaucgugcugauugcccucagcauccuggcuauucuuaaggggcuguacaaugucgccacaugcggacucaucggccuggugacguuccuucugcucuccgggagaucuuguagccugaucuauaaaggaaccuacgaacugcagacacucgagcugaacauggaaacccuuaauaugacaaugccucuguccugcaccaagaacaauucucaucacuauauucggguuggcaacgagacagggcucgagcugacccuuacgaauaccagcauccugaaccauaaauuuuguaaucucuccgacgcgcacaagcgcaaccuguacgaucauucucugaugagcauuaucuccacauuccaccucagcauuccgaauuuuaaccaguaugaagcuaugucuugcgacuucaauggaggcaaaaucaccgugcaguacaaccugucccacagcuuugccgucgaugccgcuggccauugugggacacuugccaauggagugcugcaaaccuucaugagaauggcuuggggcgggucuuauauugcccucgacuccggacggggcaacugggauugcaucaugacgagcuaccaguaccugaucauucagaacacaaccugggacgaucacugucaguuuucucgccccuccccuaucggguaucuuggacugcucagccaaagaacacgggacauuuacaucucccgcagacugcugggcaccuucaccuggacacucucugauagcgagggcaaugaaacgcccgggggauauugccugacccgguggaugcuuauugaggcggagcugaaguguuuuggcaacacagccguugcuaagugcaaugaaaaacaugacgaggaguucugugauaugcuccgccuguuugacuucaacaagcaggccaucagacggcuuaaaaccccugcucagauguccauccagcugauuaauaaggccgugaacgcgcucaucaaugaucaacugauuaugaaaaaccaucugcgcgacaucauggggauucccuacugcaauuauagcagauacugcuaucucaaccacacaucuaccggaaagacgucccugccucgguguugccuuaucagcaauggcucuuaccugaacgaaacaaaguucagcgacgauaucgaacagcaggccgacaauaugauuaccgagaugcuccaaaaagaguacaucgaucgccaggggaagaccccgcugggacuggucgaccuuuuuguguucuccacaucuuuuuaucucauuagcaucuuccugcaccuggugaaaauucccacccacagacauaucgucggcaagccuugucccaaaccucaccggcucaaccauaugggcauuugcuccugugggcuguacaagcagcccggaguuccggugagauggaaacgcugaggacuagucccuguucccagagcccacuuuuuuuucuuuuuuugaaauaaaauagccugucuuucagaucucaaaggcucuuuucagagccaccaaaaaaaaaaaaaaaaaaaaaaaaaaaaaaaaaaaaaaaaaaaaaaaaaaaaaaaaaaaaaaaaagaauu

SEQ ID NO: 31689 - RNA, 1717 nt, Artificial Sequence
  mRNA product Design a-1 (hSL-A64-N5) comprising derived and/or modified sequence from LASV(AV;Clade V)__CCA30314__GPCmut7 (opt5)
aggagagucccgcagucggcguccagcggcucugcuuguucgugugugugucguugcaggccuuauucaagcuuaccaugggccagaucgugaccuucuuucaagaggucccccacguuauugaagaggugaugaacaucgugcugauugcccucagcauccuggcuguccuuaaggggcuguacaauauugccacaugcggacucaucggccugaucacguuccuucugcucugugggagauccugcucuagcaaccuguauaaaggaguguacgaacugcagucccucgaccugaauauggagacccuuaacaugacaaugccucugucuuguaccaagaauaacagccaucacuauauucggguuggcaaugauacagggcucgaacugacccuuacaaacaccuccauccugaaucauaaauuuugcaaccucucugacgcgcacaagaaagaucuguacgaccaugcucugaugagcauuaucuccacguuccaccucagcauuccgaauuuuaaccaguaugaggccaugucuugugauuucaauggaggcaagaucuccgugcaguacaaccugagccacucuuaugccauugacgcugccaaucauugcggcaccgucgcuaacgggauccuucaaacauuuaugcgcauggccuggggaggcuccuacaucgcgcuggauagcgggagaggaaacugggacuguauuaugaccucuuaccaguaucucaucauucagaauacaaccugggagaaccacugccaguucucccggcccagcccuaucggcuaccuggggcuucugucccaacgcacgagagauauuuauaucucucggcgccuccugggaacauuuaccuggacacugagcgacuccgaaggcaaugccacccccggcggguacugucucaccagauggaugcugaucgaggcugaacuuaagugcuucggaaacacagccguggcuaaauguaaugagaagcaugaugaggaauuuugcgacaugcugcgccucuucgauuuuaacaaacaggccauuagccggcugaagucuccugcgcagauguccauccagcuuauuaauaaagccguuaacgcucugaucaaugaccaacucauuaugaagaaccaccugagagacaucaugggcauccccuauugcaauuacagcaaguauuguuaccugaaccacacgauuaccgggaaaacaucucucccuaagugcugucuggugagcaauggauccuaccuuaacgagacccauuucucugaugacaucgaacagcaggccgauaauaugauuacagagaugcugcaaaaagaauauauggagcggcagggcaagaccccgcucgggcuggucgaccuguucguguuuagcacguccuucuaccuuaucagcauuuuucuccgccuggugaaaauccccacacacagacauauugucggaaagccuugccccaaaccucaccggcugaaccauaugggcaucuguucuugcggccucuauaagcagcccgggguuccggugcgcuggaagagaugaggacuagucccuguucccagagcccacuuuuuuuucuuuuuuugaaauaaaauagccugucuuucagaucucaaaggcucuuuucagagccaccaaaaaaaaaaaaaaaaaaaaaaaaaaaaaaaaaaaaaaaaaaaaaaaaaaaaaaaaaaaaaaaaagaauu

SEQ ID NO: 31690 - RNA, 1714 nt, Artificial Sequence
  mRNA product Design a-1 (hSL-A64-N5) comprising derived and/or modified sequence from LASV(Togo/2016/7082;Clade VI)__AMR44577__GPCmut7 (opt5)
aggagagucccgcagucggcguccagcggcucugcuuguucgugugugugucguugcaggccuuauucaagcuuaccaugggccagaucauuaccuucuuucaagaggugccccacgucaucgaagagguuaugaacauugugcugaucgcccucagccugcuugcuauucugaaggggguguacaaugucgccacaugcggaaucaucggccucgugacguuccuguuucuuugugggagauccugcucucugauuuauaaaggaagcuacgaacuccagacccuggagcugaacauggaaacacucaauaugaccaugccucuguccuguacaaagaacucuagccaucacuauauccggguuggcaaugagaccgggcuugagcugacacucaccaacacguccauuaucaaucauaaauucugcaaccugucugacgcgcacaagcgcaaucuuuacgaucaugcucugaugagcauucucuccaccuuucaccugagcaucccgaacuucaaucaguaugaagccaugucuugugacuuuaacggaggcaaaauuuccgugcaguacaaucugagccacgccuaugcugucgaugccgcugagcauugcggcacaguggccaacgggguucuccaaaccuucaugagaauggcguggggaggcucuuacaucgcccuggacuccgggcggggaaauugggauuguaucaugacaagcuaccaguaucuuauuauccagaacaccacgugggaagaccacugccaguuuucucgccccuccccuauuggcuaccuggggcuccugagccaaagaacacgggauaucuauauuucccgcagacuucugggaaccuucacauggacccucucugacagcgagggcaacgagacccccggcggguacugucugacacgguggaugcugaucgaagcugagcucaagugcuuuggaaauacggccguggcuaaguguaacgaaaaacaugaugaggaguucugcgacaugcugcgccuuuuugauuucaauaagcaggccauccagagacugaaauccccugcgcagaugagcauucaacucaucaacaaggccgucaaugcucugauuaacgaccagcuuaucaugaaaaaucaucugcgggauaugaugggcauucccuauugcaacuacucuaaguauuguuaccucaaucacaccuccagcgggcgcacaucucugccuaagugcugucuggugagcaacggauccuaccucaaugaaacccacuucucugacgacaucgagcagcaagccgauaacaugaucacagaaaugcugcagaaagaguauauugacagacagggcaagaccccgcuugggcugguggaucucuuugucuucagcacguccuuuuaccugaucagcauuuuccugcaccuuaucaaaauucccacacaucggcacaucguuggaaagccuugccccaaaccucaucgccucaaucacaugggcauuuguucuugcggccuguauaagcagcccggggugccgaccagauggaaacggugaggacuagucccuguucccagagcccacuuuuuuuucuuuuuuugaaauaaaauagccugucuuucagaucucaaaggcucuuuucagagccaccaaaaaaaaaaaaaaaaaaaaaaaaaaaaaaaaaaaaaaaaaaaaaaaaaaaaaaaaaaaaaaaaagaauu

SEQ ID NO: 31691 - RNA, 1714 nt, Artificial Sequence
  mRNA product Design a-1 (hSL-A64-N5) comprising derived and/or modified sequence from LASV(KAK-428;Clade n.d. (VII))__ANH09740__GPCmut7 (opt5)
aggagagucccgcagucggcguccagcggcucugcuuguucgugugugugucguugcaggccuuauucaagcuuaccaugggccagaucgugaccuucuuucaagaggucccccacguuauugaagaggugaugaacaucgugcugauugcccucagccugcuugcuauccugaaggggcucuacaauuucgccacaugcggagucauuggccugaucacguuucuucugcucugugggagauccugcucugcgaccuauaaaggacaguacgaacugcagacacuggagcucaacauggaaagccugaauaugaccaugccucuuuccuguacaaagaacaauucucaucacuauauccgggcuggcaacaauaccgggcuggagcucacacugaccaacacgagcauuaucucccauaaauucugcaaucuuucugacgcccacaagaaaaaccuguacgaucauacccucaugagcauuaucacaaccuuucaccuguccauuccgaauuucaaccaguaugaggccaugagcugugacuuuaauggaggcaagaucucuauucaauacaaccugucccacagcuaugcuggcgaugccgcucagcauugcgggacaguggccaauggaguucuccagaccuucaugcgcauggcguggggcgggucuuaccuggcccuugacuccggaagacggggcugggauuguaucaucagcucuuaccaguaucugauuauccaaaacacgacaugggacgaucacugccaguuuucccgccccagcccuauuggguaccucggauucgugucccagaagaccagagacaucuauauuucucggcgccugcuuggcacauuuaccuggacccugagcgauuccgaaggccaugacaugcccgggggauacugucucacaagauggaugcugaucgaggcugaucugaaaugcuucggcaacacggccgucgcuaaguguaaugaaaaacacgacgaggaguuuugcgauauguggcgccucuucgacuucaacaagcaggccauccaacggcugaaagcgccugcccagaugaauauucagcuuaucaacaaggcugugaaugcccugauuaacgaccaacucaugaugaagaaucaccugagagauaucauggggauucccuauugcaacuacagcaaauuuuguuaucuuaauaacaccacaaccggacggacaucucugccucgcugcugucucaucuccaauggcagcuaccugaacgaaacccauuucucugacgauaucgagcagcaggcugacaauaugauuacggaaaugcugcagaaggaguacauggauagacaagggaaaacaccgcucggacugguugaccuuuuuguguucagcaccuccuuuuaucugaucaccauuuuccuccaccuggucaagauccccacacaucggcacauugugggcaaaccuugccccaagccucaucgccugaaccacaugggcaucuguucuugcgggcuuuacaaacagcccggagugccggucagauggaagcggugaggacuagucccuguucccagagcccacuuuuuuuucuuuuuuugaaauaaaauagccugucuuucagaucucaaaggcucuuuucagagccaccaaaaaaaaaaaaaaaaaaaaaaaaaaaaaaaaaaaaaaaaaaaaaaaaaaaaaaaaaaaaaaaaagaauu

SEQ ID NO: 31692 - RNA, 1714 nt, Artificial Sequence; identical to SEQ ID NO: 31686
  mRNA product Design a-1 (hSL-A64-N5) comprising derived and/or modified sequence from LASV(Pinneo-NIG-1969;Clade I)__AIT17836__GPCmut7 (opt5)

SEQ ID NO: 31693 - RNA, 1714 nt, Artificial Sequence
  mRNA product Design a-1 (hSL-A64-N5) comprising derived and/or modified sequence from LASV(ISTH0009-NIG-2011;Clade II)__AIT17404__GPCmut7 (opt5)
aggagagucccgcagucggcguccagcggcucugcuuguucgugugugugucguugcaggccuuauucaagcuuaccaugggccagaucauuaccuucuuucaagaggugccccacgucaucgaagagguuaugaacauugugcugaucgcccucagccugcuugcuauucugaaggggaucuacaauguggccacaugcggacucuucggccuggucuccuuucuucugcucugugggagaucuugcagcacgaccuauaaaggaguguacgaacugcagacacuggagcucgacauggcgucccugaacaugaccaugccucuuucuuguacaaagaauaacagccaucacuauaucaugguuggcaaugaaaccgggcuggagcucacacugaccaacacguccauuaucaaucauaaauucugcaaccuuucugaugcucacaagaaaaaucuguacgaccaugcccucaugagcauuaucuccaccuuucaccugagcauuccgaacuucaaucaguaugaggccaugucuugugauuuuaacggaggcaagaucuccgugcaguacaaucugagccacgcuuaugccgucgacgcugccaaccauugcggcacaauugcgaauggggugcuccaaaccuucaugcggauggccuggggaggcucuuacaucgcucuggauuccgggaagggaagcugggacuguaucaugacaucuuaccaguaucuuauuauccagaacaccacgugggaagaucacugccaguuuucccgccccagcccuauuggcuaccuggggcuccugucccaaagaacacgggacaucuauauuucucgcagacuucugggaaccuucacauggacccucagcgauuccgagggcaacgaaacccccggcggguacugucugacacgguggaugcugaucgaggccgagcucaaaugcuuuggaaauacggcuguugccaaguguaacgaaaaacaugacgaggaguucugcgauaugcugcgccuuuuugacuucaauaagcaggcgaucagacggcugaaaaccccugcccagaugagcauucagcucaucaacaaggcugugaaugcccugauuaacgaucaacuuaucaugaagaaucaucugcgcgacauuaugggcauccccuauugcaacuacucuaaauauuguuaccucaaucacacagucaccgggaagacaucccugccuagaugcugucuggugagcaacggaucuuaccucaaugaaacccacuucagcgacgauaucgaacagcaggcugacaacaugauuacggagcugcuucaaaaagaguauauggaucggcagggcaagacaccgcuggggcucguggaccuguuugucuucuccaccucuuuuuaccugaucagcauuuuccuucaccucaucaaaauucccacccaucgccacaucacaggaaagccuugccccaaaccucauagacugaaucacaugggcauuuguuccugcggccuguauaagcaccccgggguuccggugaaguggaaacggugaggacuagucccuguucccagagcccacuuuuuuuucuuuuuuugaaauaaaauagccugucuuucagaucucaaaggcucuuuucagagccaccaaaaaaaaaaaaaaaaaaaaaaaaaaaaaaaaaaaaaaaaaaaaaaaaaaaaaaaaaaaaaaaaagaauu

SEQ ID NO: 31694 - RNA, 1714 nt, Artificial Sequence
  mRNA product Design a-1 (hSL-A64-N5) comprising derived and/or modified sequence from LASV(ISTH2010-NIG-2012;Clade II)__AIT17482__GPCmut7 (opt5)
aggagagucccgcagucggcguccagcggcucugcuuguucgugugugugucguugcaggccuuauucaagcuuaccaugggccagaucauuaccuucuuucaagaggugccccacgucaucgaagagguuaugaacauugugcugaucgcccucagccugcuugcuauucugaaggggaucuacaauguggccacaugcggacucuucggccuggucuccuuucuucugcucugugggagaucuugcagcacgaccuauaaaggaguguacgaacugcagacacuggagcucgacauggcgucccugaacaugaccaugccucuuucuuguacaaagaauaacagccaucacuauaucaugguuggcaaugaaaccgggcuggagcucacacugaccaacacguccauuaucaaucauaaauucugcaaccuuucugaugcucacaagaaaaaucuguacgaccaugcccucaugagcauuaucuccaccuuucaccugagcauuccgaacuucaaucaguaugaggccaugucuugugauuuuaacggaggcaagaucuccgugcaguacaaucugagccacgcuuaugccgucgacgcugccaaccauugcggcacaauugcgaauggggugcuccaaaccuucaugcggauggccuggggaggcucuuacaucgcucuggauuccgggaagggaagcugggacuguaucaugacaucuuaccaguaucuuauuauccagaacauuaccugggaagaucacugccaguuuucccgccccagcccuaucggcuaccuggggcuccugucccaaagaacgcgggacauuuauaucucucgcagacuucugggaacauucaccuggacacucagcgauuccgagggcaacgaaacccccggcggguacugucugacccgguggaugcugaucgaggccgagcucaaaugcuuuggaaauacagcuguugccaaguguaacgaaaaacaugacgaggaguucugcgauaugcugcgccuuuuugacuucaauaagcaggcgauuagacggcugaaaacgccugcccagaugagcauccagcucauuaacaaggcugugaaugcccugaucaacgaucaacuuauuaugaagaaucaucugcgcgacaucaugggcauccccuauugcaacuacucuaaauauuguuaccucaaucacaccgucacagggaagaccucccugccuagaugcugucuggugagcaacggaucuuaccucaaugaaacacacuucagcgacgauauugaacagcaggcugacaacaugaucaccgagcugcuucaaaaagaguauauugaucggcagggcaagacgccgcuggggcucguggaccuguuugucuucuccacaucuuuuuaccugaucagcauuuuccuucaccucguuaaaauccccacccaucgccacguggugggaaagccuugccccaaaccucauagacugaaucacaugggcauuuguuccugcggccuguauaagcaccccggggucccggugaaguggaaacggugaggacuagucccuguucccagagcccacuuuuuuuucuuuuuuugaaauaaaauagccugucuuucagaucucaaaggcucuuuucagagccaccaaaaaaaaaaaaaaaaaaaaaaaaaaaaaaaaaaaaaaaaaaaaaaaaaaaaaaaaaaaaaaaaagaauu

SEQ ID NO: 31695 - RNA, 1714 nt, Artificial Sequence
  mRNA product Design a-1 (hSL-A64-N5) comprising derived and/or modified sequence from LASV(Lassa virus/H.sapiens-wt/NGA/2015/ISTH_0543;Clade II)__AVO03639__GPCmut7 (opt5)
aggagagucccgcagucggcguccagcggcucugcuuguucgugugugugucguugcaggccuuauucaagcuuaccaugggccagaucauuaccuucuuucaagaggugccccacgucaucgaagagguuaugaacauugugcugaucgcccucagccugcuugcuauucugaaggggaucuacaauguggccacaugcggacucuucggccuggucuccuuucuucugcucugugggagaucuugcagcacgaccuauaaaggaguguacgaacugcagacacuggagcucgacauggcgaaccugaauaugaccaugccucuuuccuguacaaagaacaauucucaucacuauaucaugguuggcaacgaaaccgggcuggagcucacacugaccaauacgagcauuaucaaccauaaauucugcaaucuuuccgaugcucacaagaaaaaccuguacgaccaugcccucaugucuauuaucagcaccuuucaccuguccauuccgaauuucaaccaguaugaggccaugagcugugauuuuaauggaggcaagaucucugugcaguacaaccugucccacacauaugcugucgacgccgcuaaucauugcggcaccauugccaacggggugcuccaaacauucaugcggauggcguggggaggcagcuacaucgcccuggauucugggaagggauccugggacuguaucaugaccagcuaccaguaucuuguuauucagaacacgacaugggaagaucacugccaguuuucucgccccuccccuaucggcuaccuggggcuccugagccaaagaacccgggacauuuauaucucccgcagacuucugggaacauucaccuggacccucucugauagcgagggcaaugaaacacccggcggguacugucugacgcgguggaugcugauugaggcugagcucaaaugcuuuggaaacaccgccguggcuaaguguaaugaaaaacaugacgaggaguucugcgauaugcugcgccuuuuugacuucaacaagcaggccaucagacggcugaaaaccccugcgcagauguccauccagcucauuaauaaggccgucaacgcucugaucaaugaucaacuuauuaugaagaaccaucugcgcgacaucaugggcauucccuauugcaauuacagcaaauauuguuaccucaaccacacagugacagggaagaccucucugccuagaugcugucugguguccaauggaagcuaccucaacgaaacgcacuucucugacgauaucgaacagcaggccgacaauaugaucacagagcugcuucaaaaagaguauauugaucggcagggcaagaccccgcuggggcucgucgaccuguuuguuuucagcaccuccuuuuaccugaucucuauuuuccuucaccucgugaaaauccccacacaucgccacauuaccggaaagccuugccccaaaccucauagacugaaccacaugggcaucuguagcugcggccuguauaagcaccccggggugccggucaaguggaaacggugaggacuagucccuguucccagagcccacuuuuuuuucuuuuuuugaaauaaaauagccugucuuucagaucucaaaggcucuuuucagagccaccaaaaaaaaaaaaaaaaaaaaaaaaaaaaaaaaaaaaaaaaaaaaaaaaaaaaaaaaaaaaaaaaagaauu

SEQ ID NO: 31696 - RNA, 1714 nt, Artificial Sequence
  mRNA product Design a-1 (hSL-A64-N5) comprising derived and/or modified sequence from LASV(Lassa virus/H.sapiens-wt/NGA/2016/ISTH_0009;Clade II)__AVO03571__GPCmut7 (opt5)
aggagagucccgcagucggcguccagcggcucugcuuguucgugugugugucguugcaggccuuauucaagcuuaccaugggccagaucauuaccuucuuucaagaggugccccacgucaucgaagagguuaugaacauugugcugaucgcccucagccugcuugcuauucugaaggggaucuacaauguggccacaugcggacuccugggccuugucuccuuccugcuccugugugggagaucuugcagcacgaccuauaaaggaguguacgaacugcagacacucgagcuggacauggcgucccuuaacaugaccaugccucugucuuguacaaagaauaacagccaucacuauaucaugguuggcaaugaaaccgggcucgagcugacacuuaccaacacguccauuaucaaucauaaauuuugcaaccugucugaugcucacaagaaaaaucucuacgaccaugcccugaugagcauuaucuccaccuuccaccugagcauuccgaacuuuaaucaguaugaggccaugucuugugauuucaacggaggccggaucuccgugcaguacaaucucagccacucuuaugcugucgacgccgcuaaccauugcggcacaauugccaauggggugcugcaaaccuuuaugcgcauggcguggggaggcuccuacaucgcccuugauagcgggaagggaucuugggacuguaucaugacauccuaccaguaucugauuauccagaacaccacgugggaagaucacugccaguucagcagacccuccccuauuggcuaccucgggcugcuuucucaacggacacgcgacaucuauauuagcagacggcugcucggaaccuuuacauggacccuguccgauagcgagggcaacgaaacccccggcggguacugucugacacgcuggaugcucaucgaggcugagcugaagugcuucggaaauacggccguugcuaaauguaacgaaaagcaugacgaggaauuuugcgauaugcuuagacuguucgacuuuaauaaacaggccauccggcgccucaagaccccugcgcagaugucuauucagcugaucaacaaagccgugaaugcucuuauuaacgaucaacugaucaugaagaaucaccucagagacauuaugggcauccccuauugcaacuacuccaaguauuguuaccugaaucacacagucaccgggaaaacaagccugccucggugcugucucgugucuaacggaagcuaccugaaugagacccauuucuccgacgauaucgaacagcaggccgacaacaugauuacggagcuucugcaaaaggaguauaucgaucgccagggcaaaacaccgcucgggcugguggaccuguucgucuuuucuaccagcuucuaccuuauuuccaucuuucuccaccugguuaagauucccacccauagacacaucacaggaaaaccuugccccaagccucaucggcugaaucacaugggcauuuguagcugcggccucuauaaccaccccggggugccggugaaauggaagcgcugaggacuagucccuguucccagagcccacuuuuuuuucuuuuuuugaaauaaaauagccugucuuucagaucucaaaggcucuuuucagagccaccaaaaaaaaaaaaaaaaaaaaaaaaaaaaaaaaaaaaaaaaaaaaaaaaaaaaaaaaaaaaaaaaagaauu

SEQ ID NO: 31697 - RNA, 1714 nt, Artificial Sequence
  mRNA product Design a-1 (hSL-A64-N5) comprising derived and/or modified sequence from LASV(Lassa virus/H.sapiens-wt/NGA/2016/ISTH_0017;Clade II)__AVO03567__GPCmut7 (opt5)
aggagagucccgcagucggcguccagcggcucugcuuguucgugugugugucguugcaggccuuauucaagcuuaccaugggccagaucauuaccuucuuucaagaggugccccacgucaucgaagagguuaugaacauugugcugaucgcccucagccugcuugcuauucugaaggggaucuacaauguggccacaugcggacucuucggccuggucuccuuucuucugcucugugggagaucuugcagcacgaccuauaaaggaguguacgaacugcagacacuggagcucgacauggcgucccugaacaugaccaugccucuuucuuguacaaagaauaacagccaucacuauaucaugguuggcaaugaaaccgggcuggagcucacacugaccaacacguccauuaucaaucauaaauucugcaaccuuucugaugcucacaagaaaaaucuguacgaccaugcccucaugagcauuaucuccaccuuucaccugagcauuccgaacuucaaucaguaugaggccaugucuugugauuuuaacggaggcaagaucuccgugcaguacaaucugagccacacauaugcuauugacgccgcuaaccauugcggcaccaucgccaaugggguccuccaaacauucaugcggauggcguggggaggcucuuacaucgcccuggauuccgggaagggaagcugggacuguauuaugaccucuuaccaguaucuuaucauucagaacacgacaugggaagaucacugccaguuuucccgccccagcccuaucggcuaccuggggcuccugucccaaagaacccgggacauuuauaucucucgcagacuucugggaacauucaccuggacccucagcgauuccgagggcaacgaaacacccggcggguacugucugacgcgguggaugcugaucgaggcugagcucaaaugcuuuggaaauaccgccguggcuaaguguaacgaaaaacaugacgaggaguucugcgauaugcugcgccuuuuugacuucaauaagcaggccauuagacggcugaaaaccccugcgcagaugagcauccagcucauuaacaaggccguuaaugcucugaucaacgaucaacuuauuaugaagaaucaucugcgcgacaucaugggcauccccuauugcaacuacucuaaauauuguuaccucaaucacacagugacagggaagaccucccugccuagaugcugucuggucagcaacggaucuuaccucaaugaaacgcacuucagcgacgauauugaacagcaggccgacaacaugaucacagagcugcuucaaaaagaguauauggaucggcagggcaagaccccgcuggggcucguggaccuguuuguguucuccaccucuuuuuaccugauuagcaucuuccuucaccucguccgcauucccacacauagacacguuaucggaaaaccuugccccaagccucaucggcugaaucacaugggcauuuguuccugcggccuguauaaacaccccggggugccggugaaguggaagcgcugaggacuagucccuguucccagagcccacuuuuuuuucuuuuuuugaaauaaaauagccugucuuucagaucucaaaggcucuuuucagagccaccaaaaaaaaaaaaaaaaaaaaaaaaaaaaaaaaaaaaaaaaaaaaaaaaaaaaaaaaaaaaaaaaagaauu

SEQ ID NO: 31698 - RNA, 1714 nt, Artificial Sequence
  mRNA product Design a-1 (hSL-A64-N5) comprising derived and/or modified sequence from LASV(Lassa virus/H.sapiens-wt/NGA/2018/ISTH_0959;Clade II)__AVV65099__GPCmut7 (opt5)
aggagagucccgcagucggcguccagcggcucugcuuguucgugugugugucguugcaggccuuauucaagcuuaccaugggccagaucauuaccuucuuucaagaggugccccacgucaucgaagagguuaugaacauugugcugaucgcccucagccugcuugcuauucugaaggggaucuacaauguggucacaugcggacucuucggccugguguccuuucuucugcucugugggagaucuugcagcacgaccuauaaaggaguuuacgaacugcagacacuggagcucgacauggccucccugaacaugaccaugccucuuucuuguacaaagaauaacagccaucacuauaucauggugggcaaugaaaccgggcuggagcucacacugaccaacacguccauuaucaaucauaaauucugcaaccuuucugaugcgcacaagaaaaaucuguacgaccaugcucucaugagcauuaucuccaccuuucaccugagcauuccgaacuucaaucaguaugaggccaugucuugugauuuuaacggaggcaagaucuccguccaguacaaucugagccacgccuaugcuauugacgccgcuaaccauugcggcacaaucgccaauggggugcuccaaaccuucaugcggauggcguggggaggcucuuacaucgcccuggauuccgggaagggaagcugggacuguauuaugacaucuuaccaguaucuuaucauucagaacaccacgugggaagaucacugccaguuuucccgccccagcccuaucggcuaccuggggcuccugucccaaagaacacgggacauuuauaucucucgcagacuucugggaaccuucacauggacccucagcgauuccgagggcaacgaaacccccggcggguacugucugacacgguggaugcugaucgaggcugagcucaaaugcuuuggaaauacggccguugcuaaguguaacgaaaaacaugacgaggaguucugcgauaugcugcgccuuuuugacuucaauaagcaggccauuagacggcugaaaaccccugcgcagaugagcauccagcucauuaacaaggccgugaaugcucugaucaacgaucaacuuauuaugaagaaucaucugcgcgacaucaugggcauccccuauugcaacuacucuaaauauuguuaccucaaucacacagucaccgggaagacaucccugccuagaugcugucuggugagcaacggaucuuaccucaaugaaacccacuucagcgacgauauugaacagcaggccgacaacaugaucacggagcugcuucaaaaagaguauauugaucggcagggcaagacaccgcuggggcucguggaccuguuugucuucuccaccucuuuuuaccugaucagcauuuuccuucaccucguuaaaauccccacccaucgccacgugauuggaaagccuugccccaaaccucauagacugaaucacaugggcaucuguuccugcggccuguauaagcaccccggggugccggucaaguggaaacggugaggacuagucccuguucccagagcccacuuuuuuuucuuuuuuugaaauaaaauagccugucuuucagaucucaaaggcucuuuucagagccaccaaaaaaaaaaaaaaaaaaaaaaaaaaaaaaaaaaaaaaaaaaaaaaaaaaaaaaaaaaaaaaaaagaauu

SEQ ID NO: 31699 - RNA, 1714 nt, Artificial Sequence
  mRNA product Design a-1 (hSL-A64-N5) comprising derived and/or modified sequence from LASV(LASV003-NIG-2008;Clade II)__AIT17580__GPCmut7 (opt5)
aggagagucccgcagucggcguccagcggcucugcuuguucgugugugugucguugcaggccuuauucaagcuuaccaugggccagaucauuaccuucuuucaagaggugccccacgucaucgaagagguuaugaacauugugcugaucgcccucagccugcuugcuauucugaaggggaucuacaauguggccacaugcggacucuucggccuggucuccuuucuucugcucugugggagaucuugcagcacgaccuauaaaggaguguacgaacugcagacacuggagcucgacauggcgucccugaacaugaccaugccucuuucuuguacaaagaauaacagccaucacuauaucaugguuggcaaugaaaccgggcuggagcucacacugaccaacacguccauuaucaaucauaaauucugcaaccuuucugaugcucacaagaaaaaucuguacgaccaugcccucaugagcauuaucuccaccuuucaccugagcauuccgaacuucaaucaguaugaggccaugucuugugauuuuaacggaggcaagaucuccgugcaguacaaucugagccacacauaugcugucgacgccgcuaaccauugcggcaccauugccaauggggugcuccaaacauucaugcggauggcguggggaggcucuuacaucgcccuggauuccgggaagggaagcugggacuguaucaugaccucuuaccaguaucuuauuauccagaacacgacaugggaagaucacugccaguuuucccgccccagcccuauuggcuaccuggggcuccugucccaaagaacccgggacaucuauauuucucgcagacuucugggaacauucaccuggacccucagcgauuccgagagcaacgaaacacccggcggcuacugucugacgcgguggaugcugaucgaggcugagcucaaaugcuuugggaauaccgccguugcuaaguguaacgaaaaacaugacgaggaguucugcgauaugcugcgccuuuuugacuucaauaagcaggccaucagacggcugaaagcgccugcccagaugucuauucagcucaucaacaaggcugugaaugcccugauuaacgaucaacuuaucaugaagaaucaucugcgcgacauuaugggaauccccuauugcaacuacuccaaauauuguuaccucaaucacacagucaccggcagaacaagccugccucggugcugucuggugucuaacgggagcuaccucaaugaaacccacuucuccgacgauaucgaacagcaggcugacaacaugauuacggagcugcuucaaaaggaguauauggaucgccagggaaaaacaccgcugggccucguggaccuguuugucuucucuaccagcuuuuaccugaucuccauuuuccuucaccucguuaagauccccacccauagacacgugauugggaaaccuugccccaagccucaucggcugaaucacaugggaaucuguagcugcggccuguauaaacaccccggcgugccggucaaguggaagcgcugaggacuagucccuguucccagagcccacuuuuuuuucuuuuuuugaaauaaaauagccugucuuucagaucucaaaggcucuuuucagagccaccaaaaaaaaaaaaaaaaaaaaaaaaaaaaaaaaaaaaaaaaaaaaaaaaaaaaaaaaaaaaaaaaagaauu

SEQ ID NO: 31700 - RNA, 1714 nt, Artificial Sequence
  mRNA product Design a-1 (hSL-A64-N5) comprising derived and/or modified sequence from LASV(LASV035-NIG-2009;Clade II)__AIT17588__GPCmut7 (opt5)
aggagagucccgcagucggcguccagcggcucugcuuguucgugugugugucguugcaggccuuauucaagcuuaccaugggccagaucauuaccuucuuucaagaggugccccacgucaucgaagagguuaugaacauugugcugaucgcccucagccugcuugcuauucugaaggggaucuacaauguggccacaugcggacucuucggccuggucuccuuucuucugcucugugggagaucuugcagcacgaccuauaaaggaguguacgaacugcagacacuggagcucgacauggcgucccugaacaugaccaugccucuuucuuguacaaagaauaacagccaucacuauaucaugguuggcaaugaaaccgggcuggagcucacacugaccaacacguccauuaucaaucauaaauucugcaaccuuucugaugcucacaagaaaaaucuguacgaccaugcccucaugagcauuaucuccaccuuucaccugagcauuccgaacuucaaucaguaugaggccaugucuugugauuuuaacggaggcaagaucuccgugcaguacaaucugagccacgcuuaugccgucgacgcugccaaccauugcggcacaauugcgaauggggugcuccaaaccuucaugcggauggccuggggaggcucuuacaucgcucuggauuccgggaagggaagcugggacuguaucaugacaucuuaccaguaucuuauuauccagaacaccacgugggaagaucacugccaguuuucccgccccagcccuauuggcuaccuggggcuccugucccaaagaacacgggacaucuauauuucucgcagacuucugggaaccuucacauggacccucagcgauuccgagggcaacgaaacccccggcggguacugucugacacgguggaugcugaucgaggccgagcucaaaugcuuuggaaauacggcuguugccaaguguaacgaaaaacaugacgaggaguucugcgauaugcugcgccuuuuugacuucaauaagcaggcgaucagacggcugaaagccccugcucagaugagcauucagcucaucaacaaggccgugaaugcucugauuaacgaucaacuuaucaugaagaaucaucugcgcgacauuaugggcauccccuauugcaacuacucuaaauauuguuaccucaaucacaccgucacagggaagaccucccugccuagaugcugucuggugagcaacggaucuuaccucaaugaaacacacuucagcgacgauaucgaacagcaggccgacaacaugauuaccgagcugcuucaaaaagaguauaucgaucggcagggcaagacgccgcuggggcucguggaccuguuugucuucuccacaucuuuuuaccugauuagcaucuuccuucaccucguuaaaauucccacccaucgccacgugaucggaaagccuugccccaaaccucauagacugaaucacaugggcauuuguuccugcggccuguauaagcaccccggggugccggucaaguggaaacggugaggacuagucccuguucccagagcccacuuuuuuuucuuuuuuugaaauaaaauagccugucuuucagaucucaaaggcucuuuucagagccaccaaaaaaaaaaaaaaaaaaaaaaaaaaaaaaaaaaaaaaaaaaaaaaaaaaaaaaaaaaaaaaaaagaauu

SEQ ID NO: 31701 - RNA, 1714 nt, Artificial Sequence
  mRNA product Design a-1 (hSL-A64-N5) comprising derived and/or modified sequence from LASV(LASV1000-NIG-2009;Clade II)__AIT17782__GPCmut7 (opt5)
aggagagucccgcagucggcguccagcggcucugcuuguucgugugugugucguugcaggccuuauucaagcuuaccaugggccagaucauuaccuucuuucaagaggugccccacgucaucgaagagguuaugaacauugugcugaucgcccucagccugcuugcuauucugaaggggaucuacaauguggccacaugcggacucuucggccuggucuccuuucuucugcucugugggagaucuugcagcacgaccuauaaaggaguguacgaacugcagacacuggagcucgacauggcgucccugaacaugaccaugccucuuucuuguacaaagaauaacagccaucacuauaucaugguuggcaaugaaaccgggcuggagcucacacugaccaacacguccauuaucaaucauaaauucugcaaccuuucugaugcucacaagaaaaaucuguacgaccaugcccucaugagcauuaucuccaccuuucaccugagcauuccgaacuucaaucaguaugaggccaugucuugugauuuuaacggaggcaagaucuccgugcaguacaaucugagccacacauaugcugucgacgccgcuaaccauugcggcaccauugccaauggggugcuccaaacauucaugcggauggcguggggaggcucuuacaucgcccuggauuccgggaagggaagcugggacuguaucaugaccucuuaccaguaucuuauuauccagaacacgacaugggaagaucacugccaguuuucccgccccagcccuauuggcuaccuggggcuccugucccaaagaacccgggacaucuauauuucucgcagacuucugggaacauucaccuggacccucagcgauuccgagggcaacgaaacacccggcggguacugucugacgcgguggaugcugaucgaggcugagcucaaaugcuuuggaaauaccgccguugcuaaguguaacgaaaaacaugacgaggaguucugcgauaugcugcgccuuuuugacuucaauaagcaggccaucaaaagacugaagaccccugcgcagaugagcauucagcucaucaacaaggccgugaaugcucugauuaacgaucaacuuaucaugaaaaaucaucugcgggacauuaugggcauccccuauugcaacuacucuaaguauuguuaccucaaucacacagucacagggaaaaccucccugccucgcugcugucuggugagcaacggaucuuaccucaaugaaacgcacuucagcgacgauaucgaacagcaggccgacaacaugauuacagagcugcuucaaaaggaguauaucgauagacagggcaaaaccccgcuggggcucguggaccuguuugucuucuccaccucuuuuuaccugauuagcaucuuccuucaccucguuaagauucccacacaucggcacguggugggaaaaccuugccccaagccucaucgccugaaucacaugggcaucuguuccugcggccuguauaagcaccccggggucccggugaaauggaagagaugaggacuagucccuguucccagagcccacuuuuuuuucuuuuuuugaaauaaaauagccugucuuucagaucucaaaggcucuuuucagagccaccaaaaaaaaaaaaaaaaaaaaaaaaaaaaaaaaaaaaaaaaaaaaaaaaaaaaaaaaaaaaaaaaagaauu

SEQ ID NO: 31702 - RNA, 1714 nt, Artificial Sequence
  mRNA product Design a-1 (hSL-A64-N5) comprising derived and/or modified sequence from LASV(LASV221-NIG-2010;Clade II)__AIT17624__GPCmut7 (opt5)
aggagagucccgcagucggcguccagcggcucugcuuguucgugugugugucguugcaggccuuauucaagcuuaccaugggccagaucauuaccuucuuucaagaggugccccacgucaucgaagagguuaugaacauugugcugaucgcccucagccugcuugcuauucugaaggggaucuacaauguggccacaugcggacucuucggccuggucuccuuucuucugcucugugggagaucuugcagcacgaccuauaaaggaguguacgaacugcagacacuggagcucgacauggcgucccugaacaugaccaugccucuuucuuguacaaagaauaacagccaucacuauaucaugguuggcaaugaaaccgggcuggagcucacacugaccaacacguccauuaucaaucauaaauucugcaaccuuucugaugcucacaagaaaaaucuguacgaccaugcccucaugagcauuaucuccaccuuucaccugagcauuccgaacuucaaucaguaugaggccaugucuugugauuuuaacggaggcaagaucuccgugcaguacaaucugagccacacauaugcuauugacgccgcuaaccauugcggcaccaucgccaaugggguccuccaaacauucaugcggauggcguggggaggcucuuacaucgcccuggauuccgggaagggaagcugggacuguauuaugaccucuuaccaguaucuuaucauucagaacacgacaugggaagaucacugccaguuuucccgccccagcccuaucggcuaccuggggcuccugucccaaagaacccgggacauuuauaucucucgcagacuucugggaacauucaccuggacccucagcgauuccgagggcaacgaaacacccggcggguacugucugacgcgguggaugcugaucgaggcugagcucaaaugcuuuggaaauaccgccguggcuaaguguaacgaaaaacaugacgaggaguucugcgauaugcugcgccuuuuugacuucaauaagcaggccauuagacggcugaaaaccccugcgcagaugagcauccagcucauuaacaaggccguuaaugcucugaucaacgaucaacuuauuaugaagaaucaucugcgcgacaucaugggcauccccuauugcaacuacucuaaauauuguuaccucaaucacacagugacagggaagaccucccugccuagaugcugucuggucagcaacggaucuuaccucaaugaaacgcacuucagcgacgauauugaacagcaggccgacaacaugaucacagagaugcugcaaaaagaguauauggaucggcagggcaagaccccgcuugggcugguggaccucuuuguguucuccaccucuuuuuaccugauuagcaucuuccugcaccuugucaaaauucccacacaucgccacguuaucggaaagccuugccccaaaccucauagacucaaucacaugggcauuuguuccugcggccuguauaagcaccccggggugccggugaaguggaaacggugaggacuagucccuguucccagagcccacuuuuuuuucuuuuuuugaaauaaaauagccugucuuucagaucucaaaggcucuuuucagagccaccaaaaaaaaaaaaaaaaaaaaaaaaaaaaaaaaaaaaaaaaaaaaaaaaaaaaaaaaaaaaaaaaagaauu

SEQ ID NO: 31703 - RNA, 1714 nt, Artificial Sequence
  mRNA product Design a-1 (hSL-A64-N5) comprising derived and/or modified sequence from LASV(LASV237-NIG-2010;Clade II)__AIT17638__GPCmut7 (opt5)
aggagagucccgcagucggcguccagcggcucugcuuguucgugugugugucguugcaggccuuauucaagcuuaccaugggccagaucauuaccuucuuucaagaggugccccacgucaucgaagagguuaugaacauugugcugaucgcccucagccugcuugcuauucugaaggggaucuacaauguggccacaugcggacucuucggccuggucuccuuucuucugcucugugggagaucuugcagcacgaccuauaaaggaguguacgaacugcagacacuggagcucgacauggcgucccugaacaugaccaugccucuuucuuguacaaagaauaacagccaucacuauaucaugguuggcaaugaaaccgggcuggagcucacacugaccaacacguccauuaucaaucauaaauucugcaaccuuucugaugcucacaagaaagaccuguacgaucaugcccucaugagcauuaucuccaccuuucaccugagcauuccgaauuucaaccaguaugaggccaugucuugugacuuuaauggaggcaagaucuccgugcaguacaaccugagccacacauaugcugucgaugccgcuaaucauugcggcaccauugccaacggggugcuccaaacauucaugcggauggcguggggaggcucuuacaucgcccuggacuccgggaagggaagcugggauuguaucaugaccucuuaccaguaucuuauuauccagaauacgacaugggaagaccacugccaguuuucccgccccagcccuauuggcuaccuggggcuccugucccaaagaacccgggauaucuauauuucucgcagacuucugggaacauucaccuggacccucagcgacuccgagggcaacgaaacacccggcggguacugucugacgcgguggaugcugaucgaggcugagcucaaaugcuuuggaaacaccgccguugcuaaguguaaugaaaaacaugaugaggaguucugcgacaugcugcgccuuuuugauuucaacaagcaggccaucagacggcugaaaaccccugcgcagaugagcauucagcucaucaauaaggccgugaacgcucugauuaaugaccaacuuaucaugaagaaccaucugcgcgacauuaugggcauccccuauugcaauuacucuaaauauuguuaccucaaccacacagucacagggaagaccucccugccuagaugcugucuggugagcaauggaucuuaccucaacgaaacgcacuucagcgaugacaucgaacagcaggccgauaauaugauuacagagcugcuucaaaaagaguauauggaccggcagggcaagaccccgcuggggcucguggaucuguuugucuucuccaccucuuuuuaccugaucagcauuuuccuucaccucaucaaaauucccacacaucgccacaucaccggaaagccuugccccaaaccucauagacugaaccacaugggcauuuguuccugcggccuguauaagcaccccgggguuccggugaaguggaaacggugaggacuagucccuguucccagagcccacuuuuuuuucuuuuuuugaaauaaaauagccugucuuucagaucucaaaggcucuuuucagagccaccaaaaaaaaaaaaaaaaaaaaaaaaaaaaaaaaaaaaaaaaaaaaaaaaaaaaaaaaaaaaaaaaagaauu

SEQ ID NO: 31704 - RNA, 1714 nt, Artificial Sequence
  mRNA product Design a-1 (hSL-A64-N5) comprising derived and/or modified sequence from LASV(LASV253-NIG-2011;Clade II)__AIT17670__GPCmut7 (opt5)
aggagagucccgcagucggcguccagcggcucugcuuguucgugugugugucguugcaggccuuauucaagcuuaccaugggccagaucauuaccuucuuucaagaggugccccacgucaucgaagagguuaugaacauugugcugaucgcccucagccugcuugcuauucugaaggggaucuacaauguggccacaugcggacucuucggccuggucuccuuucuucugcucugugggagaucuugcagcacgaccuauaaaggaguguacgaacugcagacacuggagcucgacauggcgucccugaacaugaccaugccucuuucuuguacaaagaauaacagccaucacuauaucaugguuggcaaugaaaccgggcuggagcucacacugaccaacacguccauuaucaaucauaaauucugcaaccuuucugaugcucacaagaaaaaucuguacgaccaugcccucaugagcauuaucuccaccuuucaccugagcauuccgaacuucaaucaguaugaggccaugucuugugauuuuaacggaggcaagaucuccgugcaguacaaucugagccacacauaugcugucgacgccgcuaaccauugcggcaccauugccaauggggugcuccaaacauucaugcggauggcguggggaggcucuuacaucgcccuggauuccgggaagggaagcugggacuguaucaugaccucuuaccaguaucuuauuauccagaacacgacaugggaagaucacugccaguuuucccgccccagcccuauuggcuaccuggggcuccugucccaaagaacccgggacaucuauauuucucgcagacuucugggaacauucaccuggacccucagcgauuccgagggcaacgaaacacccggcggguacugucugacgcgguggaugcugaucgaggcugagcucaaaugcuuuggaaauaccgccguugcuaaguguaacgaaaaacaugacgaggaguucugcgauaugcugcgccuuuuugacuucaauaagcaggccaucagacggcugaaagcgccugcccagaugagcauucagcucaucaacaaggcugugaaugcccugauuaacgaucaacuuaucaugaagaaucaucugcgcgacauuaugggcauccccuauugcaacuacucuaaauauuguuaccucaaucacacagucaccgggagaacaucccugccucggugcugucuggugagcaacggaucuuaccucaaugaaacccacuucagcgacgauaucgaacagcaggcugacaacaugauuacggagcugcuucaaaaggaguauaucgaucgccagggcaaaacaccgcuggggcucguggaccuguuugucuucuccaccucuuuuuaccugauuagcaucuuccuucaccucguuaagauucccacccauagacacaucauuggaaaaccuugccccaagccucaucggcugaaucacaugggcaucuguuccugcggccuguauaaacaccccggggugccggugaaguggaagcgcugaggacuagucccuguucccagagcccacuuuuuuuucuuuuuuugaaauaaaauagccugucuuucagaucucaaaggcucuuuucagagccaccaaaaaaaaaaaaaaaaaaaaaaaaaaaaaaaaaaaaaaaaaaaaaaaaaaaaaaaaaaaaaaaaagaauu

SEQ ID NO: 31705 - RNA, 1714 nt, Artificial Sequence
  mRNA product Design a-1 (hSL-A64-N5) comprising derived and/or modified sequence from LASV(LASV254-NIG-2011;Clade II)__AIT17674__GPCmut7 (opt5)
aggagagucccgcagucggcguccagcggcucugcuuguucgugugugugucguugcaggccuuauucaagcuuaccaugggccagaucauuaccuucuuucaagaggugccccacgucaucgaagagguuaugaacauugugcugaucgcccucagccugcuugcuauucugaaggggaucuacaauguggccacaugcggacucuucggccuggucuccuuucuucugcucugugggagaucuugcagcacgaccuauaaaggaguguacgaacugcagacacuggagcucgacaugaccaaccugaauaugacaaugccucuuuccuguaccaagaacaauucucaucacuauaucaugguuggcaacgaaacagggcuggagcucacccugacgaauaccagcauuaucaaccauaaauucugcaaucuuuccgaugcgcacaagaaaaaccuguacaaucaugcucucaugucuauuaucagcacauuucaccuguccauuccgaacuucaaucaguaugaggccaugagcugugacuuuaacggaggcaagaucucugugcaguacaaucugucccacagcuaugccgucgaugcugccaaccauugcggcaccauugcuaacggggugcuccaaacauucaugcggauggccuggggaggcucuuacaucgcgcuggacuccgggaagggaaauugggauuguaucaugaccagcuaccaguaucuuauuauccagaacacgacaugggaagaccacugccaguuuucucgccccuccccuauuggcuaccuggggcuccugagccaaagaacccgggauaucuauauuucccgcagacuucugggaacauucaccuggacccucucugacagcgagggcaaugaaacacccggcggguacugucugacgcgguggaugcugaucgaggccgagcucaaaugcuuuggaaacaccgcuguugccaaguguaaugaaaaacaugaugaggaguucugcgacaugcugcgccuuuuugauuucaacaagcaggcuaucagacggcugaaaaccccugcccaggcgaauauucagcucaucaacaaggccgugaaugcucugauuaacgaccaacuuaucaugaagaaucaucugcgcgauauuaugggcauccccuauugcaacuacuccaaauauuguuaccucaaucacacagucacagggaagaccagccugccuagaugcugucuggugucuaacggauccuaccucaaugaaacgcacuucagcgacgacaucgaacagcaggccgauaacaugauuacagagcugcuucaaaaagaguauauggaccggcagggcaagaccccgcuggggcucguggaucuguuugucuucucuaccagcuuuuaccugaucuccauuuuccuucaccucguuaaaauccccacacaucgccacgugauuggaaagccuugccccaaaccucauagacugaaccacaugggcaucuguucuugcggccuguauaagcaccccggggugccggucaaguggaaacggugaggacuagucccuguucccagagcccacuuuuuuuucuuuuuuugaaauaaaauagccugucuuucagaucucaaaggcucuuuucagagccaccaaaaaaaaaaaaaaaaaaaaaaaaaaaaaaaaaaaaaaaaaaaaaaaaaaaaaaaaaaaaaaaaagaauu

SEQ ID NO: 31706 - RNA, 1714 nt, Artificial Sequence
  mRNA product Design a-1 (hSL-A64-N5) comprising derived and/or modified sequence from LASV(Nig08-A19;Clade III)__ADU56618__GPCmut7 (opt5)
aggagagucccgcagucggcguccagcggcucugcuuguucgugugugugucguugcaggccuuauucaagcuuaccaugggccagaucgugaccuucuuucaagaggucccccacguuauugaagaggugaugaacaucgugcugauugcccucagcauccuggcuauucuuaaggggcuguacaauaucgccacaugcggacucaucggccuggucacguuccuucugcucuccgggagaucuuguagcaugaccuauaaaggaguguacgaacugcagacacuggagcucaacaugaauacccugaacaugacaaugccucuuuccugcaccaagaauaacucucaucacuauauuaugguuggcaaugaaacagggcuggagcucacccugacgaacaccagccuucugcaucacaaauuuuguaaucucuccgacgcgcauaagaaaaaccuguacgaucacacacugaugucuaucauuagcaccuuccaccucuccaucccgaauuuuaaccaguaugaggcuaugagcugcgacuucaauggaggcaagauuacagugcaguacaaccugucucauuccuaugccaucgaugccgcuaaucacuguggcaccgucgccaacggggugcuucaaacguuuaugcggauggcuuggggaggcagcuacauugcccuggacucugggcgcggaaagugggauugcaucaugacauccuaccaguaucucaucauucagaacaccacaugggaagaccauugucaguucagcagacccucuccuaucggcuaccuggggcuucugucccaacggacccgcgauauuuauaucagcagacggcuccugggaaccuuuacauggacgcuguccgacucugagggcaaugaaacccccggcggguacugccucacacgcuggaugcugauugaggcggagcuuaaauguuucggaaacaccgccguugcuaagugcaaugaaaaacacgaugaggaauuuugugacaugcugagacucuucgauuuuaacaagcaggccauccggcgccugaaagcuccugcccagaugagcauccagcuuauuaauaaggcggugaacgcccugaucaaugaccaacucauuaugaagaaccaccugagagauaucaugggcauucccuauugcaauuacuccaaauauugcuaccugaaccauacaagcaccgggcggacgucucucccucgcuguugccuggucuccaauggaagcuaccuuaacgagacacacuucucugacgacaucgaacagcaggcugauaauaugaucaccgagaugcugcaaaaggaguaucucgacagacagggcaaaaccccgcuggggcugguggaucuuuucguguuuagcacauccuucuaccucauuucuaucuuucugcaucuggucaagauucccacccaccggcauaucguuggaaaaccuugucccaagccucaccgccucaaccacaugggcauuugcagcuguggccuguauaaacagcccggggugccggugagauggaagcggugaggacuagucccuguucccagagcccacuuuuuuuucuuuuuuugaaauaaaauagccugucuuucagaucucaaaggcucuuuucagagccaccaaaaaaaaaaaaaaaaaaaaaaaaaaaaaaaaaaaaaaaaaaaaaaaaaaaaaaaaaaaaaaaaagaauu

SEQ ID NO: 31707 - RNA, 1717 nt, Artificial Sequence
  mRNA product Design a-1 (hSL-A64-N5) comprising derived and/or modified sequence from LASV(G1180-SLE-2010;Clade IV)__AIT17168__GPCmut7 (opt5)
aggagagucccgcagucggcguccagcggcucugcuuguucgugugugugucguugcaggccuuauucaagcuuaccaugggccagaucgugaccuucuuucaagaggucccccacguuauugaagaggugaugaacaucgugcugauugcccucagcauccuggcuguccuuaaggggcuguacaauuucgccacaugcggacucgugggccugcuuacguuucugcuccugugugggagauccugcaccgcgucucgguauaaaggaguuuacgaacugcagacacucgagcugaacauggaaacccuuaauaugacaaugccucugagcuguaccaagaacaauucccaucacuauauuauggugggcaacgagacagggcucgagcugacccuuacgaauaccucuaucaucaaccauaaauucugcaaucugagcgacgcucacaagaaaaaccucuacgaucaugcccugauguccauuaucucuacauuucaccugagcauuccgaauuucaaccaguaugaagccauguccugugacuuuaauggaggcaagaucagcguccaguacaaccucucucacuccuaugcuggcgaugccgcuaaucauugcgggaccguggccaacggaguucugcaaacauucaugcgcauggcguggggcgggagcuacauugcccuugacucuggacacggcuccugggauuguaucaugaccagcuaccaguaucugauuauccagaacacgacaugggaggaccauugccaguuuucuagacccuccccuaucggguaccucggacugcuuagccaacggacccgcgauauuuauaucuccagacggcugcucggcacauucaccuggacccugucugacagcgaaggcaaggauacacccgggggauacugucugacgcgcuggaugcucauugaggcugagcugaaaugcuuuggcaauaccgccguggcuaaguguaacgaaaaacacgacgaggaguucugcgauaugcuuagacuguuugacuucaauaagcaggccauccagcggcucaaagcgccugcccagauguccauucaacugaucaacaaggcugucaaugcccuuaucaacgaucagcugauuaugaagaaucaccuccgcgacaucauggggauucccuauugcaacuacagcaaauauuguuaccugaaucauacaaccacaggaaagaccucucugccuaaaugcugucucguguccaacggcagcuaccugaaugaaacgcacuucucugacgauaucgaacagcaagcugacaacaugauuacagagaugcuucagaaggaguauauggaaagacaggggaaaaccccgcugggacucguggaucuguuugucuucagcaccuccuuuuaccugaucucuaucuuccuucaucucguuaagauucccacacaccggcauaucgugggcaaaagcugcccuaagccccaccgccugaaucacaugggcauuuguuccugcgggcuguauaagcagccuggagugcccgucaaauggaagagaugaggacuagucccuguucccagagcccacuuuuuuuucuuuuuuugaaauaaaauagccugucuuucagaucucaaaggcucuuuucagagccaccaaaaaaaaaaaaaaaaaaaaaaaaaaaaaaaaaaaaaaaaaaaaaaaaaaaaaaaaaaaaaaaaagaauu

SEQ ID NO: 31708 - RNA, 1717 nt, Artificial Sequence
  mRNA product Design a-1 (hSL-A64-N5) comprising derived and/or modified sequence from LASV(G1442-SLE-2011;Clade IV)__AIT17180__GPCmut7 (opt5)
aggagagucccgcagucggcguccagcggcucugcuuguucgugugugugucguugcaggccuuauucaagcuuaccaugggccagaucgugaccuucuuucaagaggucccccacguuauugaagaggugaugaacaucgugcugauugcccucagcauccuggcuguccuuaaggggcuguacaauguggccacaugcggacucauuggccugguuacguuccuucugcucugugggagauccugcaccacaacccuguauaaaggaguguacgaacugcagacacucgagcugaacauggaaacccuuaauaugacaaugccucugucuuguaccaagaacaauagccaucacuauauccgggucggcaacgagacggggcucgagcugacccuuacaaauaccuccaucauuaaccauaaauuuugcaaucugucugacgcgcacaagaaaaaccucuacgaucaugcucugaugagcaucauuuccacauuccaccugucuaucccgaauuuuaaccaguaugaagccaugagcugugacuucaauggaggcaagauuuccgugcaguacaaccucagccacucuuaugccggcgaugcugccaaucauugcgggaccguugcuaacggagugcugcaaacguuuaugcgcauggccuggggcggguccuacaucgcgcuugacagcggaagaggcaacugggauuguauuaugacaucuuaccaguaucugaucauccagaauaccacaugggacgaucacugccaguucucccggcccagcccuauuggguaccucggacugcuuucucaacgcaccagagacgucuauaucucccggcgccugcucggcaccuuuacauggacgcugagcgauuccgagggcaaggacacccccgggggauacugucugacaagauggaugcucauugaagccgagcugaaaugcuucggcaacaccgcuguggccaaguguaaugagaaacaugaugaagaguuuugcgacaugcuucggcuguucgauuuuaacaagcaggcuauccagcgccucaaagccccugcgcagaugucuauucaacugaucaauaaggccgugaacgcucuuaucaaugaccagcugauuaugaagaaccaccucagagacaucauggggauucccuauugcaauuacagcaaauauuguuaccugaacaauacagccaccggaaagacgucccugccuaaaugcugucucaucagcaacggcucuuaccugaaugaaacacacuucuccgaugacauugagcaggaagcugauaacaugaucaccgagaugcuucaaaaggaguauauggaacggcaggggaaaaccccgcugggacucgucgaccuguucguuuuuagcacaucuuucuaccugaucagcauuuuucuucaucucgugaagauccccacccaccgccauauugugggcaaauccugcccuaagccccacagacugaaucauaugggcaucuguucuugcgggcuguauaagcagccuggaguccccgugcgguggaaacgcugaggacuagucccuguucccagagcccacuuuuuuuucuuuuuuugaaauaaaauagccugucuuucagaucucaaaggcucuuuucagagccaccaaaaaaaaaaaaaaaaaaaaaaaaaaaaaaaaaaaaaaaaaaaaaaaaaaaaaaaaaaaaaaaaagaauu

SEQ ID NO: 31709 - RNA, 1717 nt, Artificial Sequence
  mRNA product Design a-1 (hSL-A64-N5) comprising derived and/or modified sequence from LASV(G3010-SLE-2013;Clade IV)__AIT17344__GPCmut7 (opt5)
aggagagucccgcagucggcguccagcggcucugcuuguucgugugugugucguugcaggccuuauucaagcuuaccaugggccagaucgugaccuucuuucaagaggucccccacguuauugaagaggugaugaacaucgugcugauugcccucagcauccuggcuguccuuaaggggcuguacaauuucgccacaugcggacucgugggccugguuacguuucuucugcucugugggagauccugcaccacaucucuguauaaaggaguguacgaacugcagacccucgagcugaacauggaaacacuuaauaugaccaugccucugagcuguacaaagaacaauucccaucacuauauuauggucggcaacgagaccgggcucgagcugacgcuuaccaauacaucuaucaucaaccauaaauucugcaaucugagcgacgcgcacaagaaaaaccucuacaaucaugcucugauguccauuaucucuaccuuucaccugagcauuccgaacuucaaucaguaugaagccauguccugugauuuuaacggaggcaagaucagcgugcaguacaaucucucucacuccuaugccggcgacgcugccagccauugcgggacaguugcuaacggagugcugcaaaccuucaugcggauggccuggggcgggucuuacauugcgcuugauuccggauacggcaagugggacuguaucaugacgagcuaucaguaccugauuauccagaacacaaccugggaggaucacugccaguuuucucgccccuccccuaucggguaucucggacugcuuagccaaagaacacgggacauuuacaucucccgcagacugcucggcaccuucaccuggacacugucugauagcgaaggcaaagacacgcccgggggauauugucugacccgguggaugcucauugaggccgagcugaagugcuuuggcaauacagcugucgccaaauguaacgaaaagcaugaugaggaguucugcgacaugcuucgccuguuugauuucaauaaacaggcuauccagagacucaagaccccugcccagauguccauucaacugaucaacaaggcggugaaugcccuuaucaacgaccagcugauuaugaaaaaucaccuccgggauaucauggggauucccuacugcaacuauagcaaguacuguuaccugaaucacacaaccacgggaaaaacaucucugccuaagugcugucucguguccaacggcagcuaucugaaugaaacccauuucucugacgacaucgaacagcaagcugauaacaugauuaccgagaugcuucagaaagaguacauggaacgccaggggaagacaccgcugggacucgucgaccuguuuguuuucagcaccuccuuuuaucugaucucuaucuuccuucaccucgugaaaauucccacacauagacacaucgugggcaagagcugcccuaagccccaucggcugaaucacaugggcauuuguuccugcgggcuguacaaacagccuggaguccccgugcgcuggaagagaugaggacuagucccuguucccagagcccacuuuuuuuucuuuuuuugaaauaaaauagccugucuuucagaucucaaaggcucuuuucagagccaccaaaaaaaaaaaaaaaaaaaaaaaaaaaaaaaaaaaaaaaaaaaaaaaaaaaaaaaaaaaaaaaaagaauu

SEQ ID NO: 31710 - RNA, 1717 nt, Artificial Sequence
  mRNA product Design a-1 (hSL-A64-N5) comprising derived and/or modified sequence from LASV(G502-SLE-2009;Clade IV)__AIT17126__GPCmut7 (opt5)
aggagagucccgcagucggcguccagcggcucugcuuguucgugugugugucguugcaggccuuauucaagcuuaccaugggccagaucgugaccuucuuucaagaggucccccacguuauugaagaggugaugaacaucgugcugauugcccucagcauccuggcuguccuuaaggggcuguacaauuucgccacaugcggacucgugggccugcuuacguuucugcuccugugugggagauccugcaccacaggacuguauaaaggcguuuacgaacuccagacccuggagcuuaacauggaaacacugaauaugaccaugccucucucuuguacaaagaacaauagccaucacuauauuaugguggggaacgagaccggacuggagcuuacgcugaccaauacauccaucaucaaccauaaauucugcaaucucucugacgcgcacaagaaaaaccuguacgaucaugcucugaugagcauuaucuccaccuuucaccucucuauuccgaauuucaaccaguaugaagccaugagcugugacuuuaauggcggcaagaucuccguccaguacaaccugagccacucuuaugccggggaugcugccgaccauugcggaacaguggcuaauggcguucuucaaaccuucaugcggauggccuggggaggguccuacauugcgcuggauagcggccgcgggagaugggacuguaucaugacgucuuaccaguaucucauuauccagaacacaaccugggaggaucacugccaguuuucccggcccagcccuaucggauaccugggccuucugucucaacgcacaagagacauuuauaucucccggcgccuccugggcaccuucaccuggacacugagcgauuccgaagggaaggacacgcccggaggcuacugucucaccagauggaugcugauugaggccgagcuuaaaugcuuugggaacacagcuguggccaaguguaaugaaaaacaugaugaggaguucugcgacaugcugcggcucuuugauuucaacaagcaggcuauccagcgccugaaagccccugcgcagaugucuauucaacuuaucaauaaggccgucaacgcucugaucaaugaccagcucgugaugaagaaccaccugagagacauuaugggaauccccuauugcaauuacagccgguauuguuaccugaaccacaccacaaccggccgcacgucccucccuaaaugcugucuggugagcaaugggucuuaccuuaacgaaacacauuucuccgaugacauugaacagcaagccgauaauaugaucaccgagaugcugcagaaggaguauauggaaagacagggaaaaaccccgcucggccuggucgaccuguuuguuuucagcacaucuuuuuaccuuauuagcaucuuccuccaccuggugaagauccccacccaucggcacauugugggcaaauccugcccuaagccccaucgccugaaccacauggggaucuguucuugcggacucuauaaacagccuggcguccccgugaaguggaagagaugaggacuagucccuguucccagagcccacuuuuuuuucuuuuuuugaaauaaaauagccugucuuucagaucucaaaggcucuuuucagagccaccaaaaaaaaaaaaaaaaaaaaaaaaaaaaaaaaaaaaaaaaaaaaaaaaaaaaaaaaaaaaaaaaagaauu

SEQ ID NO: 31711 - RNA, 1717 nt, Artificial Sequence
  mRNA product Design a-1 (hSL-A64-N5) comprising derived and/or modified sequence from LASV(G733-SLE-2010;Clade IV)__AIT17154__GPCmut7 (opt5)
aggagagucccgcagucggcguccagcggcucugcuuguucgugugugugucguugcaggccuuauucaagcuuaccaugggccagaucgugaccuucuuucaagaggucccccacguuauugaagaggugaugaacaucgugcugauugcccucagcauccuggcuguccuuaaggggcuguacaauuucgccacaugcggaauugugggccucguuuccuuucugcuucugugugggagaucuugcacgaccagccucuauaaaggaguguacgaacugcagacacuggagcucaacauggaaacccugaauaugacaaugccucuuuccuguaccaagaacaauucucaucacuauaucauggucggcaacgagacagggcuggagcucacccugacgaauaccagcaucauuaaccauaaauucugcaaucuuuccgacgcgcacaagaaaaaccuguacgaucaugcucucaugucuaucauuagcacauuucaccuguccaucccgaauuucaaccaguaugaagccaugagcugugacuuuaauggaggcaagauuucugugcaguacaaccugucccacagcuaugccggcgaugcugccaaucauugcgggaccaucgcuaacggaguucuccaaacauucaugcggauggccuggggcgggucuuacauugcgcuggacuccggacgcgauagaugggacuguaucaugaccagcuaccaguaucuuaucauucagaacacgacaugggaggaucacugccaguuuucucggcccuccccuaucggcuaccuggggcuccugagccaacgcaccagagacauuuauaucucccggcgccuucugggaacauucaccuggacccucucugauagcgaaggcaaggacacacccggcggguacugucugacgagauggaugcugauugaggccgagcucaaaugcuuuggaaauaccgcuguggccaaguguaacgaaaaacaugaugaggaguucugcgacaugcugcggcuuuuugauuucaauaagcaggcuauccagcgccugaaagccccugcgcagauguccauccaacucauuaacaaggccgucaaugcucugaucaacgaccagcuuauuaugaagaaucaccugagagacaucaugggcauucccuauugcaacuacagcaaauauuguuaccucaaucacacaaccacagggaagaccucucugccuaaaugcugucugguguccaacggaagcuaccucaaugaaacgcauuucucugaugacaucgaacagcaagccgauaacaugaucacagagaugcugcagaaggaguauauggaacggcagggcaaaaccccgcuugggcugguggaccucuuugucuucagcaccuccuuuuaccugauuucuaucuuccugcaccuuguuaagauucccacacaucgccacguggugggaaaaagcugcccuaagccccauagacucaaucacaugggcaucuguuccugcggccuguaugggcagccuggaguccccgugaaguggaaacggugaggacuagucccuguucccagagcccacuuuuuuuucuuuuuuugaaauaaaauagccugucuuucagaucucaaaggcucuuuucagagccaccaaaaaaaaaaaaaaaaaaaaaaaaaaaaaaaaaaaaaaaaaaaaaaaaaaaaaaaaaaaaaaaaagaauu

SEQ ID NO: 31712 - RNA, 1717 nt, Artificial Sequence
  mRNA product Design a-1 (hSL-A64-N5) comprising derived and/or modified sequence from MOPV/LASV reassortant(IGS-1;Clade IV)__AFY05576__GPCmut7 (opt5)
aggagagucccgcagucggcguccagcggcucugcuuguucgugugugugucguugcaggccuuauucaagcuuaccaugggccagaucgugaccuucuuucaagaggucccccacguuauugaagaggugaugaacaucgugcugauugcccucagcguccuggcugugcuuaaggggcuguacaauuucgccacaugcggacucguuggccuggugacguuucuucugcucugugggagauccugcaccacaucucuguauaaaggagucuacgaacugcagacccucgagcugaacauggaaacacuuaauaugaccaugccucugagcuguacaaagaacaauucccaucacuauaucauggugggcaacgagaccgggcucgagcugacgcuuaccaauacaucuauuaucaaccauaaauucugcaaucugagcgacgcgcacaagaaaaaccucuacgaucaugcucugauguccaucauuucuaccuuucaccugagcaucccgaauuucaaccaguaugaagccauguccugugacuuuaauggaggcaagauuagcguucaguacaaccucucucacuccuaugccggcgaugcugccaaucauugcgggacaguggcuaacggaguccugcaaaccuucaugcggauggccuggggcgggagcuacaucgcgcuugacucuggacgcggcaacugggauuguauuaugacguccuaccaguaucugaucauucagaauacaaccugggaggaccacugccaguuuagcagacccucuccuaucggguaccucggacugcuuucccaacggacacgcgauaucuauauuagcagacggcugcucggcaccuucaccuggacacuguccgacucugaaggcgaggauacgcccgggggauacugucugacccgcuggaugcucaucgaggccgaacugaagugcuuuggcaacacagcuguggccaaauguaaugagaagcaugacgaagaguucugcgauaugcuuagacuguuugacuucaacaaacaggcuauucagcggcucaaggccccugcgcagaugagcauccaacugauuaauaaagccgugaacgcucuuaucaaugaucagcugaucaugaagaaccaccuccgcgacauuauggggauccccuauugcaauuacuccaaguauuguuaccugaaccacaccacaaccggaagaacgagccugccuaaaugcugucucgucucuaauggcuccuaccugaacgaaacacauuucagcgacgauauugagcagcaagccgacaauaugaucaccgagaugcuucagaaggaauauauggagcggcaggggaaaaccccgcugggacucguugaucuguuuguguucucuaccagcuuuuaccugauuuccaucuuccuucaccucgugaagauccccacacaucgccacauugucggcaaaucuugcccuaagccccauagacugaaccacaugggcaucuguagcugcgggcuguauaaacagccuggagugcccguuaaguggaagcggugaggacuagucccuguucccagagcccacuuuuuuuucuuuuuuugaaauaaaauagccugucuuucagaucucaaaggcucuuuucagagccaccaaaaaaaaaaaaaaaaaaaaaaaaaaaaaaaaaaaaaaaaaaaaaaaaaaaaaaaaaaaaaaaaagaauu

SEQ ID NO: 31713 - RNA, 1717 nt, Artificial Sequence
  mRNA product Design a-1 (hSL-A64-N5) comprising derived and/or modified sequence from LASV(LM765-SLE-2012;Clade IV)__AIT17814__GPCmut7 (opt5)
aggagagucccgcagucggcguccagcggcucugcuuguucgugugugugucguugcaggccuuauucaagcuuaccaugggccagaucgugaccuucuuucaagaggucccccacguuauugaagaggugaugaacaucgugcugauugcccucagcauccuggcuguccuuaaggggcuguacaauuucgccacaugcggacucgugggccugguuacguuucuucugcucugugggagauccugcaccacaucucuguauaaaggaguguacgaacugcagacccucgagcugaacauggaaacacuuaauaugaccaugccucugagcuguacaaagaacaauucccaucacuauauuauggucggcaacgagaccgggcucgagcugacgcuuaccaauacaucuaucaucgaccauaaauucugcaaccugagcgaugcgcaccggaagaaucucuacgaccaugcucugauguccauuaucucuaccuuucaccugagcauuccgaacuucaaucaguaugaagccauguccugugauuuuaacggaggcaaaaucagcgugcaguacaaucucucucacuccuaugccaaggacgcugccgaucauugcggcacaguugcuaacggggugcugcaaaccuucaugcgcauggccuggggaggcagcuacauugcgcuugacucugggagaggacggugggauuguaucaugacguccuaccaguaucugauuauccagaauacaaccugggaggaccacugccaguuuagccgccccucuccuaucggcuaccucgggcugcuuucccaaagaacacgggauauuuauaucagccgcagacugcucggaaccuucaccuggacacuguccgacucugaaggcaaggauacgcccggcggguacugucugacccgguggaugcucauugaggccgagcugaaaugcuuuggaaacacagcugucgccaaguguaacgaaaaacaugacgaggaguucugcgauaugcuucgccuguuugacuucaauaagcaggcuauccagagacucaaagccccugcgcagaugagcauucaacugaucaacaaggccgugaaugcucuuaucaacgaccagcugauuaugaagaaucaccuccgggauaucaugggcauucccuauugcaacuacuccaaauauuguuaccugaaucacaccacaaccgggaagacgagccugccuaaaugcugucucgugucuaacggauccuaccugaaugaaacacauuucagcgacgauaucgaacagcaagccgacaacaugauuaccgagaugcuucagaaggaguauauggaacgccagggcaaaaccccgcuggggcucgucgaucuguuuguuuucucuaccagcuuuuaccugaucuccaucuuccuucaccucgugaagauucccacacauagacacaucgugggaaaaccuugccccaagccucaucggcugaaucacaugggcauuuguucuugcggccuguauaagcagcccggggucccggugaaauggaagcgcugaggacuagucccuguucccagagcccacuuuuuuuucuuuuuuugaaauaaaauagccugucuuucagaucucaaaggcucuuuucagagccaccaaaaaaaaaaaaaaaaaaaaaaaaaaaaaaaaaaaaaaaaaaaaaaaaaaaaaaaaaaaaaaaaagaauu

SEQ ID NO: 31714 - RNA, 1717 nt, Artificial Sequence
  mRNA product Design a-1 (hSL-A64-N5) comprising derived and/or modified sequence from LASV(LM776-SLE-2012;Clade IV)__AIT17824__GPCmut7 (opt5)
aggagagucccgcagucggcguccagcggcucugcuuguucgugugugugucguugcaggccuuauucaagcuuaccaugggccagaucgugaccuucuuucaagaggucccccacguuauugaagaggugaugaacaucgugcugauugcccucagcauccuggcuguccuuaaggggcuguacaauuucgccacaugcggacucgugggccugguuacguuucuucugcucugugggagauccugcaccacaucuguguauaaaggagucuacgaacugcagacccuggagcucaacauggaaacacugaauaugaccaugccucuuagcuguacaaagaacaauucccaucacuauauuauggugggcaacgagaccgggcuggagcucacgcugaccaauacaucuaucaucaaccauaaauucugcaaucuuagcgacgcgcacaagaaaaaccuguacgaucaugcucucauguccauuaucucuaccuuucaccugagcauuccgaauuucaaccaguaugaagccauguccugugacuuuaauggaggcaagaucagcguucaguacaaccugucucacuccuaugccggcgaugcugccaaucauugcgggacaguggcuaacggaguccuccaaaccuucaugcggauggccuggggcgggagcuacauugcgcuggacucuggacacggcaagugggauuguaucaugacguccuaccaguaucuuauuauccagaacacaaccugggaggaccauugccaguuuagccgccccucuccuaucggguaccugggacuccugucccaaagaacacgggauauuuauaucagccgcagacuucugggcaccuucaccuggacacucuccgacucugaaggcaaagauacgcccgggggauacugucugacccgguggaugcugauugaggccgagcucaagugcuuuggcaauacagcuguggccaaauguaacgaaaagcacgacgaggaguucugcgauaugcugcgccuuuuugacuucaauaaacaggcuauccagagacugaaggccccugcgcagaugagcauucaacucaucaacaaggccgugaaugcucugaucaacgaucagcuuauuaugaaaaaucaucugcgggacaucauggggauucccuauugcaacuacuccaaguauuguuaccucaaucacaccacaaccggaaaaacgagccugccuaagugcugucuggucucuaacggcuccuaccucaaugaaacacacuucagcgacgauaucgaacagcaagccgacaacaugauuaccgagaugcugcagaaagaguauauggaacgccaggggaagaccccgcuuggacugguugaucucuuuguguucucuaccagcuuuuaccugaucuccaucuuccugcaucuugugaaaauucccacacacagacauaucgucggcaagucuugcccuaagccccaccggcucaaucacaugggcauuuguagcugcgggcuguauaaacagccuggagugcccguucgcuggaagagaugaggacuagucccuguucccagagcccacuuuuuuuucuuuuuuugaaauaaaauagccugucuuucagaucucaaaggcucuuuucagagccaccaaaaaaaaaaaaaaaaaaaaaaaaaaaaaaaaaaaaaaaaaaaaaaaaaaaaaaaaaaaaaaaaagaauu

SEQ ID NO: 31715 - RNA, 1717 nt, Artificial Sequence
  mRNA product Design a-1 (hSL-A64-N5) comprising derived and/or modified sequence from LASV(Mad39;Clade IV)__ANH09722__GPCmut7 (opt5)
aggagagucccgcagucggcguccagcggcucugcuuguucgugugugugucguugcaggccuuauucaagcuuaccaugggccagaucgugaccuucuuucaagaggucccccacguuauugaagaggugaugaacaucgugcugauugcccucagcauccuggcuguccuuaaggggcuguacaauguggccacaugcggacucauuggccugguuacguuccuucugcucugugggagauccugcaccacaacccuguauaaaggaguguacgaacugcaggcgcucgagcugaacauggaaacacuuaauaugaccaugccucugucuuguacaaagaacaauagccaucacuauauccgggucggcaacgagaccgggcucgagcugacgcuuaccaauacaucccugaucaaccauaaauuuugcaaucucucugacgcucacaagaaaaaccuguacgaucaugcccugaugagcauuaucuccaccuuccaccucucuauuccgaauuuuaaccaguaugaagccaugagcugugacuucaaugauggaaagaucuccgugcaguacaaccugagccacacauaugcuggcgacaccgccaaucauugcggcacgguugcuaacggggugcuucaaacauuuaugcgcauggccuggggaggcucuuacauugcgcuggauuccgggagaggaggcugggacuguaucaugaccagcuaccaguaucucauuauccagaacacaaccugggaggaucacugccaguucucucggcccuccccuaucggguaccugggacuucugagccaacgcaccagagacauuuauaucucucggcgccuccugggcacauuuacguggacccuguccgauagcgaaggcaaggacacacccgggggauacugucucaccagauggaugcugauugaggccgagcuuaaaugcuucggcaauacagcugucgccaaguguaacgaaaaacaugaugaggaauuuugcgacaugcugcgccucuucgauuuuaauaagcaggcuauccagcggcugaaagccccugcgcagauguccauucaacuuaucaacaaggccgugaaugcucugaucaacgaccagcucauuaugaagaaucaccugagagacaucauggggauucccuauugcaacuacucuaaauauuguuaccugaaucacaccgugacgggaaagacaagccucccuaaaugcugucuggucuccaacggcagcuaccuuaaugagacccauuucucugaugacaucgaacagcaagccgauaacaugauuaccgagaugcugcagaaggaguauauggaacggcaggggaaaacaccgcucggacugguugaccuguucguguuuuccaccagcuucuaccuuaucucuaucuuucuccaccuggugaagauucccacacaucgccacgucgugggcaaaccuugccccaagccucauagacugaaucacaugggcaucuguagcugcggguucuauaagcagcccggaguuccggugcgguggaaacgcugaggacuagucccuguucccagagcccacuuuuuuuucuuuuuuugaaauaaaauagccugucuuucagaucucaaaggcucuuuucagagccaccaaaaaaaaaaaaaaaaaaaaaaaaaaaaaaaaaaaaaaaaaaaaaaaaaaaaaaaaaaaaaaaaagaauu

SEQ ID NO: 31716 - RNA, 1717 nt, Artificial Sequence
  mRNA product Design a-1 (hSL-A64-N5) comprising derived and/or modified sequence from LASV(Z0947-SLE-2011;Clade IV)__AIT17840__GPCmut7 (opt5)
aggagagucccgcagucggcguccagcggcucugcuuguucgugugugugucguugcaggccuuauucaagcuuaccaugggccagaucgugaccuucuuucaagaggucccccacguuauugaagaggugaugaacaucgugcugauugcccucagcauccuggcuguccuuaaggggcuguacaauuucgccacaugcggacucgugggccugguuacguuucuucugcucugugggagauccugcaccauuucucuguauaaaggaguguacgaacugcagacacucgagcugaacauggaaacccuuaauaugacaaugccucugagcuguaccaagaacaauucccaucacuauaucauggucggcaacgagacagggcucgagcugacccuuacgaauaccucuaucauuaaccauaaauucugcaaucugagcgacgcgcacaagaaaaaccucuacgaucaugcucugauguccaucauuucuacauuucaccugagcaucccgaauuucaaccaguaugaagccauguccugugacuuuaauggaggcaagauuagcgugcaguacaaccucucucacuccuaugccggcgaugcugccaaucauugcgggaccguugcuaacggagugcugcaaacauucaugcggauggccuggggcgggagcuacaucgcgcuugacucuggacgcgauagaugggacuguauuaugaccuccuaccaguaucugaucauccagaacacgacaugggaggaucacugccaguuuagccggcccucuccuauuggcuaccucgggcugcuuucccaacgcaccagagacaucuauauuagccggcgccugcucggaacauucaccuggacccuguccgauucugaaggcaaggacacacccggcggguacugucugacgagauggaugcucaucgaggccgagcugaaaugcuuuggaaauaccgcugucgccaaguguaacgaaaaacaugaugaggaguucugcgacaugcuucggcuguuugauuucaauaagcaggcuauucagcgccucaaagccccugcgcagaugagcauccaacugaucaacaaggccgugaaugcucuuauuaacgaccagcugaucaugaagaaucaccucagagacauuaugggcauccccuauugcaacuacuccaaauauuguuaccugaaucacacaaccacagggaagaccagccugccuaaaugcugucucgugucuaacggauccuaccugaaugaaacgcauuucagcgaugacauugaacagcaagccgauaacaugaucacagagaugcuucagaaggaguauauggaacggcagggcaaaaccccgcuggggcucgucgaccuguuuguuuucucuaccagcuuuuaccugaucuccauuuuccuucaccucgugaagauccccacacaucgccacauugugggaaaaccuugccccaagccucauagacugaaucacaugggcaucuguucuugcggccuguauaagcagcccggggucccggugaaauggaagcggugaggacuagucccuguucccagagcccacuuuuuuuucuuuuuuugaaauaaaauagccugucuuucagaucucaaaggcucuuuucagagccaccaaaaaaaaaaaaaaaaaaaaaaaaaaaaaaaaaaaaaaaaaaaaaaaaaaaaaaaaaaaaaaaaagaauu

SEQ ID NO: 31717 - RNA, 1748 nt, Artificial Sequence
  mRNA product Design a-1 (hSL-A100) comprising derived and/or modified sequence from LASV(Josiah;Clade IV)__NP_694870__GPCmut7 (opt1)
aggagagucccgcagucggcguccagcggcucugcuuguucgugugugugucguugcaggccuuauucaagcuuaccaugggccagaucgugaccuucuuccaggaggucccccacgugaucgaggaggugaugaacaucguccugaucgcccucagcgugcuggccgugcugaaggggcucuacaacuucgcgaccugcggccuggucgggcuggugacguuccuccugcugugcggccgcuccugcaccaccagccucuacaaggggguguacgagcugcagacccuggagcucaacauggagacgcugaacaugaccaugccgcuguccugcaccaagaacaacagccaccacuacaucauggucggcaacgagaccggccucgagcugacgcugaccaacaccuccaucaucaaccacaaguucugcaaccucagcgacgcccacaagaagaaccuguacgaccacgcccugauguccaucaucagcaccuuccaccucuccauccccaacuucaaccaguacgaggccaugagcugcgacuucaacgggggcaagaucuccgugcaguacaaccugagccacuccuacgccggggacgcggccaaccacugcggcacgguggccaacgggguccugcagaccuucaugcggauggccuggggcggcagcuacaucgcgcucgacuccgggcgcggcaacugggacugcaucaugaccagcuaccaguaccugaucauccagaacaccacgugggaggaccacugccaguucucccggcccagccccaucggguaccugggccuccugucccagcgcacccgggacaucuacaucagccgccggcugcucggcaccuucaccuggacgcugagcgacuccgaggggaaggacaccccgggcggguacugccugacccgcuggaugcucaucgaggccgagcugaagugcuucggcaacaccgccguggccaagugcaacgagaagcacgacgaggaguucugcgacaugcugcggcuguucgacuucaacaagcaggccauccagcgccugaaggcgcccgcccagaugagcauccagcugaucaacaaggccgugaacgcccucaucaacgaccagcugaucaugaagaaccaccuccgggacaucauggggauccccuacugcaacuacuccaaguacugcuaccucaaccacacgaccaccggccgcaccagccugcccaagugcugccuggucuccaacggcagcuaccucaacgagacgcacuucuccgacgacaucgagcagcaggccgacaacaugaucaccgagaugcugcagaaggaguacauggagcggcaggggaagacgccccugggccucguggaccuguucguguucagcaccuccuucuaccugaucagcaucuuccugcaccucgucaagaucccgacccaccgccacaucguggggaaguccugccccaagccccaccggcugaaccacaugggcaucugcagcugcgggcuguacaagcagcccggcgugccggucaaguggaagcgcugaggacuagucccuguucccagagcccacuuuuuuuucuuuuuuugaaauaaaauagccugucuuucagaucucaaaggcucuuuucagagccaccaaaaaaaaaaaaaaaaaaaaaaaaaaaaaaaaaaaaaaaaaaaaaaaaaaaaaaaaaaaaaaaaaaaaaaaaaaaaaaaaaaaaaaaaaaaaaaaaaaaaa

SEQ ID NO: 31718 - RNA, 1745 nt, Artificial Sequence
  mRNA product Design a-1 (hSL-A100) comprising derived and/or modified sequence from LASV(LP;Clade I)__AAF86701__GPCmut7 (opt1)
aggagagucccgcagucggcguccagcggcucugcuuguucgugugugugucguugcaggccuuauucaagcuuaccaugggccagaucaucaccuucuuccaggaggugccccacgucaucgaggaggugaugaacaucgugcugaucgcccucagccugcuggccauccucaaggggcuguacaacaucgcgaccugcggcaucaucgggcuggucgccuuccucuuccugugcggcaaguccugcagccugacgcucaagggcggguacgagcugcagacccuggagcucaacauggagacccugaacaugaccaugccgcuguccugcacgaagaacagcucccaccacuacauccgcgugggcaacgagaccgggcucgagcugacccugaccaacacgagcaucaucaaccacaaguucugcaaccucuccgacgcccacaagaagaaccuguacgaccacgcccugaugagcaucaucuccaccuuccaccucagcauccccaacuucaaccaguacgaggccauguccugcgacuucaacggcgggaagaucagcgugcaguacaaccugucccacagcuacgcgggcgacgccgccgagcacugcgggaccgucgccaacggcgugcugcagaccuucaugcggauggcguggggcgggcgcuacaucgcccucgacuccggcaaggggaacugggacugcaucaugacgagcuaccaguaccugaucauccagaacaccaccugggaggaccacugccaguucucccggcccagccccaucggcuaccugggccuccugucccagcgcacccgggacaucuacaucagccgccggcugcucgggacguucaccuggacccugagcgacuccgagggcaacgagacccccgggggcuacugccugacgcgcuggaugcucaucgaggccgagcugaagugcuucgggaacaccgccguggccaagugcaacgagaagcacgacgaggaguucugcgacaugcugcggcuguucgacuucaacaagcaggcgauccgccggcugaaggcccccgcccagaugagcauccagcugaucaacaaggccgucaacgcccucaucaacgaccagcugaucaugaagaaccaccuccgcgacaucaugggcauccccuacugcaacuacuccaaguacugcuaccucaaccacaccagcuccggccggaccagccugcccaagugcugccugaucuccaacgggagcuaccucaacgagacgcaguucuccgacgacaucgagcagcaggcggacaacaugaucaccgagaugcugcagaaggaguacaucgagcgccagggcaagaccccgcuggggcucguggacaucuucaucuucagcaccuccuucuaccugaucagcaucuuccugcaccugaucaagaucccgacgcaccggcacaucgugggcaagcccugccccaagccccaccgccucaaccacaugggggucugcuccugcggccuguacaagcacccgggcgugcccaccaaguggaagcggugaggacuagucccuguucccagagcccacuuuuuuuucuuuuuuugaaauaaaauagccugucuuucagaucucaaaggcucuuuucagagccaccaaaaaaaaaaaaaaaaaaaaaaaaaaaaaaaaaaaaaaaaaaaaaaaaaaaaaaaaaaaaaaaaaaaaaaaaaaaaaaaaaaaaaaaaaaaaaaaaaaaaa

SEQ ID NO: 31719 - RNA, 1745 nt, Artificial Sequence
  mRNA product Design a-1 (hSL-A100) comprising derived and/or modified sequence from LASV(803213;Clade II)__AAF86703__GPCmut7 (opt1)
aggagagucccgcagucggcguccagcggcucugcuuguucgugugugugucguugcaggccuuauucaagcuuaccaugggccagaucaucaccuucuuccaggaggugccccacgucaucgaggaggugaugaacaucgugcugaucgcccucagccugcuggccauccucaaggggaucuacaacgucgcgaccugcggccuguucgggcugaucuccuuccuccugcugugcggccgcagcugcuccgugacguacaaggggguguacgagcuccagacccuggagcugaacauggccaaccucaacaugaccaugccgcugagcugcaccaagaacaacucccaccacuacaucauggucggcaacgagacgggccuggagcucacccugaccaacaccagcaucaucaaccacaaguucugcaaccuguccgacgcccacaagaagaaccucuacgaccacgcccugaugagcaucaucuccacguuccaccugagcauccccaacuucaaccaguacgaggccauguccugcgacuucaacgggggcaagaucagcgugcaguacaaccucucccacagcuucgcgguggacgccgccaaccacugcgggaccaucgccaacggcguccugcagaccuucaugcggauggcguggggcggguccuacaucgcccuggacagcggcaaggggaacugggacugcaucaugaccuccuaccaguaccucaucauccagaacacgaccugggaggaccacugccaguucagccgccccucccccaucggcuaccuggggcugcucagccagcggacccgcgacaucuacaucagccggcgccugcugggcaccuucacguggacccucuccgacagcgagggcaacgaggcccccgggggcuacugccugacccgguggaugcugaucgaggccgagcucaagugcuucgggaacaccgccguggcgaagugcaacgagaagcacgacgaggaguucugcgacaugcugcgccuguucgacuucaacaagcaggccaucaagcggcucaagacgcccgcccagauguccauccagcugaucaacaaggccgugaacgcccugaucaacgaccagcucaucaugaagaaccaccuccgcgacaucaugggcauccccuacugcaacuacagccgguacugcuaccugaaccacaccgucaccgggaagaccucccugccccgcugcugccuggugagcaacggcuccuaccugaacgagacgcacuucagcgacgacaucgagcagcaggcggacaacaugaucaccgagaugcuccagaaggaguacauggaccggcagggcaagaccccgcuggggcugguggaccucuucgucuucuccaccagcuucuaccugaucuccaucuuccugcaccuggugaagaucccgacgcaccgccacaucgugggcaagcccugccccaagccccaccggcucaaccacauggggaucugcagcugcggccuguacaagcacccggggguccccgugaaguggaagcgcugaggacuagucccuguucccagagcccacuuuuuuuucuuuuuuugaaauaaaauagccugucuuucagaucucaaaggcucuuuucagagccaccaaaaaaaaaaaaaaaaaaaaaaaaaaaaaaaaaaaaaaaaaaaaaaaaaaaaaaaaaaaaaaaaaaaaaaaaaaaaaaaaaaaaaaaaaaaaaaaaaaaaa

SEQ ID NO: 31720 - RNA, 1745 nt, Artificial Sequence
  mRNA product Design a-1 (hSL-A100) comprising derived and/or modified sequence from LASV(GA391;Clade III)__CAA36645__GPCmut7 (opt1)
aggagagucccgcagucggcguccagcggcucugcuuguucgugugugugucguugcaggccuuauucaagcuuaccaugggccagaucgugaccuucuuccaggaggucccccacgugaucgaggaggugaugaacaucguccugaucgcccucagcauccuggccauccugaaggggcucuacaacguggcgaccugcggccugaucgggcuggugacguuccuccugcuguccggccgcagcugcucccucaucuacaaggggaccuacgagcugcagacccuggagcucaacauggagacccugaacaugacgaugccgcugagcugcaccaagaacaacucccaccacuacauccgggucggcaacgagaccggccucgagcugacccugacgaacaccagcauccucaaccacaaguucugcaaccuguccgacgcccacaagcgcaaccuguacgaccacagccucauguccaucaucagcaccuuccaccuguccauccccaacuucaaccaguacgaggccaugagcugcgacuucaacgggggcaagaucaccgugcaguacaaccugucccacagcuucgccguggacgccgcggggcacugcggcacgcucgccaacgggguccugcagaccuucaugcggauggccuggggcggcuccuacaucgcccuggacagcgggcgcggcaacugggacugcaucaugaccuccuaccaguaccucaucauccagaacaccacgugggacgaccacugccaguucagccggcccucccccaucggguaccugggccugcucagccagcgcacccgggacaucuacaucagccgccggcugcugggcaccuucaccuggacgcucuccgacagcgaggggaacgagaccccgggcggguacugccugacccgcuggaugcugaucgaggcggagcucaagugcuucggcaacaccgccguggccaagugcaacgagaagcacgacgaggaguucugcgacaugcugcggcuguucgacuucaacaagcaggccauccgccggcucaagacgcccgcccagauguccauccagcugaucaacaaggcggugaacgcccugaucaacgaccagcucaucaugaagaaccaccuccgcgacaucauggggauccccuacugcaacuacagccgguacugcuaccugaaccacaccuccaccggcaagaccagccugccccgcugcugccugaucuccaacggcagcuaccugaacgagacgaaguucuccgacgacaucgagcagcaggccgacaacaugaucaccgagaugcuccagaaggaguacaucgaccggcaggggaagacgccccugggccuggucgaccuguucguguucagcaccuccuucuaccucaucagcaucuuccugcaccuggugaagaucccgacccaccgccacaucgucgggaagcccugccccaagccccaccggcucaaccacaugggcaucugcuccugcgggcuguacaagcagccgggcgugcccgugcgcuggaagcggugaggacuagucccuguucccagagcccacuuuuuuuucuuuuuuugaaauaaaauagccugucuuucagaucucaaaggcucuuuucagagccaccaaaaaaaaaaaaaaaaaaaaaaaaaaaaaaaaaaaaaaaaaaaaaaaaaaaaaaaaaaaaaaaaaaaaaaaaaaaaaaaaaaaaaaaaaaaaaaaaaaaaa

SEQ ID NO: 31721 - RNA, 1748 nt, Artificial Sequence
  mRNA product Design a-1 (hSL-A100) comprising derived and/or modified sequence from LASV(AV;Clade V)__CCA30314__GPCmut7 (opt1)
aggagagucccgcagucggcguccagcggcucugcuuguucgugugugugucguugcaggccuuauucaagcuuaccaugggccagaucgugaccuucuuccaggaggucccccacgugaucgaggaggugaugaacaucguccugaucgcccucagcauccuggccgugcugaaggggcucuacaacaucgcgaccugcggccugaucgggcugaucacguuccuccugcugugcggccgcuccugcagcuccaaccucuacaaggggguguacgagcugcagagccuggaccucaacauggagacccugaacaugaccaugccgcuguccugcaccaagaacaacagccaccacuacauccgggucggcaacgacacgggccucgagcugacccugaccaacaccuccauccucaaccacaaguucugcaaccugagcgacgcccacaagaaggaccuguacgaccacgcccucauguccaucaucagcacguuccaccuguccauccccaacuucaaccaguacgaggccaugagcugcgacuucaacgggggcaagaucuccgugcaguacaaccugagccacuccuacgccaucgacgcggccaaccacugcgggaccguggccaacggcauccuccagaccuucaugcgcauggccuggggcgggagcuacaucgcgcuggacuccggccgggggaacugggacugcaucaugaccagcuaccaguaccugaucauccagaacacgaccugggagaaccacugccaguucucccgccccagccccaucggcuaccucgggcugcugagccagcggacccgcgacaucuacaucucccggcgccuccugggcaccuucacguggacccugagcgacuccgagggcaacgccacccccgggggcuacugccucacccgguggaugcugaucgaggccgagcugaagugcuucgggaacacggccgucgccaagugcaacgagaagcacgacgaggaguucugcgacaugcuccgccuguucgacuucaacaagcaggcgaucagccggcugaagucccccgcccagaugagcauccagcucaucaacaaggccgugaacgcccugaucaacgaccagcugaucaugaagaaccaccuccgcgacaucaugggcauccccuacugcaacuacuccaaguacugcuaccugaaccacaccaucaccgggaagaccagccugcccaagugcugccucguguccaacggcagcuaccugaacgagacgcacuucuccgacgacaucgagcagcaggccgacaacaugaucaccgagaugcugcagaaggaguacauggagcggcagggcaagaccccgcucgggcuggucgaccuguucguguucagcaccuccuucuaccugaucagcaucuuccuccgccuggugaagaucccgacgcaccggcacaucgucggcaagcccugccccaagccccaccgccugaaccacauggggaucugcuccugcggccucuacaagcagccgggggugcccgugcgguggaagcgcugaggacuagucccuguucccagagcccacuuuuuuuucuuuuuuugaaauaaaauagccugucuuucagaucucaaaggcucuuuucagagccaccaaaaaaaaaaaaaaaaaaaaaaaaaaaaaaaaaaaaaaaaaaaaaaaaaaaaaaaaaaaaaaaaaaaaaaaaaaaaaaaaaaaaaaaaaaaaaaaaaaaaa

SEQ ID NO: 31722 - RNA, 1745 nt, Artificial Sequence
  mRNA product Design a-1 (hSL-A100) comprising derived and/or modified sequence from LASV(Togo/2016/7082;Clade VI)__AMR44577__GPCmut7 (opt1)
aggagagucccgcagucggcguccagcggcucugcuuguucgugugugugucguugcaggccuuauucaagcuuaccaugggccagaucaucaccuucuuccaggaggugccccacgucaucgaggaggugaugaacaucgugcugaucgcccucagccugcuggccauccucaagggggucuacaacguggcgaccugcggcaucaucgggcuggugacguuccuguuccucugcggccgcuccugcagccugaucuacaagggguccuacgagcugcagacccucgagcugaacauggagacccugaacaugaccaugccgcucagcugcacgaagaacuccagccaccacuacauccgggucggcaacgagaccggccuggagcugacccucaccaacacguccaucaucaaccacaaguucugcaaccugagcgacgcccacaagcgcaaccuguacgaccacgcccucauguccauccugagcaccuuccaccuguccauccccaacuucaaccaguacgaggccaugagcugcgacuucaacgggggcaagaucuccgugcaguacaaccucagccacgccuacgcgguggacgccgccgagcacugcgggaccgucgccaacggcgugcugcagaccuucaugcggauggcguggggcggguccuacaucgcccuggacagcggccgcgggaacugggacugcaucaugacguccuaccaguaccucaucauccagaacaccaccugggaggaccacugccaguucagccggcccucccccaucggcuaccuggggcugcucagccagcgcacccgggacaucuacaucagccgccggcugcugggcacguucaccuggacccucuccgacagcgagggcaacgagacccccgggggcuacugccugacgcgcuggaugcugaucgaggccgagcucaagugcuucgggaacaccgccguggccaagugcaacgagaagcacgacgaggaguucugcgacaugcugcggcuguucgacuucaacaagcaggcgauccagcgccucaagucccccgcccagaugagcauccagcugaucaacaaggccgucaacgcccugaucaacgaccagcucaucaugaagaaccaccuccgggacaugaugggcauccccuacugcaacuacuccaaguacugcuaccugaaccacaccagcuccgggcgcaccagccugcccaagugcugccugguguccaacggcagcuaccugaacgagacgcacuucuccgacgacaucgagcagcaggccgacaacaugaucaccgagaugcuccagaaggaguacaucgaccggcagggcaagaccccgcuggggcugguggaccucuucgucuucagcaccuccuucuaccugaucagcaucuuccugcaccugaucaagaucccgacgcaccgccacaucgugggcaagcccugccccaagccccaccggcucaaccacauggggaucugcuccugcggccuguacaagcagccgggggugcccacccgcuggaagcggugaggacuagucccuguucccagagcccacuuuuuuuucuuuuuuugaaauaaaauagccugucuuucagaucucaaaggcucuuuucagagccaccaaaaaaaaaaaaaaaaaaaaaaaaaaaaaaaaaaaaaaaaaaaaaaaaaaaaaaaaaaaaaaaaaaaaaaaaaaaaaaaaaaaaaaaaaaaaaaaaaaaaa

SEQ ID NO: 31723 - RNA, 1745 nt, Artificial Sequence
  mRNA product Design a-1 (hSL-A100) comprising derived and/or modified sequence from LASV(KAK-428;Clade n.d. (VII))__ANH09740__GPCmut7 (opt1)
aggagagucccgcagucggcguccagcggcucugcuuguucgugugugugucguugcaggccuuauucaagcuuaccaugggccagaucgugaccuucuuccaggaggucccccacgugaucgaggaggugaugaacaucguccugaucgcccucagccugcuggccauccucaaggggcuguacaacuucgcgaccugcggcgugaucgggcugaucacguuccuccugcugugcggccgcuccugcagcgccaccuacaaggggcaguacgagcuccagacccuggagcugaacauggagucccucaacaugaccaugccgcugagcugcacgaagaacaacucccaccacuacauccgggccggcaacaacaccggccuggagcucacccugaccaacacgagcaucaucucccacaaguucugcaaccugagcgacgcccacaagaagaaccucuacgaccacacccugauguccaucaucaccaccuuccaccugagcauccccaacuucaaccaguacgaggccauguccugcgacuucaacgggggcaagaucagcauccaguacaaccucucccacagcuacgcgggggacgccgcccagcacugcggcacgguggccaacgggguccugcagaccuucaugcgcauggcguggggcggcuccuaccuggcccucgacagcgggcggcgcggcugggacugcaucaucuccagcuaccaguaccugaucauccagaacaccaccugggacgaccacugccaguucucccggcccagccccaucggguaccugggcuucgugagccagaagacgcgcgacaucuacaucucccggcgccuccugggcaccuucaccuggacccugagcgacuccgaggggcacgacaugccgggcggguacugccucacgcgguggaugcugaucgaggccgaccugaagugcuucggcaacaccgccguggccaagugcaacgagaagcacgacgaggaguucugcgacauguggcgccucuucgacuucaacaagcaggcgauccagcggcugaaggcccccgcccagaugaacauccagcugaucaacaaggccgucaacgcccucaucaacgaccagcugaugaugaagaaccaccuccgcgacaucauggggauccccuacugcaacuacagcaaguucugcuaccugaacaacaccaccacgggccggaccucccugccccgcugcugccugaucagcaacggcuccuaccucaacgagacccacuucagcgacgacaucgagcagcaggcggacaacaugaucaccgagaugcugcagaaggaguacauggaccggcaggggaagacgccccugggccucguggaccuguucguguucuccaccagcuucuaccugaucaccaucuuccuccaccuggucaagaucccgacccaccgccacaucguggggaagcccugccccaagccccaccggcugaaccacaugggcaucugcuccugcgggcuguacaagcagccgggcgugcccguccgcuggaagcggugaggacuagucccuguucccagagcccacuuuuuuuucuuuuuuugaaauaaaauagccugucuuucagaucucaaaggcucuuuucagagccaccaaaaaaaaaaaaaaaaaaaaaaaaaaaaaaaaaaaaaaaaaaaaaaaaaaaaaaaaaaaaaaaaaaaaaaaaaaaaaaaaaaaaaaaaaaaaaaaaaaaaa

SEQ ID NO: 31724 - RNA, 1745 nt, Artificial Sequence; identical to SEQ ID NO: 31718
  mRNA product Design a-1 (hSL-A100) comprising derived and/or modified sequence from LASV(Pinneo-NIG-1969;Clade I)__AIT17836__GPCmut7 (opt1)

SEQ ID NO: 31725 - RNA, 1745 nt, Artificial Sequence
  mRNA product Design a-1 (hSL-A100) comprising derived and/or modified sequence from LASV(ISTH0009-NIG-2011;Clade II)__AIT17404__GPCmut7 (opt1)
aggagagucccgcagucggcguccagcggcucugcuuguucgugugugugucguugcaggccuuauucaagcuuaccaugggccagaucaucaccuucuuccaggaggugccccacgucaucgaggaggugaugaacaucgugcugaucgcccucagccugcuggccauccucaaggggaucuacaacgucgcgaccugcggccuguucgggcugguguccuuccuccugcugugcggccgcagcugcuccacgaccuacaaggggguguacgagcuccagacccuggagcuggacauggccagccucaacaugaccaugccgcuguccugcacgaagaacaacagccaccacuacaucauggucggcaacgagaccggccuggagcucacccugaccaacacguccaucaucaaccacaaguucugcaaccugagcgacgcccacaagaagaaccucuacgaccacgcccugauguccaucaucagcaccuuccaccuguccauccccaacuucaaccaguacgaggccaugagcugcgacuucaacgggggcaagaucuccgugcaguacaaccucagccacgcguacgccguggacgccgccaaccacugcgggaccaucgcgaacggcguccugcagaccuucaugcggauggccuggggcggguccuacaucgcccuggacagcggcaagggguccugggacugcaucaugacgagcuaccaguaccucaucauccagaacaccaccugggaggaccacugccaguucucccgccccagccccaucggcuaccuggggcugcucagccagcggacccgcgacaucuacaucucccggcgccugcugggcacguucaccuggacccucagcgacuccgagggcaacgagacccccgggggcuacugccugacgcgguggaugcugaucgaggccgagcucaagugcuucgggaacaccgccguggcgaagugcaacgagaagcacgacgaggaguucugcgacaugcugcgccuguucgacuucaacaagcaggccauccggcgccucaagacccccgcccagaugagcauccagcugaucaacaaggccgugaacgcccugaucaacgaccagcucaucaugaagaaccaccuccgggacaucaugggcaucccguacugcaacuacuccaaguacugcuaccugaaccacaccgucacggggaagaccagccugccccgcugcugccugguguccaacggcagcuaccugaacgagacccacuucuccgacgacaucgagcagcaggcggacaacaugaucaccgagcuccugcagaaggaguacauggaccggcagggcaagacgccccuggggcucguggaccuguucgucuucagcaccuccuucuaccugaucagcaucuuccugcaccucaucaagaucccgacccaccgccacaucaccggcaagcccugccccaagccccaccggcugaaccacauggggaucugcuccugcggccuguacaagcacccgggggugcccgugaaguggaagcgcugaggacuagucccuguucccagagcccacuuuuuuuucuuuuuuugaaauaaaauagccugucuuucagaucucaaaggcucuuuucagagccaccaaaaaaaaaaaaaaaaaaaaaaaaaaaaaaaaaaaaaaaaaaaaaaaaaaaaaaaaaaaaaaaaaaaaaaaaaaaaaaaaaaaaaaaaaaaaaaaaaaaaa

SEQ ID NO: 31726 - RNA, 1745 nt, Artificial Sequence
  mRNA product Design a-1 (hSL-A100) comprising derived and/or modified sequence from LASV(ISTH2010-NIG-2012;Clade II)__AIT17482__GPCmut7 (opt1)
aggagagucccgcagucggcguccagcggcucugcuuguucgugugugugucguugcaggccuuauucaagcuuaccaugggccagaucaucaccuucuuccaggaggugccccacgucaucgaggaggugaugaacaucgugcugaucgcccucagccugcuggccauccucaaggggaucuacaacgucgcgaccugcggccuguucgggcugguguccuuccuccugcugugcggccgcagcugcuccacgaccuacaaggggguguacgagcuccagacccuggagcuggacauggccagccucaacaugaccaugccgcuguccugcacgaagaacaacagccaccacuacaucauggucggcaacgagaccggccuggagcucacccugaccaacacguccaucaucaaccacaaguucugcaaccugagcgacgcccacaagaagaaccucuacgaccacgcccugauguccaucaucagcaccuuccaccuguccauccccaacuucaaccaguacgaggccaugagcugcgacuucaacgggggcaagaucuccgugcaguacaaccucagccacgcguacgccguggacgccgccaaccacugcgggaccaucgcgaacggcguccugcagaccuucaugcggauggccuggggcggguccuacaucgcccuggacagcggcaagggguccugggacugcaucaugacgagcuaccaguaccucaucauccagaacaucaccugggaggaccacugccaguucucccgccccagccccaucggcuaccuggggcugcucagccagcggacccgcgacaucuacaucucccggcgccugcugggcaccuucacguggacccucagcgacuccgagggcaacgagacccccgggggcuacugccugacccgguggaugcugaucgaggccgagcucaagugcuucgggaacacggccguggcgaagugcaacgagaagcacgacgaggaguucugcgacaugcugcgccuguucgacuucaacaagcaggccauccggcgccucaagacccccgcccagaugagcauccagcugaucaacaaggccgugaacgcccugaucaacgaccagcucaucaugaagaaccaccuccgggacaucaugggcauccccuacugcaacuacuccaaguacugcuaccugaaccacaccgucaccgggaagacgagccugccccgcugcugccugguguccaacggcagcuaccugaacgagacccacuucuccgacgacaucgagcagcaggcggacaacaugaucaccgagcuccugcagaaggaguacaucgaccggcagggcaagaccccgcuggggcucguggaccuguucgucuucagcacguccuucuaccugaucagcaucuuccugcaccucgugaagaucccgacccaccgccacguggucggcaagcccugccccaagccccaccggcugaaccacauggggaucugcuccugcggccuguacaagcacccgggggugcccgugaaguggaagcgcugaggacuagucccuguucccagagcccacuuuuuuuucuuuuuuugaaauaaaauagccugucuuucagaucucaaaggcucuuuucagagccaccaaaaaaaaaaaaaaaaaaaaaaaaaaaaaaaaaaaaaaaaaaaaaaaaaaaaaaaaaaaaaaaaaaaaaaaaaaaaaaaaaaaaaaaaaaaaaaaaaaaaa

SEQ ID NO: 31727 - RNA, 1745 nt, Artificial Sequence
  mRNA product Design a-1 (hSL-A100) comprising derived and/or modified sequence from LASV(Lassa virus/H.sapiens-wt/NGA/2015/ISTH_0543;Clade II)__AVO03639__GPCmut7 (opt1)
aggagagucccgcagucggcguccagcggcucugcuuguucgugugugugucguugcaggccuuauucaagcuuaccaugggccagaucaucaccuucuuccaggaggugccccacgucaucgaggaggugaugaacaucgugcugaucgcccucagccugcuggccauccucaaggggaucuacaacgucgcgaccugcggccuguucgggcugguguccuuccuccugcugugcggccgcagcugcuccacgaccuacaaggggguguacgagcuccagacccuggagcuggacauggccaaccucaacaugaccaugccgcugagcugcacgaagaacaacucccaccacuacaucauggucggcaacgagaccggccuggagcucacccugaccaacacgagcaucaucaaccacaaguucugcaaccuguccgacgcccacaagaagaaccucuacgaccacgcccugaugagcaucaucuccaccuuccaccugagcauccccaacuucaaccaguacgaggccauguccugcgacuucaacgggggcaagaucagcgugcaguacaaccucucccacaccuacgcgguggacgccgccaaccacugcgggaccaucgccaacggcguccugcagacguucaugcggauggcguggggcgggagcuacaucgcccuggacuccggcaaggggagcugggacugcaucaugaccuccuaccaguaccucgugauccagaacaccaccugggaggaccacugccaguucagccgccccucccccaucggcuaccuggggcugcucagccagcggacgcgcgacaucuacaucagccggcgccugcugggcaccuucaccuggacccucuccgacagcgagggcaacgagacgcccgggggcuacugccugacccgguggaugcugaucgaggccgagcucaagugcuucgggaacaccgccguggccaagugcaacgagaagcacgacgaggaguucugcgacaugcugcgccuguucgacuucaacaagcaggcgauccggcgccucaagacccccgcccagauguccauccagcugaucaacaaggccgucaacgcccugaucaacgaccagcucaucaugaagaaccaccuccgggacaucaugggcauccccuacugcaacuacagcaaguacugcuaccugaaccacacggugaccgggaagaccucccugccccgcugcugccuggugagcaacggcuccuaccugaacgagacccacuucagcgacgacaucgagcagcaggccgacaacaugaucacggagcuccugcagaaggaguacaucgaccggcagggcaagaccccgcuggggcucgucgaccuguucguguucuccaccagcuucuaccugaucuccaucuuccugcaccucgugaagaucccgacccaccgccacaucacgggcaagcccugccccaagccccaccggcugaaccacauggggaucugcagcugcggccuguacaagcacccggggguccccgugaaguggaagcgcugaggacuagucccuguucccagagcccacuuuuuuuucuuuuuuugaaauaaaauagccugucuuucagaucucaaaggcucuuuucagagccaccaaaaaaaaaaaaaaaaaaaaaaaaaaaaaaaaaaaaaaaaaaaaaaaaaaaaaaaaaaaaaaaaaaaaaaaaaaaaaaaaaaaaaaaaaaaaaaaaaaaaa

SEQ ID NO: 31728 - RNA, 1745 nt, Artificial Sequence
  mRNA product Design a-1 (hSL-A100) comprising derived and/or modified sequence from LASV(Lassa virus/H.sapiens-wt/NGA/2016/ISTH_0009;Clade II)__AVO03571__GPCmut7 (opt1)
aggagagucccgcagucggcguccagcggcucugcuuguucgugugugugucguugcaggccuuauucaagcuuaccaugggccagaucaucaccuucuuccaggaggugccccacgucaucgaggaggugaugaacaucgugcugaucgcccucagccugcuggccauccucaaggggaucuacaacgucgcgaccugcggccugcuggggcucguguccuuccugcugcucugcggccgcagcugcuccacgaccuacaaggggguguacgagcugcagacccuggagcucgacauggccagccugaacaugaccaugccgcuguccugcacgaagaacaacagccaccacuacaucauggucggcaacgagaccggccucgagcugacccugaccaacacguccaucaucaaccacaaguucugcaaccucagcgacgcccacaagaagaaccuguacgaccacgcccugauguccaucaucagcaccuuccaccucuccauccccaacuucaaccaguacgaggccaugagcugcgacuucaacgggggccggaucuccgugcaguacaaccugagccacuccuacgcgguggacgccgccaaccacugcgggaccaucgccaacggcguccugcagaccuucaugcgcauggcguggggcgggagcuacaucgcccucgacuccggcaaggggagcugggacugcaucaugacguccuaccaguaccugaucauccagaacaccaccugggaggaccacugccaguucagccggcccagccccaucggcuaccuggggcuccugucccagcgcacccgggacaucuacaucagccgccggcugcucggcacguucaccuggacccuguccgacagcgagggcaacgagacccccgggggcuacugccugacgcgcuggaugcucaucgaggccgagcugaagugcuucgggaacaccgccguggccaagugcaacgagaagcacgacgaggaguucugcgacaugcugcggcuguucgacuucaacaagcaggcgauccgccggcugaagacccccgcccagauguccauccagcugaucaacaaggccgugaacgcccucaucaacgaccagcugaucaugaagaaccaccuccgcgacaucaugggcaucccguacugcaacuacagcaaguacugcuaccucaaccacaccgucacggggaagaccucccugccccggugcugccuggugagcaacggcuccuaccucaacgagacccacuucagcgacgacaucgagcagcaggccgacaacaugaucaccgagcugcugcagaaggaguacaucgaccgccagggcaagacgccccucgggcugguggaccuguucgucuucuccaccagcuucuaccugaucuccaucuuccuccaccuggugaagaucccgacccaccggcacaucaccggcaagcccugccccaagccccaccgccugaaccacauggggaucugcagcugcggccucuacaaccacccgggggugcccgucaaguggaagcggugaggacuagucccuguucccagagcccacuuuuuuuucuuuuuuugaaauaaaauagccugucuuucagaucucaaaggcucuuuucagagccaccaaaaaaaaaaaaaaaaaaaaaaaaaaaaaaaaaaaaaaaaaaaaaaaaaaaaaaaaaaaaaaaaaaaaaaaaaaaaaaaaaaaaaaaaaaaaaaaaaaaaa

SEQ ID NO: 31729 - RNA, 1745 nt, Artificial Sequence
  mRNA product Design a-1 (hSL-A100) comprising derived and/or modified sequence from LASV(Lassa virus/H.sapiens-wt/NGA/2016/ISTH_0017;Clade II)__AVO03567__GPCmut7 (opt1)
aggagagucccgcagucggcguccagcggcucugcuuguucgugugugugucguugcaggccuuauucaagcuuaccaugggccagaucaucaccuucuuccaggaggugccccacgucaucgaggaggugaugaacaucgugcugaucgcccucagccugcuggccauccucaaggggaucuacaacgucgcgaccugcggccuguucgggcugguguccuuccuccugcugugcggccgcagcugcuccacgaccuacaaggggguguacgagcuccagacccuggagcuggacauggccagccucaacaugaccaugccgcuguccugcacgaagaacaacagccaccacuacaucauggucggcaacgagaccggccuggagcucacccugaccaacacguccaucaucaaccacaaguucugcaaccugagcgacgcccacaagaagaaccucuacgaccacgcccugauguccaucaucagcaccuuccaccuguccauccccaacuucaaccaguacgaggccaugagcugcgacuucaacgggggcaagaucuccgugcaguacaaccucagccacaccuacgcgaucgacgccgccaaccacugcgggaccaucgccaacggcgugcugcagacguucaugcggauggcguggggcggguccuacaucgcccuggacagcggcaagggguccugggacugcaucaugaccagcuaccaguaccucaucauccagaacaccaccugggaggaccacugccaguucucccgccccagccccaucggcuaccuggggcugcucagccagcggacgcgcgacaucuacaucucccggcgccugcugggcaccuucaccuggacccucagcgacuccgagggcaacgagacgcccgggggcuacugccugacccgguggaugcugaucgaggccgagcucaagugcuucgggaacaccgccgucgccaagugcaacgagaagcacgacgaggaguucugcgacaugcugcgccuguucgacuucaacaagcaggcgauccggcgccucaagacccccgcccagaugagcauccagcugaucaacaaggccgugaacgcccugaucaacgaccagcucaucaugaagaaccaccuccgggacaucaugggcauccccuacugcaacuacuccaaguacugcuaccugaaccacacggugaccgggaagaccagccugccccgcugcugccuggucuccaacggcagcuaccugaacgagacccacuucuccgacgacaucgagcagcaggccgacaacaugaucacggagcuccugcagaaggaguacauggaccggcagggcaagaccccgcuggggcucguggaccuguucguguucagcaccuccuucuaccugaucagcaucuuccugcaccucguccgcaucccgacccaccggcacgugaucggcaagcccugccccaagccccaccgccugaaccacauggggaucugcuccugcggccuguacaagcacccgggggugcccgucaaguggaagcggugaggacuagucccuguucccagagcccacuuuuuuuucuuuuuuugaaauaaaauagccugucuuucagaucucaaaggcucuuuucagagccaccaaaaaaaaaaaaaaaaaaaaaaaaaaaaaaaaaaaaaaaaaaaaaaaaaaaaaaaaaaaaaaaaaaaaaaaaaaaaaaaaaaaaaaaaaaaaaaaaaaaaa

SEQ ID NO: 31730 - RNA, 1745 nt, Artificial Sequence
  mRNA product Design a-1 (hSL-A100) comprising derived and/or modified sequence from LASV(Lassa virus/H.sapiens-wt/NGA/2018/ISTH_0959;Clade II)__AVV65099__GPCmut7 (opt1)
aggagagucccgcagucggcguccagcggcucugcuuguucgugugugugucguugcaggccuuauucaagcuuaccaugggccagaucaucaccuucuuccaggaggugccccacgucaucgaggaggugaugaacaucgugcugaucgcccucagccugcuggccauccucaaggggaucuacaacgucgugaccugcggccuguucgggcugguguccuuccuccugcugugcggccgcagcugcuccacgaccuacaagggggucuacgagcuccagacccuggagcuggacauggcgagccucaacaugaccaugccgcuguccugcacgaagaacaacagccaccacuacaucauggugggcaacgagaccggccuggagcucacccugaccaacacguccaucaucaaccacaaguucugcaaccugagcgacgcccacaagaagaaccucuacgaccacgcccugauguccaucaucagcaccuuccaccuguccauccccaacuucaaccaguacgaggccaugagcugcgacuucaacgggggcaagaucuccgugcaguacaaccucagccacgccuacgcgaucgacgccgccaaccacugcgggaccaucgccaacggcguccugcagaccuucaugcggauggcguggggcggguccuacaucgcccuggacagcggcaagggguccugggacugcaucaugacgagcuaccaguaccucaucauccagaacaccaccugggaggaccacugccaguucucccgccccagccccaucggcuaccuggggcugcucagccagcggacccgcgacaucuacaucucccggcgccugcugggcacguucaccuggacccucagcgacuccgagggcaacgagacccccgggggcuacugccugacgcgguggaugcugaucgaggccgagcucaagugcuucgggaacaccgccguggccaagugcaacgagaagcacgacgaggaguucugcgacaugcugcgccuguucgacuucaacaagcaggcgauccggcgccucaagacccccgcccagaugagcauccagcugaucaacaaggccgugaacgcccugaucaacgaccagcucaucaugaagaaccaccuccgggacaucaugggcaucccguacugcaacuacuccaaguacugcuaccugaaccacaccgucacggggaagaccagccugccccgcugcugccugguguccaacggcagcuaccugaacgagacccacuucuccgacgacaucgagcagcaggccgacaacaugaucaccgagcuccugcagaaggaguacaucgaccggcagggcaagacgccccuggggcucguggaccuguucgucuucagcaccuccuucuaccugaucagcaucuuccugcaccucgugaagaucccgacccaccgccacgugaucggcaagcccugccccaagccccaccggcugaaccacauggggaucugcuccugcggccuguacaagcacccggggguccccgugaaguggaagcgcugaggacuagucccuguucccagagcccacuuuuuuuucuuuuuuugaaauaaaauagccugucuuucagaucucaaaggcucuuuucagagccaccaaaaaaaaaaaaaaaaaaaaaaaaaaaaaaaaaaaaaaaaaaaaaaaaaaaaaaaaaaaaaaaaaaaaaaaaaaaaaaaaaaaaaaaaaaaaaaaaaaaaa

SEQ ID NO: 31731 - RNA, 1745 nt, Artificial Sequence
  mRNA product Design a-1 (hSL-A100) comprising derived and/or modified sequence from LASV(LASV003-NIG-2008;Clade II)__AIT17580__GPCmut7 (opt1)
aggagagucccgcagucggcguccagcggcucugcuuguucgugugugugucguugcaggccuuauucaagcuuaccaugggccagaucaucaccuucuuccaggaggugccccacgucaucgaggaggugaugaacaucgugcugaucgcccucagccugcuggccauccucaaggggaucuacaacgucgcgaccugcggccuguucgggcugguguccuuccuccugcugugcggccgcagcugcuccacgaccuacaaggggguguacgagcuccagacccuggagcuggacauggccagccucaacaugaccaugccgcuguccugcacgaagaacaacagccaccacuacaucauggucggcaacgagaccggccuggagcucacccugaccaacacguccaucaucaaccacaaguucugcaaccugagcgacgcccacaagaagaaccucuacgaccacgcccugauguccaucaucagcaccuuccaccuguccauccccaacuucaaccaguacgaggccaugagcugcgacuucaacgggggcaagaucuccgugcaguacaaccucagccacaccuacgcgguggacgccgccaaccacugcgggaccaucgccaacggcguccugcagacguucaugcggauggcguggggcggguccuacaucgcccuggacagcggcaagggguccugggacugcaucaugaccagcuaccaguaccucaucauccagaacaccaccugggaggaccacugccaguucucccgccccagccccaucggcuaccuggggcugcucagccagcggacgcgcgacaucuacaucucccggcgccugcugggcaccuucaccuggacccucagcgacuccgagagcaacgagacgccgggcggguacugccugacccgguggaugcugaucgaggccgagcucaagugcuucggcaacaccgccguggccaagugcaacgagaagcacgacgaggaguucugcgacaugcugcgccuguucgacuucaacaagcaggcgauccggcgccucaaggcccccgcccagauguccauccagcugaucaacaaggccgugaacgcccugaucaacgaccagcucaucaugaagaaccaccuccgggacaucauggggauccccuacugcaacuacagcaaguacugcuaccugaaccacaccgucacgggccgcaccucccugccccggugcugccuggugagcaacggguccuaccugaacgagacccacuucagcgacgacaucgagcagcaggcggacaacaugaucaccgagcuccugcagaaggaguacauggaccgccagggcaagacgccccugggccucguggaccuguucgucuucuccaccagcuucuaccugaucuccaucuuccugcaccucgugaagaucccgacccaccggcacgugaucgggaagcccugccccaagccccaccgccugaaccacaugggcaucugcagcugcgggcuguacaagcacccgggcguccccgugaaguggaagcggugaggacuagucccuguucccagagcccacuuuuuuuucuuuuuuugaaauaaaauagccugucuuucagaucucaaaggcucuuuucagagccaccaaaaaaaaaaaaaaaaaaaaaaaaaaaaaaaaaaaaaaaaaaaaaaaaaaaaaaaaaaaaaaaaaaaaaaaaaaaaaaaaaaaaaaaaaaaaaaaaaaaaa

SEQ ID NO: 31732 - RNA, 1745 nt, Artificial Sequence
  mRNA product Design a-1 (hSL-A100) comprising derived and/or modified sequence from LASV(LASV035-NIG-2009;Clade II)__AIT17588__GPCmut7 (opt1)
aggagagucccgcagucggcguccagcggcucugcuuguucgugugugugucguugcaggccuuauucaagcuuaccaugggccagaucaucaccuucuuccaggaggugccccacgucaucgaggaggugaugaacaucgugcugaucgcccucagccugcuggccauccucaaggggaucuacaacgucgcgaccugcggccuguucgggcugguguccuuccuccugcugugcggccgcagcugcuccacgaccuacaaggggguguacgagcuccagacccuggagcuggacauggccagccucaacaugaccaugccgcuguccugcacgaagaacaacagccaccacuacaucauggucggcaacgagaccggccuggagcucacccugaccaacacguccaucaucaaccacaaguucugcaaccugagcgacgcccacaagaagaaccucuacgaccacgcccugauguccaucaucagcaccuuccaccuguccauccccaacuucaaccaguacgaggccaugagcugcgacuucaacgggggcaagaucuccgugcaguacaaccucagccacgcguacgccguggacgccgccaaccacugcgggaccaucgcgaacggcguccugcagaccuucaugcggauggccuggggcggguccuacaucgcccuggacagcggcaagggguccugggacugcaucaugacgagcuaccaguaccucaucauccagaacaccaccugggaggaccacugccaguucucccgccccagccccaucggcuaccuggggcugcucagccagcggacccgcgacaucuacaucucccggcgccugcugggcacguucaccuggacccucagcgacuccgagggcaacgagacccccgggggcuacugccugacgcgguggaugcugaucgaggccgagcucaagugcuucgggaacaccgccguggcgaagugcaacgagaagcacgacgaggaguucugcgacaugcugcgccuguucgacuucaacaagcaggccauccggcgccucaaggcccccgcccagaugagcauccagcugaucaacaaggccgugaacgcgcugaucaacgaccagcucaucaugaagaaccaccuccgggacaucaugggcauccccuacugcaacuacuccaaguacugcuaccugaaccacaccgucaccgggaagacgagccugccccgcugcugccugguguccaacggcagcuaccugaacgagacccacuucuccgacgacaucgagcagcaggccgacaacaugaucaccgagcuccugcagaaggaguacaucgaccggcagggcaagaccccgcuggggcucguggaccuguucgucuucagcacguccuucuaccugaucagcaucuuccugcaccucgugaagaucccgacccaccgccacgugaucggcaagcccugccccaagccccaccggcugaaccacauggggaucugcuccugcggccuguacaagcacccggggguccccgugaaguggaagcgcugaggacuagucccuguucccagagcccacuuuuuuuucuuuuuuugaaauaaaauagccugucuuucagaucucaaaggcucuuuucagagccaccaaaaaaaaaaaaaaaaaaaaaaaaaaaaaaaaaaaaaaaaaaaaaaaaaaaaaaaaaaaaaaaaaaaaaaaaaaaaaaaaaaaaaaaaaaaaaaaaaaaaa

SEQ ID NO: 31733 - RNA, 1745 nt, Artificial Sequence
  mRNA product Design a-1 (hSL-A100) comprising derived and/or modified sequence from LASV(LASV1000-NIG-2009;Clade II)__AIT17782__GPCmut7 (opt1)
aggagagucccgcagucggcguccagcggcucugcuuguucgugugugugucguugcaggccuuauucaagcuuaccaugggccagaucaucaccuucuuccaggaggugccccacgucaucgaggaggugaugaacaucgugcugaucgcccucagccugcuggccauccucaaggggaucuacaacgucgcgaccugcggccuguucgggcugguguccuuccuccugcugugcggccgcagcugcuccacgaccuacaaggggguguacgagcuccagacccuggagcuggacauggccagccucaacaugaccaugccgcuguccugcacgaagaacaacagccaccacuacaucauggucggcaacgagaccggccuggagcucacccugaccaacacguccaucaucaaccacaaguucugcaaccugagcgacgcccacaagaagaaccucuacgaccacgcccugauguccaucaucagcaccuuccaccuguccauccccaacuucaaccaguacgaggccaugagcugcgacuucaacgggggcaagaucuccgugcaguacaaccucagccacaccuacgcgguggacgccgccaaccacugcgggaccaucgccaacggcguccugcagacguucaugcggauggcguggggcggguccuacaucgcccuggacagcggcaagggguccugggacugcaucaugaccagcuaccaguaccucaucauccagaacaccaccugggaggaccacugccaguucucccgccccagccccaucggcuaccuggggcugcucagccagcggacgcgcgacaucuacaucucccggcgccugcugggcaccuucaccuggacccucagcgacuccgagggcaacgagacgcccgggggcuacugccugacccgguggaugcugaucgaggccgagcucaagugcuucgggaacaccgccguggccaagugcaacgagaagcacgacgaggaguucugcgacaugcugcgccuguucgacuucaacaagcaggcgaucaagcggcucaagacccccgcccagaugagcauccagcugaucaacaaggccgugaacgcccugaucaacgaccagcucaucaugaagaaccaccuccgcgacaucaugggcauccccuacugcaacuacuccaaguacugcuaccugaaccacacggucaccgggaagaccagccugccccggugcugccugguguccaacggcagcuaccugaacgagacccacuucuccgacgacaucgagcagcaggccgacaacaugaucacggagcuccugcagaaggaguacaucgaccgccagggcaagaccccgcuggggcucguggaccuguucgucuucagcaccuccuucuaccugaucagcaucuuccugcaccucgugaagaucccgacccaccggcacguggucggcaagcccugccccaagccccaccgccugaaccacauggggaucugcuccugcggccuguacaagcacccgggggugcccgugaaguggaagcggugaggacuagucccuguucccagagcccacuuuuuuuucuuuuuuugaaauaaaauagccugucuuucagaucucaaaggcucuuuucagagccaccaaaaaaaaaaaaaaaaaaaaaaaaaaaaaaaaaaaaaaaaaaaaaaaaaaaaaaaaaaaaaaaaaaaaaaaaaaaaaaaaaaaaaaaaaaaaaaaaaaaaa

SEQ ID NO: 31734 - RNA, 1745 nt, Artificial Sequence
  mRNA product Design a-1 (hSL-A100) comprising derived and/or modified sequence from LASV(LASV221-NIG-2010;Clade II)__AIT17624__GPCmut7 (opt1)
aggagagucccgcagucggcguccagcggcucugcuuguucgugugugugucguugcaggccuuauucaagcuuaccaugggccagaucaucaccuucuuccaggaggugccccacgucaucgaggaggugaugaacaucgugcugaucgcccucagccugcuggccauccucaaggggaucuacaacgucgcgaccugcggccuguucgggcugguguccuuccuccugcugugcggccgcagcugcuccacgaccuacaaggggguguacgagcuccagacccuggagcuggacauggccagccucaacaugaccaugccgcuguccugcacgaagaacaacagccaccacuacaucauggucggcaacgagaccggccuggagcucacccugaccaacacguccaucaucaaccacaaguucugcaaccugagcgacgcccacaagaagaaccucuacgaccacgcccugauguccaucaucagcaccuuccaccuguccauccccaacuucaaccaguacgaggccaugagcugcgacuucaacgggggcaagaucuccgugcaguacaaccucagccacaccuacgcgaucgacgccgccaaccacugcgggaccaucgccaacggcgugcugcagacguucaugcggauggcguggggcggguccuacaucgcccuggacagcggcaagggguccugggacugcaucaugaccagcuaccaguaccucaucauccagaacaccaccugggaggaccacugccaguucucccgccccagccccaucggcuaccuggggcugcucagccagcggacgcgcgacaucuacaucucccggcgccugcugggcaccuucaccuggacccucagcgacuccgagggcaacgagacgcccgggggcuacugccugacccgguggaugcugaucgaggccgagcucaagugcuucgggaacaccgccgucgccaagugcaacgagaagcacgacgaggaguucugcgacaugcugcgccuguucgacuucaacaagcaggcgauccggcgccucaagacccccgcccagaugagcauccagcugaucaacaaggccgugaacgcccugaucaacgaccagcucaucaugaagaaccaccuccgggacaucaugggcauccccuacugcaacuacuccaaguacugcuaccugaaccacacggugaccgggaagaccagccugccccgcugcugccuggucuccaacggcagcuaccugaacgagacccacuucuccgacgacaucgagcagcaggccgacaacaugaucacggagaugcuccagaaggaguacauggaccggcagggcaagaccccgcuggggcugguggaccucuucguguucagcaccuccuucuaccugaucagcaucuuccugcaccuggucaagaucccgacccaccgccacgugaucggcaagcccugccccaagccccaccggcucaaccacauggggaucugcuccugcggccuguacaagcacccgggggugcccgucaaguggaagcgcugaggacuagucccuguucccagagcccacuuuuuuuucuuuuuuugaaauaaaauagccugucuuucagaucucaaaggcucuuuucagagccaccaaaaaaaaaaaaaaaaaaaaaaaaaaaaaaaaaaaaaaaaaaaaaaaaaaaaaaaaaaaaaaaaaaaaaaaaaaaaaaaaaaaaaaaaaaaaaaaaaaaaa

SEQ ID NO: 31735 - RNA, 1745 nt, Artificial Sequence
  mRNA product Design a-1 (hSL-A100) comprising derived and/or modified sequence from LASV(LASV237-NIG-2010;Clade II)__AIT17638__GPCmut7 (opt1)
aggagagucccgcagucggcguccagcggcucugcuuguucgugugugugucguugcaggccuuauucaagcuuaccaugggccagaucaucaccuucuuccaggaggugccccacgucaucgaggaggugaugaacaucgugcugaucgcccucagccugcuggccauccucaaggggaucuacaacgucgcgaccugcggccuguucgggcugguguccuuccuccugcugugcggccgcagcugcuccacgaccuacaaggggguguacgagcuccagacccuggagcuggacauggccagccucaacaugaccaugccgcuguccugcacgaagaacaacagccaccacuacaucauggucggcaacgagaccggccuggagcucacccugaccaacacguccaucaucaaccacaaguucugcaaccugagcgacgcccacaagaaggaccucuacgaccacgcccugauguccaucaucagcaccuuccaccuguccauccccaacuucaaccaguacgaggccaugagcugcgacuucaacgggggcaagaucuccgugcaguacaaccucagccacaccuacgcgguggacgccgccaaccacugcgggaccaucgccaacggcguccugcagacguucaugcggauggcguggggcggguccuacaucgcccuggacagcggcaagggguccugggacugcaucaugaccagcuaccaguaccucaucauccagaacaccaccugggaggaccacugccaguucucccgccccagccccaucggcuaccuggggcugcucagccagcggacgcgcgacaucuacaucucccggcgccugcugggcaccuucaccuggacccucagcgacuccgagggcaacgagacgcccgggggcuacugccugacccgguggaugcugaucgaggccgagcucaagugcuucgggaacaccgccguggccaagugcaacgagaagcacgacgaggaguucugcgacaugcugcgccuguucgacuucaacaagcaggcgauccggcgccucaagacccccgcccagaugagcauccagcugaucaacaaggccgugaacgcccugaucaacgaccagcucaucaugaagaaccaccuccgggacaucaugggcauccccuacugcaacuacuccaaguacugcuaccugaaccacacggucaccgggaagaccagccugccccgcugcugccugguguccaacggcagcuaccugaacgagacccacuucuccgacgacaucgagcagcaggccgacaacaugaucacggagcuccugcagaaggaguacauggaccggcagggcaagaccccgcuggggcucguggaccuguucgucuucagcaccuccuucuaccugaucagcaucuuccugcaccucaucaagaucccgacccaccgccacaucacgggcaagcccugccccaagccccaccggcugaaccacauggggaucugcuccugcggccuguacaagcacccgggggugcccgugaaguggaagcgcugaggacuagucccuguucccagagcccacuuuuuuuucuuuuuuugaaauaaaauagccugucuuucagaucucaaaggcucuuuucagagccaccaaaaaaaaaaaaaaaaaaaaaaaaaaaaaaaaaaaaaaaaaaaaaaaaaaaaaaaaaaaaaaaaaaaaaaaaaaaaaaaaaaaaaaaaaaaaaaaaaaaaa

SEQ ID NO: 31736 - RNA, 1745 nt, Artificial Sequence
  mRNA product Design a-1 (hSL-A100) comprising derived and/or modified sequence from LASV(LASV253-NIG-2011;Clade II)__AIT17670__GPCmut7 (opt1)
aggagagucccgcagucggcguccagcggcucugcuuguucgugugugugucguugcaggccuuauucaagcuuaccaugggccagaucaucaccuucuuccaggaggugccccacgucaucgaggaggugaugaacaucgugcugaucgcccucagccugcuggccauccucaaggggaucuacaacgucgcgaccugcggccuguucgggcugguguccuuccuccugcugugcggccgcagcugcuccacgaccuacaaggggguguacgagcuccagacccuggagcuggacauggccagccucaacaugaccaugccgcuguccugcacgaagaacaacagccaccacuacaucauggucggcaacgagaccggccuggagcucacccugaccaacacguccaucaucaaccacaaguucugcaaccugagcgacgcccacaagaagaaccucuacgaccacgcccugauguccaucaucagcaccuuccaccuguccauccccaacuucaaccaguacgaggccaugagcugcgacuucaacgggggcaagaucuccgugcaguacaaccucagccacaccuacgcgguggacgccgccaaccacugcgggaccaucgccaacggcguccugcagacguucaugcggauggcguggggcggguccuacaucgcccuggacagcggcaagggguccugggacugcaucaugaccagcuaccaguaccucaucauccagaacaccaccugggaggaccacugccaguucucccgccccagccccaucggcuaccuggggcugcucagccagcggacgcgcgacaucuacaucucccggcgccugcugggcaccuucaccuggacccucagcgacuccgagggcaacgagacgcccgggggcuacugccugacccgguggaugcugaucgaggccgagcucaagugcuucgggaacaccgccguggccaagugcaacgagaagcacgacgaggaguucugcgacaugcugcgccuguucgacuucaacaagcaggcgauccggcgccucaaggcccccgcccagaugagcauccagcugaucaacaaggccgugaacgcccugaucaacgaccagcucaucaugaagaaccaccuccgggacaucaugggcaucccguacugcaacuacuccaaguacugcuaccugaaccacaccgucacggggcgcaccagccugccccggugcugccugguguccaacggcagcuaccugaacgagacccacuucuccgacgacaucgagcagcaggcggacaacaugaucaccgagcuccugcagaaggaguacaucgaccgccagggcaagacgccccuggggcucguggaccuguucgucuucagcaccuccuucuaccugaucagcaucuuccugcaccucgugaagaucccgacccaccggcacaucaucggcaagcccugccccaagccccaccgccugaaccacauggggaucugcuccugcggccuguacaagcacccgggggugcccgucaaguggaagcggugaggacuagucccuguucccagagcccacuuuuuuuucuuuuuuugaaauaaaauagccugucuuucagaucucaaaggcucuuuucagagccaccaaaaaaaaaaaaaaaaaaaaaaaaaaaaaaaaaaaaaaaaaaaaaaaaaaaaaaaaaaaaaaaaaaaaaaaaaaaaaaaaaaaaaaaaaaaaaaaaaaaaa

SEQ ID NO: 31737 - RNA, 1745 nt, Artificial Sequence
  mRNA product Design a-1 (hSL-A100) comprising derived and/or modified sequence from LASV(LASV254-NIG-2011;Clade II)__AIT17674__GPCmut7 (opt1)
aggagagucccgcagucggcguccagcggcucugcuuguucgugugugugucguugcaggccuuauucaagcuuaccaugggccagaucaucaccuucuuccaggaggugccccacgucaucgaggaggugaugaacaucgugcugaucgcccucagccugcuggccauccucaaggggaucuacaacgucgcgaccugcggccuguucgggcugguguccuuccuccugcugugcggccgcagcugcuccacgaccuacaaggggguguacgagcuccagacccuggagcuggacaugaccaaccucaacaugacgaugccgcugagcugcaccaagaacaacucccaccacuacaucauggucggcaacgagaccggccuggagcucacccugacgaacaccagcaucaucaaccacaaguucugcaaccuguccgacgcccacaagaagaaccucuacaaccacgcccugaugagcaucaucuccaccuuccaccugagcauccccaacuucaaccaguacgaggccauguccugcgacuucaacgggggcaagaucagcgugcaguacaaccucucccacagcuacgccguggacgcggccaaccacugcgggaccaucgccaacggcguccugcagacguucaugcggauggccuggggcggguccuacaucgcgcuggacagcggcaaggggaacugggacugcaucaugaccuccuaccaguaccucaucauccagaacaccaccugggaggaccacugccaguucagccgccccucccccaucggcuaccuggggcugcucagccagcggacgcgcgacaucuacaucagccggcgccugcugggcaccuucaccuggacccucuccgacagcgagggcaacgagacgcccgggggcuacugccugacccgguggaugcugaucgaggccgagcucaagugcuucgggaacaccgccguggccaagugcaacgagaagcacgacgaggaguucugcgacaugcugcgccuguucgacuucaacaagcaggccauccggcgccucaagacccccgcgcaggccaacauccagcugaucaacaaggccgugaacgcccugaucaacgaccagcucaucaugaagaaccaccuccgggacaucaugggcauccccuacugcaacuacuccaaguacugcuaccugaaccacacggucaccgggaagaccagccugccccgcugcugccugguguccaacggcagcuaccugaacgagacccacuucuccgacgacaucgagcagcaggccgacaacaugaucacggagcuccugcagaaggaguacauggaccggcagggcaagaccccgcuggggcucguggaccuguucgucuucagcaccuccuucuaccugaucagcaucuuccugcaccucgugaagaucccgacccaccgccacgugaucggcaagcccugccccaagccccaccggcugaaccacauggggaucugcuccugcggccuguacaagcacccggggguccccgugaaguggaagcgcugaggacuagucccuguucccagagcccacuuuuuuuucuuuuuuugaaauaaaauagccugucuuucagaucucaaaggcucuuuucagagccaccaaaaaaaaaaaaaaaaaaaaaaaaaaaaaaaaaaaaaaaaaaaaaaaaaaaaaaaaaaaaaaaaaaaaaaaaaaaaaaaaaaaaaaaaaaaaaaaaaaaaa

SEQ ID NO: 31738 - RNA, 1745 nt, Artificial Sequence
  mRNA product Design a-1 (hSL-A100) comprising derived and/or modified sequence from LASV(Nig08-A19;Clade III)__ADU56618__GPCmut7 (opt1)
aggagagucccgcagucggcguccagcggcucugcuuguucgugugugugucguugcaggccuuauucaagcuuaccaugggccagaucgugaccuucuuccaggaggucccccacgugaucgaggaggugaugaacaucguccugaucgcccucagcauccuggccauccugaaggggcucuacaacaucgcgaccugcggccugaucgggcuggugacguuccuccugcuguccggccgcagcugcuccaugaccuacaaggggguguacgagcuccagacccuggagcugaacaugaacacccucaacaugacgaugccgcugagcugcaccaagaacaacucccaccacuacaucauggucggcaacgagaccggccuggagcucacccugacgaacaccagccugcuccaccacaaguucugcaaccuguccgacgcccacaagaagaaccuguacgaccacacccucaugagcaucaucuccaccuuccaccugagcauccccaacuucaaccaguacgaggccauguccugcgacuucaacgggggcaagaucacggugcaguacaaccugagccacuccuacgccaucgacgccgcgaaccacugcgggaccguggccaacggcguccuccagaccuucaugcggauggccuggggcgggagcuacaucgcccuggacuccggccgcgggaagugggacugcaucaugaccagcuaccaguaccugaucauccagaacacgaccugggaggaccacugccaguucucccggcccagccccaucggcuaccucgggcugcugucccagcgcacccgggacaucuacaucagccgccggcuccugggcaccuucacguggacccugagcgacuccgagggcaacgagacccccgggggcuacugccucacccgcuggaugcugaucgaggcggagcugaagugcuucgggaacacggccguggccaagugcaacgagaagcacgacgaggaguucugcgacaugcuccggcuguucgacuucaacaagcaggccauccgccggcugaaggcccccgcgcagaugagcauccagcucaucaacaaggccgugaacgcccugaucaacgaccagcugaucaugaagaaccaccuccgcgacaucaugggcauccccuacugcaacuacuccaaguacugcuaccugaaccacaccagcaccgggcggaccucccugccccgcugcugccucgucagcaacggcuccuaccugaacgagacgcacuucagcgacgacaucgagcagcaggccgacaacaugaucaccgagaugcugcagaaggaguaccucgaccggcagggcaagaccccgcuggggcugguggaccuguucguguucuccaccagcuucuaccucaucuccaucuuccugcaccuggucaagaucccgacgcaccgccacaucgugggcaagcccugccccaagccccaccggcucaaccacauggggaucugcagcugcggccuguacaagcagccgggggugcccguccgcuggaagcggugaggacuagucccuguucccagagcccacuuuuuuuucuuuuuuugaaauaaaauagccugucuuucagaucucaaaggcucuuuucagagccaccaaaaaaaaaaaaaaaaaaaaaaaaaaaaaaaaaaaaaaaaaaaaaaaaaaaaaaaaaaaaaaaaaaaaaaaaaaaaaaaaaaaaaaaaaaaaaaaaaaaaa

SEQ ID NO: 31739 - RNA, 1748 nt, Artificial Sequence
  mRNA product Design a-1 (hSL-A100) comprising derived and/or modified sequence from LASV(G1180-SLE-2010;Clade IV)__AIT17168__GPCmut7 (opt1)
aggagagucccgcagucggcguccagcggcucugcuuguucgugugugugucguugcaggccuuauucaagcuuaccaugggccagaucgugaccuucuuccaggaggucccccacgugaucgaggaggugaugaacaucguccugaucgcccucagcauccuggccgugcugaaggggcucuacaacuucgcgaccugcggccugguggggcugcucaccuuccugcugcucugcggccgcuccugcaccgccagccgguacaagggggucuacgagcugcagacccuggagcucaacauggagacccugaacaugacgaugccgcuguccugcaccaagaacaacagccaccacuacaucauggugggcaacgagaccggccucgagcugacccugacgaacaccuccaucaucaaccacaaguucugcaaccucagcgacgcccacaagaagaaccuguacgaccacgcccugauguccaucaucagcaccuuccaccucuccauccccaacuucaaccaguacgaggccaugagcugcgacuucaacgggggcaagaucuccgugcaguacaaccugagccacuccuacgcgggggacgccgccaaccacugcggcaccgucgccaacggggugcugcagacguucaugcgcauggcguggggcggcagcuacaucgcccucgacuccgggcacggcagcugggacugcaucaugaccuccuaccaguaccugaucauccagaacaccaccugggaggaccacugccaguucagccggcccucccccaucggguaccugggccuccugagccagcgcacgcgggacaucuacaucagccgccggcugcucggcaccuucaccuggacccuguccgacagcgaggggaaggacacgccgggcggguacugccugacccgcuggaugcucaucgaggccgagcugaagugcuucggcaacaccgccguggccaagugcaacgagaagcacgacgaggaguucugcgacaugcugcggcuguucgacuucaacaagcaggcgauccagcgccugaaggcccccgcccagauguccauccagcugaucaacaaggccgucaacgcccucaucaacgaccagcugaucaugaagaaccaccuccgggacaucauggggauccccuacugcaacuacagcaaguacugcuaccucaaccacaccacgaccggcaagaccucccugcccaagugcugccuggugagcaacggcuccuaccucaacgagacccacuucagcgacgacaucgagcagcaggcggacaacaugaucacggagaugcugcagaaggaguacauggagcgccaggggaagacgccccugggccucguggaccuguucgucuucuccaccagcuucuaccugaucuccaucuuccugcaccucgugaagaucccgacccaccggcacaucgugggcaagagcugccccaagccccaccgccugaaccacauggggaucugcuccugcgggcuguacaagcagcccggcgucccggugaaguggaagcggugaggacuagucccuguucccagagcccacuuuuuuuucuuuuuuugaaauaaaauagccugucuuucagaucucaaaggcucuuuucagagccaccaaaaaaaaaaaaaaaaaaaaaaaaaaaaaaaaaaaaaaaaaaaaaaaaaaaaaaaaaaaaaaaaaaaaaaaaaaaaaaaaaaaaaaaaaaaaaaaaaaaaa

SEQ ID NO: 31740 - RNA, 1748 nt, Artificial Sequence
  mRNA product Design a-1 (hSL-A100) comprising derived and/or modified sequence from LASV(G1442-SLE-2011;Clade IV)__AIT17180__GPCmut7 (opt1)
aggagagucccgcagucggcguccagcggcucugcuuguucgugugugugucguugcaggccuuauucaagcuuaccaugggccagaucgugaccuucuuccaggaggucccccacgugaucgaggaggugaugaacaucguccugaucgcccucagcauccuggccgugcugaaggggcucuacaacguggcgaccugcggccugaucgggcuggucacguuccuccugcugugcggccgcuccugcaccaccacccucuacaaggggguguacgagcugcagacgcuggagcucaacauggagacccugaacaugaccaugccgcugagcugcaccaagaacaacucccaccacuacauccgggugggcaacgagacgggccucgagcugacccugaccaacaccagcaucaucaaccacaaguucugcaaccucuccgacgcccacaagaagaaccuguacgaccacgcccugaugagcaucaucuccacguuccaccucagcauccccaacuucaaccaguacgaggccauguccugcgacuucaacgggggcaagaucagcguccaguacaaccugucccacagcuacgccggggacgcggccaaccacugcggcaccguggccaacggggugcugcagaccuucaugcgcauggccuggggcggcuccuacaucgcgcucgacagcgggcggggcaacugggacugcaucaugaccuccuaccaguaccugaucauccagaacacgaccugggacgaccacugccaguucagccgccccucccccaucggguaccugggccuccugagccagcggacccgcgacgucuacaucucccggcgccugcucggcaccuucacguggacccugagcgacagcgaggggaaggacaccccgggcggguacugccugacccgguggaugcucaucgaggccgagcugaagugcuucggcaacacggccguggccaagugcaacgagaagcacgacgaggaguucugcgacaugcugcgccucuucgacuucaacaagcaggccauccagcggcugaaggcgcccgcccagauguccauccagcugaucaacaaggccgugaacgcccucaucaacgaccagcugaucaugaagaaccaccuccgcgacaucauggggauccccuacugcaacuacagcaaguacugcuaccugaacaacaccgccaccggcaagaccucccugcccaagugcugccugaucagcaacggcuccuaccucaacgagacgcacuucagcgacgacaucgagcaggaggcggacaacaugaucaccgagaugcugcagaaggaguacauggagcggcaggggaagacgccccugggccucgucgaccuguucguguucuccaccagcuucuaccugaucuccaucuuccugcaccucgugaagaucccgacccaccgccacaucgucggcaagagcugccccaagccccaccggcugaaccacauggggaucugcuccugcgggcuguacaagcagcccggcgugccggugcgcuggaagcggugaggacuagucccuguucccagagcccacuuuuuuuucuuuuuuugaaauaaaauagccugucuuucagaucucaaaggcucuuuucagagccaccaaaaaaaaaaaaaaaaaaaaaaaaaaaaaaaaaaaaaaaaaaaaaaaaaaaaaaaaaaaaaaaaaaaaaaaaaaaaaaaaaaaaaaaaaaaaaaaaaaaaa

SEQ ID NO: 31741 - RNA, 1748 nt, Artificial Sequence
  mRNA product Design a-1 (hSL-A100) comprising derived and/or modified sequence from LASV(G3010-SLE-2013;Clade IV)__AIT17344__GPCmut7 (opt1)
aggagagucccgcagucggcguccagcggcucugcuuguucgugugugugucguugcaggccuuauucaagcuuaccaugggccagaucgugaccuucuuccaggaggucccccacgugaucgaggaggugaugaacaucguccugaucgcccucagcauccuggccgugcugaaggggcucuacaacuucgcgaccugcggccugguggggcuggucacguuccuccugcugugcggccgcuccugcaccaccagccucuacaaggggguguacgagcugcagacccuggagcucaacauggagacgcugaacaugaccaugccgcuguccugcaccaagaacaacagccaccacuacaucauggugggcaacgagaccggccucgagcugacgcugaccaacaccuccaucaucaaccacaaguucugcaaccucagcgacgcccacaagaagaaccuguacaaccacgcccugauguccaucaucagcaccuuccaccucuccauccccaacuucaaccaguacgaggccaugagcugcgacuucaacgggggcaagaucuccguccaguacaaccugagccacuccuacgccggggacgcggccagccacugcggcacgguggccaacggggugcugcagaccuucaugcggauggccuggggcggcuccuacaucgcgcucgacagcggguacggcaagugggacugcaucaugaccuccuaccaguaccugaucauccagaacaccacgugggaggaccacugccaguucagccgccccucccccaucggguaccugggccuccugagccagcggacccgcgacaucuacaucagccggcgccugcucggcaccuucaccuggacgcuguccgacagcgaggggaaggacaccccgggcggguacugccugacccgguggaugcucaucgaggccgagcugaagugcuucggcaacaccgccgucgccaagugcaacgagaagcacgacgaggaguucugcgacaugcugcgccucuucgacuucaacaagcaggccauccagcggcugaagacgcccgcgcagauguccauccagcugaucaacaaggccgugaacgcccucaucaacgaccagcugaucaugaagaaccaccuccgcgacaucauggggauccccuacugcaacuacagcaaguacugcuaccugaaccacaccaccaccggcaagacgucccugcccaagugcugccuggugagcaacggcuccuaccucaacgagacccacuucagcgacgacaucgagcagcaggccgacaacaugaucaccgagaugcugcagaaggaguacauggagcggcaggggaagacgccccugggccucgucgaccuguucguguucuccaccagcuucuaccugaucuccaucuuccugcaccucgugaagaucccgacccaccgccacaucgucggcaagagcugccccaagccccaccggcugaaccacauggggaucugcuccugcgggcuguacaagcagcccggcgugccggugcgcuggaagcggugaggacuagucccuguucccagagcccacuuuuuuuucuuuuuuugaaauaaaauagccugucuuucagaucucaaaggcucuuuucagagccaccaaaaaaaaaaaaaaaaaaaaaaaaaaaaaaaaaaaaaaaaaaaaaaaaaaaaaaaaaaaaaaaaaaaaaaaaaaaaaaaaaaaaaaaaaaaaaaaaaaaaa

SEQ ID NO: 31742 - RNA, 1748 nt, Artificial Sequence
  mRNA product Design a-1 (hSL-A100) comprising derived and/or modified sequence from LASV(G502-SLE-2009;Clade IV)__AIT17126__GPCmut7 (opt1)
aggagagucccgcagucggcguccagcggcucugcuuguucgugugugugucguugcaggccuuauucaagcuuaccaugggccagaucgugaccuucuuccaggaggucccccacgugaucgaggaggugaugaacaucguccugaucgcccucagcauccuggccgugcugaaggggcucuacaacuucgcgaccugcggccugguggggcugcucacguuccugcugcucugcggccgcuccugcaccaccgggcuguacaagggcgucuacgagcugcagacccucgagcugaacauggagacgcugaacaugaccaugccgcucagcugcaccaagaacaacucccaccacuacaucauggugggcaacgagaccgggcuggagcugacgcucaccaacaccagcaucaucaaccacaaguucugcaaccuguccgacgcccacaagaagaaccuguacgaccacgcccucaugagcaucaucuccaccuuccaccugagcauccccaacuucaaccaguacgaggccauguccugcgacuucaacggcgggaagaucagcgugcaguacaaccugucccacagcuacgccggcgacgcggccgaccacugcgggacggucgccaacggcgugcuccagaccuucaugcggauggccuggggcggguccuacaucgcgcuggacagcggccgcgggcggugggacugcaucaugaccuccuaccaguaccugaucauccagaacaccacgugggaggaccacugccaguucagccgccccucccccaucggcuaccucggccugcugagccagcggacccgcgacaucuacaucucccggcgccuccuggggaccuucaccuggacgcugagcgacagcgagggcaaggacacccccgggggcuacugccucacccgguggaugcugaucgaggccgagcugaagugcuucgggaacaccgccguggccaagugcaacgagaagcacgacgaggaguucugcgacaugcuccgccuguucgacuucaacaagcaggccauccagcggcugaaggcgcccgcccagauguccauccagcucaucaacaaggccgucaacgcccugaucaacgaccagcuggugaugaagaaccaccuccgcgacaucaugggcauccccuacugcaacuacagccgguacugcuaccugaaccacacgaccaccggccgcaccucccugcccaagugcugccucgugagcaacggguccuaccugaacgagacgcacuucagcgacgacaucgagcagcaggccgacaacaugaucaccgagaugcugcagaaggaguacauggagcggcagggcaagaccccgcucgggcuggucgaccuguucguguucuccaccagcuucuaccugaucuccaucuuccuccaccuggugaagaucccgacgcaccgccacaucgucggcaagagcugccccaagccccaccggcugaaccacauggggaucugcuccugcggccucuacaagcagcccggcgugccggugaaguggaagcgcugaggacuagucccuguucccagagcccacuuuuuuuucuuuuuuugaaauaaaauagccugucuuucagaucucaaaggcucuuuucagagccaccaaaaaaaaaaaaaaaaaaaaaaaaaaaaaaaaaaaaaaaaaaaaaaaaaaaaaaaaaaaaaaaaaaaaaaaaaaaaaaaaaaaaaaaaaaaaaaaaaaaaa

SEQ ID NO: 31743 - RNA, 1748 nt, Artificial Sequence
  mRNA product Design a-1 (hSL-A100) comprising derived and/or modified sequence from LASV(G733-SLE-2010;Clade IV)__AIT17154__GPCmut7 (opt1)
aggagagucccgcagucggcguccagcggcucugcuuguucgugugugugucguugcaggccuuauucaagcuuaccaugggccagaucgugaccuucuuccaggaggucccccacgugaucgaggaggugaugaacaucguccugaucgcccucagcauccuggccgugcugaaggggcucuacaacuucgcgaccugcggcaucguggggcuggucuccuuccugcuccugugcggccgcagcugcacgaccucccuguacaaggggguguacgagcuccagacccuggagcugaacauggagacccucaacaugacgaugccgcugagcugcaccaagaacaacucccaccacuacaucauggugggcaacgagaccggccuggagcucacccugacgaacaccagcaucaucaaccacaaguucugcaaccuguccgacgcccacaagaagaaccucuacgaccacgcccugaugagcaucaucuccaccuuccaccugagcauccccaacuucaaccaguacgaggccauguccugcgacuucaacgggggcaagaucagcguccaguacaaccucucccacagcuacgccggggacgcggccaaccacugcggcaccaucgccaacggggugcugcagacguucaugcggauggccuggggcggcuccuacaucgcgcuggacagcgggcgcgaccggugggacugcaucaugaccuccuaccaguaccucaucauccagaacaccaccugggaggaccacugccaguucagccgccccucccccaucggcuaccuggggcugcucagccagcggacgcgcgacaucuacaucagccggcgccugcugggcaccuucaccuggacccucuccgacagcgagggcaaggacacgcccgggggcuacugccugacccgguggaugcugaucgaggccgagcucaagugcuucgggaacaccgccguggccaagugcaacgagaagcacgacgaggaguucugcgacaugcugcgccuguucgacuucaacaagcaggccauccagcggcucaaggcgcccgcccagauguccauccagcugaucaacaaggccgucaacgcccugaucaacgaccagcucaucaugaagaaccaccuccgcgacaucaugggcauccccuacugcaacuacagcaaguacugcuaccugaaccacaccacgaccgggaagaccucccugcccaagugcugccuggugagcaacggcuccuaccugaacgagacccacuucagcgacgacaucgagcagcaggccgacaacaugaucacggagaugcuccagaaggaguacauggagcggcagggcaagaccccgcuggggcugguggaccucuucgucuucuccaccagcuucuaccugaucuccaucuuccugcaccuggugaagaucccgacccaccgccacguggucggcaagagcugccccaagccccaccggcucaaccacauggggaucugcuccugcggccuguacgggcagcccggcgugccggugaaguggaagcgcugaggacuagucccuguucccagagcccacuuuuuuuucuuuuuuugaaauaaaauagccugucuuucagaucucaaaggcucuuuucagagccaccaaaaaaaaaaaaaaaaaaaaaaaaaaaaaaaaaaaaaaaaaaaaaaaaaaaaaaaaaaaaaaaaaaaaaaaaaaaaaaaaaaaaaaaaaaaaaaaaaaaaa

SEQ ID NO: 31744 - RNA, 1748 nt, Artificial Sequence
  mRNA product Design a-1 (hSL-A100) comprising derived and/or modified sequence from MOPV/LASV reassortant(IGS-1;Clade IV)__AFY05576__GPCmut7 (opt1)
aggagagucccgcagucggcguccagcggcucugcuuguucgugugugugucguugcaggccuuauucaagcuuaccaugggccagaucgugaccuucuuccaggaggucccccacgugaucgaggaggugaugaacaucguccugaucgcccucagcgugcuggccgugcugaaggggcucuacaacuucgcgaccugcggccuggucgggcuggugacguuccuccugcugugcggccgcuccugcaccaccagccucuacaaggggguguacgagcugcagacccuggagcucaacauggagacgcugaacaugaccaugccgcuguccugcaccaagaacaacagccaccacuacaucauggucggcaacgagaccggccucgagcugacgcugaccaacaccuccaucaucaaccacaaguucugcaaccucagcgacgcccacaagaagaaccuguacgaccacgcccugauguccaucaucagcaccuuccaccucuccauccccaacuucaaccaguacgaggccaugagcugcgacuucaacgggggcaagaucuccgugcaguacaaccugagccacuccuacgccggggacgcggccaaccacugcggcacgguggccaacgggguccugcagaccuucaugcggauggccuggggcggcagcuacaucgcgcucgacuccgggcgcggcaacugggacugcaucaugaccagcuaccaguaccugaucauccagaacaccacgugggaggaccacugccaguucucccggcccagccccaucggguaccugggccuccugucccagcgcacccgggacaucuacaucagccgccggcugcucggcaccuucaccuggacgcugagcgacuccgagggggaggacaccccgggcggguacugccugacccgcuggaugcucaucgaggccgagcugaagugcuucggcaacaccgccguggccaagugcaacgagaagcacgacgaggaguucugcgacaugcugcggcuguucgacuucaacaagcaggccauccagcgccugaaggcgcccgcccagaugagcauccagcugaucaacaaggccgugaacgcccucaucaacgaccagcugaucaugaagaaccaccuccgggacaucauggggauccccuacugcaacuacuccaaguacugcuaccucaaccacacgaccaccggccgcaccagccugcccaagugcugccuggucuccaacggcagcuaccucaacgagacgcacuucuccgacgacaucgagcagcaggccgacaacaugaucaccgagaugcugcagaaggaguacauggagcggcaggggaagacgccccugggccucguggaccuguucguguucagcaccuccuucuaccugaucagcaucuuccugcaccucgucaagaucccgacccaccgccacaucguggggaaguccugccccaagccccaccggcugaaccacaugggcaucugcagcugcgggcuguacaagcagcccggcgugccggucaaguggaagcgcugaggacuagucccuguucccagagcccacuuuuuuuucuuuuuuugaaauaaaauagccugucuuucagaucucaaaggcucuuuucagagccaccaaaaaaaaaaaaaaaaaaaaaaaaaaaaaaaaaaaaaaaaaaaaaaaaaaaaaaaaaaaaaaaaaaaaaaaaaaaaaaaaaaaaaaaaaaaaaaaaaaaaa

SEQ ID NO: 31745 - RNA, 1748 nt, Artificial Sequence
  mRNA product Design a-1 (hSL-A100) comprising derived and/or modified sequence from LASV(LM765-SLE-2012;Clade IV)__AIT17814__GPCmut7 (opt1)
aggagagucccgcagucggcguccagcggcucugcuuguucgugugugugucguugcaggccuuauucaagcuuaccaugggccagaucgugaccuucuuccaggaggucccccacgugaucgaggaggugaugaacaucguccugaucgcccucagcauccuggccgugcugaaggggcucuacaacuucgcgaccugcggccugguggggcuggucacguuccuccugcugugcggccgcuccugcaccaccagccucuacaaggggguguacgagcugcagacccuggagcucaacauggagacgcugaacaugaccaugccgcuguccugcaccaagaacaacagccaccacuacaucauggugggcaacgagaccggccucgagcugacgcugaccaacaccuccaucaucgaccacaaguucugcaaccucagcgacgcccaccggaagaaccuguacgaccacgcccugauguccaucaucagcaccuuccaccucuccauccccaacuucaaccaguacgaggccaugagcugcgacuucaacgggggcaagaucuccguccaguacaaccugagccacuccuacgccaaggacgcggccgaccacugcgggacgguggccaacggcgugcugcagaccuucaugcgcauggccuggggcgggagcuacaucgcgcucgacuccggccgggggcgcugggacugcaucaugaccagcuaccaguaccugaucauccagaacaccacgugggaggaccacugccaguucucccggcccagccccaucggcuaccuggggcuccugucccagcgcacccgggacaucuacaucagccgccggcugcucggcaccuucaccuggacgcugagcgacuccgagggcaaggacacccccgggggcuacugccugacccgcuggaugcucaucgaggccgagcugaagugcuucgggaacaccgccgucgccaagugcaacgagaagcacgacgaggaguucugcgacaugcugcggcuguucgacuucaacaagcaggccauccagcgccugaaggcgcccgcccagaugagcauccagcugaucaacaaggccgugaacgcccucaucaacgaccagcugaucaugaagaaccaccuccgggacaucaugggcauccccuacugcaacuacuccaaguacugcuaccucaaccacacgaccaccgggaagaccagccugcccaagugcugccugguguccaacggcagcuaccucaacgagacgcacuucuccgacgacaucgagcagcaggccgacaacaugaucaccgagaugcugcagaaggaguacauggagcgccagggcaagaccccgcuggggcucgucgaccuguucguguucagcaccuccuucuaccugaucagcaucuuccugcaccucgugaagaucccgacgcaccggcacaucgucggcaagcccugccccaagccccaccgccugaaccacauggggaucugcuccugcggccuguacaagcagccgggggugcccgugaaguggaagcggugaggacuagucccuguucccagagcccacuuuuuuuucuuuuuuugaaauaaaauagccugucuuucagaucucaaaggcucuuuucagagccaccaaaaaaaaaaaaaaaaaaaaaaaaaaaaaaaaaaaaaaaaaaaaaaaaaaaaaaaaaaaaaaaaaaaaaaaaaaaaaaaaaaaaaaaaaaaaaaaaaaaaa

SEQ ID NO: 31746 - RNA, 1748 nt, Artificial Sequence
  mRNA product Design a-1 (hSL-A100) comprising derived and/or modified sequence from LASV(LM776-SLE-2012;Clade IV)__AIT17824__GPCmut7 (opt1)
aggagagucccgcagucggcguccagcggcucugcuuguucgugugugugucguugcaggccuuauucaagcuuaccaugggccagaucgugaccuucuuccaggaggucccccacgugaucgaggaggugaugaacaucguccugaucgcccucagcauccuggccgugcugaaggggcucuacaacuucgcgaccugcggccugguggggcuggucacguuccuccugcugugcggccgcuccugcaccaccagcguguacaaggggguguacgagcuccagacccuggagcugaacauggagacgcucaacaugaccaugccgcuguccugcaccaagaacaacagccaccacuacaucauggucggcaacgagaccggccuggagcucacgcugaccaacaccuccaucaucaaccacaaguucugcaaccugagcgacgcccacaagaagaaccucuacgaccacgcccugauguccaucaucagcaccuuccaccuguccauccccaacuucaaccaguacgaggccaugagcugcgacuucaacgggggcaagaucuccgugcaguacaaccucagccacuccuacgccggggacgcggccaaccacugcggcacgguggccaacgggguccugcagaccuucaugcggauggccuggggcggcagcuacaucgcgcuggacuccgggcacggcaagugggacugcaucaugaccagcuaccaguaccucaucauccagaacaccacgugggaggaccacugccaguucucccgccccagccccaucggguaccugggccugcucucccagcggacccgcgacaucuacaucagccggcgccugcugggcaccuucaccuggacgcucagcgacuccgaggggaaggacaccccgggcggguacugccugacccgguggaugcugaucgaggccgagcucaagugcuucggcaacaccgccguggccaagugcaacgagaagcacgacgaggaguucugcgacaugcugcgccuguucgacuucaacaagcaggccauccagcggcucaaggcgcccgcccagaugagcauccagcugaucaacaaggccgugaacgcccugaucaacgaccagcucaucaugaagaaccaccuccgcgacaucauggggauccccuacugcaacuacuccaaguacugcuaccugaaccacacgaccaccggcaagaccagccugcccaagugcugccuggucuccaacggcagcuaccugaacgagacgcacuucuccgacgacaucgagcagcaggccgacaacaugaucaccgagaugcuccagaaggaguacauggagcggcaggggaagacgccccugggccugguggaccucuucguguucagcaccuccuucuaccugaucagcaucuuccugcaccuggucaagaucccgacccaccgccacaucguggggaaguccugccccaagccccaccggcucaaccacaugggcaucugcagcugcgggcuguacaagcagcccggcgugccgguccgcuggaagcggugaggacuagucccuguucccagagcccacuuuuuuuucuuuuuuugaaauaaaauagccugucuuucagaucucaaaggcucuuuucagagccaccaaaaaaaaaaaaaaaaaaaaaaaaaaaaaaaaaaaaaaaaaaaaaaaaaaaaaaaaaaaaaaaaaaaaaaaaaaaaaaaaaaaaaaaaaaaaaaaaaaaaa

SEQ ID NO: 31747 - RNA, 1748 nt, Artificial Sequence
  mRNA product Design a-1 (hSL-A100) comprising derived and/or modified sequence from LASV(Mad39;Clade IV)__ANH09722__GPCmut7 (opt1)
aggagagucccgcagucggcguccagcggcucugcuuguucgugugugugucguugcaggccuuauucaagcuuaccaugggccagaucgugaccuucuuccaggaggucccccacgugaucgaggaggugaugaacaucguccugaucgcccucagcauccuggccgugcugaaggggcucuacaacguggcgaccugcggccugaucgggcuggucacguuccuccugcugugcggccgcuccugcaccaccacccucuacaaggggguguacgagcugcaggcccuggagcucaacauggagacgcugaacaugaccaugccgcugagcugcaccaagaacaacucccaccacuacauccgggugggcaacgagaccggccucgagcugacgcugaccaacaccagccucaucaaccacaaguucugcaaccuguccgacgcccacaagaagaaccuguacgaccacgcccucaugagcaucaucuccaccuuccaccugagcauccccaacuucaaccaguacgaggccauguccugcgacuucaacgacgggaagaucagcguccaguacaaccugucccacacguacgcgggcgacaccgccaaccacugcgggaccguggccaacggcgugcuccagaccuucaugcgcauggccuggggcgggagcuacaucgcgcuggacuccggccgcgggggcugggacugcaucaugacgagcuaccaguaccugaucauccagaacaccaccugggaggaccacugccaguucucccggcccagccccaucggguaccucggccugcugucccagcggacccgcgacaucuacaucagccggcgccuccugggcacguucaccuggacccuguccgacagcgaggggaaggacaccccgggcggguacugccucacgcgguggaugcugaucgaggccgagcugaagugcuucggcaacaccgccgucgccaagugcaacgagaagcacgacgaggaguucugcgacaugcuccgccuguucgacuucaacaagcaggccauccagcggcugaaggcgcccgcccagaugagcauccagcucaucaacaaggccgugaacgcccugaucaacgaccagcugaucaugaagaaccaccuccgcgacaucauggggauccccuacugcaacuacuccaaguacugcuaccugaaccacaccgugaccggcaagacgagccugcccaagugcugccucgucuccaacggcagcuaccugaacgagacccacuucuccgacgacaucgagcagcaggccgacaacaugaucaccgagaugcugcagaaggaguacauggagcggcaggggaagacgccccucggccugguggaccuguucguguucagcaccuccuucuaccugaucagcaucuuccuccaccuggucaagaucccgacccaccgccacgugguggggaagcccugccccaagccccaccggcugaaccacaugggcaucugcuccugcggguucuacaagcagccgggcguccccgugcgcuggaagcggugaggacuagucccuguucccagagcccacuuuuuuuucuuuuuuugaaauaaaauagccugucuuucagaucucaaaggcucuuuucagagccaccaaaaaaaaaaaaaaaaaaaaaaaaaaaaaaaaaaaaaaaaaaaaaaaaaaaaaaaaaaaaaaaaaaaaaaaaaaaaaaaaaaaaaaaaaaaaaaaaaaaaa

SEQ ID NO: 31748 - RNA, 1748 nt, Artificial Sequence
  mRNA product Design a-1 (hSL-A100) comprising derived and/or modified sequence from LASV(Z0947-SLE-2011;Clade IV)__AIT17840__GPCmut7 (opt1)
aggagagucccgcagucggcguccagcggcucugcuuguucgugugugugucguugcaggccuuauucaagcuuaccaugggccagaucgugaccuucuuccaggaggucccccacgugaucgaggaggugaugaacaucguccugaucgcccucagcauccuggccgugcugaaggggcucuacaacuucgcgaccugcggccugguggggcuggucacguuccuccugcugugcggccgcuccugcaccaucagccucuacaaggggguguacgagcugcagacccuggagcucaacauggagacccugaacaugacgaugccgcuguccugcaccaagaacaacagccaccacuacaucauggugggcaacgagaccggccucgagcugacccugacgaacaccuccaucaucaaccacaaguucugcaaccucagcgacgcccacaagaagaaccuguacgaccacgcccugauguccaucaucagcaccuuccaccucuccauccccaacuucaaccaguacgaggccaugagcugcgacuucaacgggggcaagaucuccguccaguacaaccugagccacuccuacgccggggacgcggccaaccacugcggcaccguggccaacggggugcugcagacguucaugcggauggccuggggcggcagcuacaucgcgcucgacuccgggcgcgaccggugggacugcaucaugaccagcuaccaguaccugaucauccagaacaccaccugggaggaccacugccaguucucccgccccagccccaucggcuaccuggggcuccugucccagcggacgcgcgacaucuacaucagccggcgccugcucggcaccuucaccuggacccugagcgacuccgagggcaaggacacgcccgggggcuacugccugacccgguggaugcucaucgaggccgagcugaagugcuucgggaacaccgccgucgccaagugcaacgagaagcacgacgaggaguucugcgacaugcugcgccucuucgacuucaacaagcaggccauccagcggcugaaggcgcccgcccagaugagcauccagcugaucaacaaggccgugaacgcccucaucaacgaccagcugaucaugaagaaccaccuccgcgacaucaugggcauccccuacugcaacuacuccaaguacugcuaccugaaccacaccacgaccgggaagaccagccugcccaagugcugccugguguccaacggcagcuaccucaacgagacccacuucuccgacgacaucgagcagcaggccgacaacaugaucacggagaugcugcagaaggaguacauggagcggcagggcaagaccccgcuggggcucgucgaccuguucguguucagcaccuccuucuaccugaucagcaucuuccugcaccucgugaagaucccgacccaccgccacaucgucggcaagcccugccccaagccccaccggcugaaccacauggggaucugcuccugcggccuguacaagcagccgggggugcccgugaaguggaagcgcugaggacuagucccuguucccagagcccacuuuuuuuucuuuuuuugaaauaaaauagccugucuuucagaucucaaaggcucuuuucagagccaccaaaaaaaaaaaaaaaaaaaaaaaaaaaaaaaaaaaaaaaaaaaaaaaaaaaaaaaaaaaaaaaaaaaaaaaaaaaaaaaaaaaaaaaaaaaaaaaaaaaaa

SEQ ID NO: 31749 - RNA, 1748 nt, Artificial Sequence
  mRNA product Design a-1 (hSL-A100) comprising derived and/or modified sequence from LASV(Josiah;Clade IV)__NP_694870__GPCmut7 (opt1)
aggagagucccgcagucggcguccagcggcucugcuuguucgugugugugucguugcaggccuuauucaagcuuaccaugggccagaucgugaccuucuuccaggaggucccccacgugaucgaggaggugaugaacaucguccugaucgcccucagcgugcuggccgugcugaaggggcucuacaacuucgcgaccugcggccuggucgggcuggugacguuccuccugcugugcggccgcuccugcaccaccagccucuacaaggggguguacgagcugcagacccuggagcucaacauggagacgcugaacaugaccaugccgcuguccugcaccaagaacaacagccaccacuacaucauggucggcaacgagaccggccucgagcugacgcugaccaacaccuccaucaucaaccacaaguucugcaaccucagcgacgcccacaagaagaaccuguacgaccacgcccugauguccaucaucagcaccuuccaccucuccauccccaacuucaaccaguacgaggccaugagcugcgacuucaacgggggcaagaucuccgugcaguacaaccugagccacuccuacgccggggacgcggccaaccacugcggcacgguggccaacgggguccugcagaccuucaugcggauggccuggggcggcagcuacaucgcgcucgacuccgggcgcggcaacugggacugcaucaugaccagcuaccaguaccugaucauccagaacaccacgugggaggaccacugccaguucucccggcccagccccaucggguaccugggccuccugucccagcgcacccgggacaucuacaucagccgccggcugcucggcaccuucaccuggacgcugagcgacuccgaggggaaggacaccccgggcggguacugccugacccgcuggaugcucaucgaggccgagcugaagugcuucggcaacaccgccguggccaagugcaacgagaagcacgacgaggaguucugcgacaugcugcggcuguucgacuucaacaagcaggccauccagcgccugaaggcgcccgcccagaugagcauccagcugaucaacaaggccgugaacgcccucaucaacgaccagcugaucaugaagaaccaccuccgggacaucauggggauccccuacugcaacuacuccaaguacugcuaccucaaccacacgaccaccggccgcaccagccugcccaagugcugccuggucuccaacggcagcuaccucaacgagacgcacuucuccgacgacaucgagcagcaggccgacaacaugaucaccgagaugcugcagaaggaguacauggagcggcaggggaagaccccgcugggccugguggaccucuucguguucagcaccuccuucuaccugaucagcaucuuccugcaccucgucaagauccccacgcaccgccacaucguggggaaguccugccccaagccccaccggcugaaccacaugggcaucugcagcugcgggcuguacaagcagccgggcgugcccgucaaguggaagcgcugaggacuagucccuguucccagagcccacuuuuuuuucuuuuuuugaaauaaaauagccugucuuucagaucucaaaggcucuuuucagagccaccaaaaaaaaaaaaaaaaaaaaaaaaaaaaaaaaaaaaaaaaaaaaaaaaaaaaaaaaaaaaaaaaaaaaaaaaaaaaaaaaaaaaaaaaaaaaaaaaaaaaa

SEQ ID NO: 31750 - RNA, 1745 nt, Artificial Sequence
  mRNA product Design a-1 (hSL-A100) comprising derived and/or modified sequence from LASV(LP;Clade I)__AAF86701__GPCmut7 (opt1)
aggagagucccgcagucggcguccagcggcucugcuuguucgugugugugucguugcaggccuuauucaagcuuaccaugggccagaucaucaccuucuuccaggaggugccccacgucaucgaggaggugaugaacaucgugcugaucgcccucagccugcuggccauccucaaggggcuguacaacaucgcgaccugcggcaucaucgggcuggucgccuuccucuuccugugcggcaaguccugcagccugacgcucaagggcggguacgagcugcagacccuggagcucaacauggagacccugaacaugaccaugccgcuguccugcacgaagaacagcucccaccacuacauccgcgugggcaacgagaccgggcucgagcugacccugaccaacacgagcaucaucaaccacaaguucugcaaccucuccgacgcccacaagaagaaccuguacgaccacgcccugaugagcaucaucuccaccuuccaccucagcauccccaacuucaaccaguacgaggccauguccugcgacuucaacggcgggaagaucagcgugcaguacaaccugucccacagcuacgcgggcgacgccgccgagcacugcgggaccgucgccaacggcgugcugcagaccuucaugcggauggcguggggcgggcgcuacaucgcccucgacuccggcaaggggaacugggacugcaucaugacgagcuaccaguaccugaucauccagaacaccaccugggaggaccacugccaguucucccggcccagccccaucggcuaccugggccuccugucccagcgcacccgggacaucuacaucagccgccggcugcucgggacguucaccuggacccugagcgacuccgagggcaacgagacccccgggggcuacugccugacgcgcuggaugcucaucgaggccgagcugaagugcuucgggaacaccgccguggccaagugcaacgagaagcacgacgaggaguucugcgacaugcugcggcuguucgacuucaacaagcaggcgauccgccggcugaaggccccggcccagaugagcauccagcugaucaacaaggccgucaacgcccucaucaacgaccagcugaucaugaagaaccaccuccgcgacaucaugggcauccccuacugcaacuacuccaaguacugcuaccucaaccacaccagcuccggccggaccagccugcccaagugcugccugaucuccaacgggagcuaccucaacgagacgcaguucuccgacgacaucgagcagcaggcggacaacaugaucaccgagaugcugcagaaggaguacaucgagcgccagggcaagaccccgcuggggcugguggacaucuucaucuucagcaccuccuucuaccucaucagcaucuuccugcaccugaucaagauccccacgcaccggcacaucgugggcaagcccugccccaagccgcaccgccucaaccacaugggggucugcuccugcggccuguacaagcaccccggcgugcccaccaaguggaagcggugaggacuagucccuguucccagagcccacuuuuuuuucuuuuuuugaaauaaaauagccugucuuucagaucucaaaggcucuuuucagagccaccaaaaaaaaaaaaaaaaaaaaaaaaaaaaaaaaaaaaaaaaaaaaaaaaaaaaaaaaaaaaaaaaaaaaaaaaaaaaaaaaaaaaaaaaaaaaaaaaaaaaa

SEQ ID NO: 31751 - RNA, 1745 nt, Artificial Sequence
  mRNA product Design a-1 (hSL-A100) comprising derived and/or modified sequence from LASV(803213;Clade II)__AAF86703__GPCmut7 (opt1)
aggagagucccgcagucggcguccagcggcucugcuuguucgugugugugucguugcaggccuuauucaagcuuaccaugggccagaucaucaccuucuuccaggaggugccccacgucaucgaggaggugaugaacaucgugcugaucgcccucagccugcuggccauccucaaggggaucuacaacgucgcgaccugcggccuguucgggcugaucuccuuccuccugcugugcggccgcagcugcuccgugacguacaaggggguguacgagcuccagacccuggagcugaacauggccaaccucaacaugaccaugccgcugagcugcaccaagaacaacucccaccacuacaucauggucggcaacgagacgggccuggagcucacccugaccaacaccagcaucaucaaccacaaguucugcaaccuguccgacgcccacaagaagaaccucuacgaccacgcccugaugagcaucaucuccacguuccaccugagcauccccaacuucaaccaguacgaggccauguccugcgacuucaacgggggcaagaucagcgugcaguacaaccucucccacagcuucgcgguggacgccgccaaccacugcgggaccaucgccaacggcguccugcagaccuucaugcggauggcguggggcggguccuacaucgcccuggacagcggcaaggggaacugggacugcaucaugaccuccuaccaguaccucaucauccagaacacgaccugggaggaccacugccaguucagccgccccucccccaucggcuaccuggggcugcucagccagcggacccgcgacaucuacaucagccggcgccugcugggcaccuucacguggacccucuccgacagcgagggcaacgaggcccccgggggcuacugccugacccgguggaugcugaucgaggccgagcucaagugcuucgggaacaccgccguggcgaagugcaacgagaagcacgacgaggaguucugcgacaugcugcgccuguucgacuucaacaagcaggccaucaagcggcucaagacgccggcccagauguccauccagcugaucaacaaggccgugaacgcccugaucaacgaccagcucaucaugaagaaccaccuccgcgacaucaugggcauccccuacugcaacuacagccgguacugcuaccugaaccacaccgucaccgggaagaccucccugccccgcugcugccuggugagcaacggcuccuaccugaacgagacgcacuucagcgacgacaucgagcagcaggcggacaacaugaucaccgagaugcuccagaaggaguacauggaccggcagggcaagaccccgcuggggcugguggaccuguucgucuucuccaccagcuucuaccucaucuccaucuuccugcaccuggugaagauccccacgcaccgccacaucgugggcaagcccugccccaagccgcaccggcucaaccacauggggaucugcagcugcggccuguacaagcaccccgggguccccgugaaguggaagcgcugaggacuagucccuguucccagagcccacuuuuuuuucuuuuuuugaaauaaaauagccugucuuucagaucucaaaggcucuuuucagagccaccaaaaaaaaaaaaaaaaaaaaaaaaaaaaaaaaaaaaaaaaaaaaaaaaaaaaaaaaaaaaaaaaaaaaaaaaaaaaaaaaaaaaaaaaaaaaaaaaaaaaa

SEQ ID NO: 31752 - RNA, 1745 nt, Artificial Sequence
  mRNA product Design a-1 (hSL-A100) comprising derived and/or modified sequence from LASV(GA391;Clade III)__CAA36645__GPCmut7 (opt1)
aggagagucccgcagucggcguccagcggcucugcuuguucgugugugugucguugcaggccuuauucaagcuuaccaugggccagaucgugaccuucuuccaggaggucccccacgugaucgaggaggugaugaacaucguccugaucgcccucagcauccuggccauccugaaggggcucuacaacguggcgaccugcggccugaucgggcuggugacguuccuccugcuguccggccgcagcugcucccucaucuacaaggggaccuacgagcugcagacccuggagcucaacauggagacccugaacaugacgaugccgcugagcugcaccaagaacaacucccaccacuacauccgggucggcaacgagaccggccucgagcugacccugacgaacaccagcauccucaaccacaaguucugcaaccuguccgacgcccacaagcgcaaccuguacgaccacagccucauguccaucaucagcaccuuccaccuguccauccccaacuucaaccaguacgaggccaugagcugcgacuucaacgggggcaagaucaccgugcaguacaaccugucccacagcuucgccguggacgccgcggggcacugcggcacgcucgccaacgggguccugcagaccuucaugcggauggccuggggcggcuccuacaucgcccuggacagcgggcgcggcaacugggacugcaucaugaccuccuaccaguaccucaucauccagaacaccacgugggacgaccacugccaguucagccggcccucccccaucggguaccugggccugcucagccagcgcacccgggacaucuacaucagccgccggcugcugggcaccuucaccuggacgcucuccgacagcgaggggaacgagaccccgggcggguacugccugacccgcuggaugcugaucgaggcggagcucaagugcuucggcaacaccgccguggccaagugcaacgagaagcacgacgaggaguucugcgacaugcugcggcuguucgacuucaacaagcaggccauccgccggcucaagacgcccgcccagauguccauccagcugaucaacaaggcggugaacgcccugaucaacgaccagcucaucaugaagaaccaccuccgcgacaucauggggauccccuacugcaacuacagccgguacugcuaccugaaccacaccuccaccggcaagaccagccugccccgcugcugccugaucuccaacggcagcuaccugaacgagacgaaguucuccgacgacaucgagcagcaggccgacaacaugaucaccgagaugcugcagaaggaguacaucgaccggcaggggaagaccccgcucggccuggucgaccuguucguguucagcaccuccuucuaccucaucagcaucuuccugcaccuggugaagauccccacgcaccgccacaucgucgggaagcccugccccaagccgcaccggcucaaccacaugggcaucugcuccugcgggcuguacaagcagcccggcgugcccgugcgcuggaagcggugaggacuagucccuguucccagagcccacuuuuuuuucuuuuuuugaaauaaaauagccugucuuucagaucucaaaggcucuuuucagagccaccaaaaaaaaaaaaaaaaaaaaaaaaaaaaaaaaaaaaaaaaaaaaaaaaaaaaaaaaaaaaaaaaaaaaaaaaaaaaaaaaaaaaaaaaaaaaaaaaaaaaa

SEQ ID NO: 31753 - RNA, 1748 nt, Artificial Sequence
  mRNA product Design a-1 (hSL-A100) comprising derived and/or modified sequence from LASV(AV;Clade V)__CCA30314__GPCmut7 (opt1)
aggagagucccgcagucggcguccagcggcucugcuuguucgugugugugucguugcaggccuuauucaagcuuaccaugggccagaucgugaccuucuuccaggaggucccccacgugaucgaggaggugaugaacaucguccugaucgcccucagcauccuggccgugcugaaggggcucuacaacaucgcgaccugcggccugaucgggcugaucacguuccuccugcugugcggccgcuccugcagcuccaaccucuacaaggggguguacgagcugcagagccuggaccucaacauggagacccugaacaugaccaugccgcuguccugcaccaagaacaacagccaccacuacauccgggucggcaacgacacgggccucgagcugacccugaccaacaccuccauccucaaccacaaguucugcaaccugagcgacgcccacaagaaggaccuguacgaccacgcccucauguccaucaucagcacguuccaccuguccauccccaacuucaaccaguacgaggccaugagcugcgacuucaacgggggcaagaucuccgugcaguacaaccugagccacuccuacgccaucgacgcggccaaccacugcgggaccguggccaacggcauccuccagaccuucaugcgcauggccuggggcgggagcuacaucgcgcuggacuccggccgggggaacugggacugcaucaugaccagcuaccaguaccugaucauccagaacacgaccugggagaaccacugccaguucucccgccccagccccaucggcuaccucgggcugcugagccagcggacccgcgacaucuacaucucccggcgccuccugggcaccuucacguggacccugagcgacuccgagggcaacgccacccccgggggcuacugccucacccgguggaugcugaucgaggccgagcugaagugcuucgggaacacggccgucgccaagugcaacgagaagcacgacgaggaguucugcgacaugcuccgccuguucgacuucaacaagcaggcgaucagccggcugaaguccccggcccagaugagcauccagcucaucaacaaggccgugaacgcccugaucaacgaccagcugaucaugaagaaccaccuccgcgacaucaugggcauccccuacugcaacuacuccaaguacugcuaccugaaccacaccaucaccgggaagaccagccugcccaagugcugccucguguccaacggcagcuaccugaacgagacgcacuucuccgacgacaucgagcagcaggccgacaacaugaucaccgagaugcugcagaaggaguacauggagcggcagggcaagaccccgcuggggcucgucgaccuguucguguucagcaccuccuucuaccugaucagcaucuuccuccgccuggugaagauccccacgcaccggcacaucgucggcaagcccugccccaagccgcaccgccugaaccacauggggaucugcuccugcggccucuacaagcagcccggggugcccgugcgguggaagcgcugaggacuagucccuguucccagagcccacuuuuuuuucuuuuuuugaaauaaaauagccugucuuucagaucucaaaggcucuuuucagagccaccaaaaaaaaaaaaaaaaaaaaaaaaaaaaaaaaaaaaaaaaaaaaaaaaaaaaaaaaaaaaaaaaaaaaaaaaaaaaaaaaaaaaaaaaaaaaaaaaaaaaa

SEQ ID NO: 31754 - RNA, 1745 nt, Artificial Sequence
  mRNA product Design a-1 (hSL-A100) comprising derived and/or modified sequence from LASV(Togo/2016/7082;Clade VI)__AMR44577__GPCmut7 (opt1)
aggagagucccgcagucggcguccagcggcucugcuuguucgugugugugucguugcaggccuuauucaagcuuaccaugggccagaucaucaccuucuuccaggaggugccccacgucaucgaggaggugaugaacaucgugcugaucgcccucagccugcuggccauccucaagggggucuacaacguggcgaccugcggcaucaucgggcuggugacguuccuguuccucugcggccgcuccugcagccugaucuacaagggguccuacgagcugcagacccucgagcugaacauggagacccugaacaugaccaugccgcucagcugcacgaagaacuccagccaccacuacauccgggucggcaacgagaccggccuggagcugacccucaccaacacguccaucaucaaccacaaguucugcaaccugagcgacgcccacaagcgcaaccuguacgaccacgcccucauguccauccugagcaccuuccaccuguccauccccaacuucaaccaguacgaggccaugagcugcgacuucaacgggggcaagaucuccgugcaguacaaccucagccacgccuacgcgguggacgccgccgagcacugcgggaccgucgccaacggcgugcugcagaccuucaugcggauggcguggggcggguccuacaucgcccuggacagcggccgcgggaacugggacugcaucaugacguccuaccaguaccucaucauccagaacaccaccugggaggaccacugccaguucagccggcccucccccaucggcuaccuggggcugcucagccagcgcacccgggacaucuacaucagccgccggcugcugggcacguucaccuggacccucuccgacagcgagggcaacgagacccccgggggcuacugccugacgcgcuggaugcugaucgaggccgagcucaagugcuucgggaacaccgccguggccaagugcaacgagaagcacgacgaggaguucugcgacaugcugcggcuguucgacuucaacaagcaggcgauccagcgccucaaguccccggcccagaugagcauccagcugaucaacaaggccgucaacgcccugaucaacgaccagcucaucaugaagaaccaccuccgggacaugaugggcauccccuacugcaacuacuccaaguacugcuaccugaaccacaccagcuccgggcgcaccagccugcccaagugcugccugguguccaacggcagcuaccugaacgagacgcacuucuccgacgacaucgagcagcaggccgacaacaugaucaccgagaugcuccagaaggaguacaucgaccggcagggcaagaccccgcuggggcugguggaccuguucgucuucagcaccuccuucuaccucaucagcaucuuccugcaccugaucaagauccccacgcaccgccacaucgugggcaagcccugccccaagccgcaccggcucaaccacauggggaucugcuccugcggccuguacaagcagcccggggugcccacccgcuggaagcggugaggacuagucccuguucccagagcccacuuuuuuuucuuuuuuugaaauaaaauagccugucuuucagaucucaaaggcucuuuucagagccaccaaaaaaaaaaaaaaaaaaaaaaaaaaaaaaaaaaaaaaaaaaaaaaaaaaaaaaaaaaaaaaaaaaaaaaaaaaaaaaaaaaaaaaaaaaaaaaaaaaaaa

SEQ ID NO: 31755 - RNA, 1745 nt, Artificial Sequence
  mRNA product Design a-1 (hSL-A100) comprising derived and/or modified sequence from LASV(KAK-428;Clade n.d. (VII))__ANH09740__GPCmut7 (opt1)
aggagagucccgcagucggcguccagcggcucugcuuguucgugugugugucguugcaggccuuauucaagcuuaccaugggccagaucgugaccuucuuccaggaggucccccacgugaucgaggaggugaugaacaucguccugaucgcccucagccugcuggccauccucaaggggcuguacaacuucgcgaccugcggcgugaucgggcugaucacguuccuccugcugugcggccgcuccugcagcgccaccuacaaggggcaguacgagcuccagacccuggagcugaacauggagucccucaacaugaccaugccgcugagcugcacgaagaacaacucccaccacuacauccgggccggcaacaacaccggccuggagcucacccugaccaacacgagcaucaucucccacaaguucugcaaccugagcgacgcccacaagaagaaccucuacgaccacacccugauguccaucaucaccaccuuccaccugagcauccccaacuucaaccaguacgaggccauguccugcgacuucaacgggggcaagaucagcauccaguacaaccucucccacagcuacgcgggggacgccgcccagcacugcggcacgguggccaacgggguccugcagaccuucaugcgcauggcguggggcggcuccuaccuggcccucgacagcgggcggcgcggcugggacugcaucaucuccagcuaccaguaccugaucauccagaacaccaccugggacgaccacugccaguucucccggcccagccccaucggguaccugggcuucgugagccagaagacgcgcgacaucuacaucucccggcgccuccugggcaccuucaccuggacccugagcgacuccgaggggcacgacaugccgggcggguacugccucacgcgguggaugcugaucgaggccgaccugaagugcuucggcaacaccgccguggccaagugcaacgagaagcacgacgaggaguucugcgacauguggcgccucuucgacuucaacaagcaggcgauccagcggcugaaggcccccgcccagaugaacauccagcugaucaacaaggccgucaacgcccucaucaacgaccagcugaugaugaagaaccaccuccgcgacaucauggggauccccuacugcaacuacagcaaguucugcuaccugaacaacaccaccacgggccggaccucccugccccgcugcugccugaucagcaacggcuccuaccucaacgagacccacuucagcgacgacaucgagcagcaggcggacaacaugaucaccgagaugcugcagaaggaguacauggaccggcaggggaagacgccgcugggccucguggaccuguucguguucuccaccagcuucuaccugaucaccaucuuccugcaccucgucaagauccccacccaccgccacaucguggggaagcccugccccaagccgcaccggcugaaccacaugggcaucugcuccugcgggcuguacaagcagcccggcgugcccguccgcuggaagcggugaggacuagucccuguucccagagcccacuuuuuuuucuuuuuuugaaauaaaauagccugucuuucagaucucaaaggcucuuuucagagccaccaaaaaaaaaaaaaaaaaaaaaaaaaaaaaaaaaaaaaaaaaaaaaaaaaaaaaaaaaaaaaaaaaaaaaaaaaaaaaaaaaaaaaaaaaaaaaaaaaaaaa

SEQ ID NO: 31756 - RNA, 1745 nt, Artificial Sequence; identical to SEQ ID NO: 31750
  mRNA product Design a-1 (hSL-A100) comprising derived and/or modified sequence from LASV(Pinneo-NIG-1969;Clade I)__AIT17836__GPCmut7 (opt1)

SEQ ID NO: 31757 - RNA, 1745 nt, Artificial Sequence
  mRNA product Design a-1 (hSL-A100) comprising derived and/or modified sequence from LASV(ISTH0009-NIG-2011;Clade II)__AIT17404__GPCmut7 (opt1)
aggagagucccgcagucggcguccagcggcucugcuuguucgugugugugucguugcaggccuuauucaagcuuaccaugggccagaucaucaccuucuuccaggaggugccccacgucaucgaggaggugaugaacaucgugcugaucgcccucagccugcuggccauccucaaggggaucuacaacgucgcgaccugcggccuguucgggcugguguccuuccuccugcugugcggccgcagcugcuccacgaccuacaaggggguguacgagcuccagacccuggagcuggacauggccagccucaacaugaccaugccgcuguccugcacgaagaacaacagccaccacuacaucauggucggcaacgagaccggccuggagcucacccugaccaacacguccaucaucaaccacaaguucugcaaccugagcgacgcccacaagaagaaccucuacgaccacgcccugauguccaucaucagcaccuuccaccuguccauccccaacuucaaccaguacgaggccaugagcugcgacuucaacgggggcaagaucuccgugcaguacaaccucagccacgcguacgccguggacgccgccaaccacugcgggaccaucgcgaacggcguccugcagaccuucaugcggauggccuggggcggguccuacaucgcccuggacagcggcaagggguccugggacugcaucaugacgagcuaccaguaccucaucauccagaacaccaccugggaggaccacugccaguucucccgccccagccccaucggcuaccuggggcugcucagccagcggacccgcgacaucuacaucucccggcgccugcugggcacguucaccuggacccucagcgacuccgagggcaacgagacccccgggggcuacugccugacgcgguggaugcugaucgaggccgagcucaagugcuucgggaacaccgccguggcgaagugcaacgagaagcacgacgaggaguucugcgacaugcugcgccuguucgacuucaacaagcaggccauccggcgccucaagaccccggcccagaugagcauccagcugaucaacaaggccgugaacgcccugaucaacgaccagcucaucaugaagaaccaccuccgggacaucaugggcauccccuacugcaacuacuccaaguacugcuaccugaaccacaccgucacggggaagaccagccugccccgcugcugccugguguccaacggcagcuaccugaacgagacccacuucuccgacgacaucgagcagcaggcggacaacaugaucaccgagcuccugcagaaggaguacauggaccggcagggcaagacgccgcuggggcugguggaccucuucgucuucagcaccuccuucuaccugaucagcaucuuccugcaccucaucaagauccccacccaccgccacaucaccggcaagcccugccccaagccgcaccggcugaaccacauggggaucugcuccugcggccuguacaagcaccccggggugcccgugaaguggaagcgcugaggacuagucccuguucccagagcccacuuuuuuuucuuuuuuugaaauaaaauagccugucuuucagaucucaaaggcucuuuucagagccaccaaaaaaaaaaaaaaaaaaaaaaaaaaaaaaaaaaaaaaaaaaaaaaaaaaaaaaaaaaaaaaaaaaaaaaaaaaaaaaaaaaaaaaaaaaaaaaaaaaaaa

SEQ ID NO: 31758 - RNA, 1745 nt, Artificial Sequence
  mRNA product Design a-1 (hSL-A100) comprising derived and/or modified sequence from LASV(ISTH2010-NIG-2012;Clade II)__AIT17482__GPCmut7 (opt1)
aggagagucccgcagucggcguccagcggcucugcuuguucgugugugugucguugcaggccuuauucaagcuuaccaugggccagaucaucaccuucuuccaggaggugccccacgucaucgaggaggugaugaacaucgugcugaucgcccucagccugcuggccauccucaaggggaucuacaacgucgcgaccugcggccuguucgggcugguguccuuccuccugcugugcggccgcagcugcuccacgaccuacaaggggguguacgagcuccagacccuggagcuggacauggccagccucaacaugaccaugccgcuguccugcacgaagaacaacagccaccacuacaucauggucggcaacgagaccggccuggagcucacccugaccaacacguccaucaucaaccacaaguucugcaaccugagcgacgcccacaagaagaaccucuacgaccacgcccugauguccaucaucagcaccuuccaccuguccauccccaacuucaaccaguacgaggccaugagcugcgacuucaacgggggcaagaucuccgugcaguacaaccucagccacgcguacgccguggacgccgccaaccacugcgggaccaucgcgaacggcguccugcagaccuucaugcggauggccuggggcggguccuacaucgcccuggacagcggcaagggguccugggacugcaucaugacgagcuaccaguaccucaucauccagaacaucaccugggaggaccacugccaguucucccgccccagccccaucggcuaccuggggcugcucagccagcggacccgcgacaucuacaucucccggcgccugcugggcaccuucacguggacccucagcgacuccgagggcaacgagacccccgggggcuacugccugacccgguggaugcugaucgaggccgagcucaagugcuucgggaacacggccguggcgaagugcaacgagaagcacgacgaggaguucugcgacaugcugcgccuguucgacuucaacaagcaggccauccggcgccucaagaccccggcccagaugagcauccagcugaucaacaaggccgugaacgcccugaucaacgaccagcucaucaugaagaaccaccuccgggacaucaugggcauccccuacugcaacuacuccaaguacugcuaccugaaccacaccgucaccgggaagacgagccugccccgcugcugccugguguccaacggcagcuaccugaacgagacccacuucuccgacgacaucgagcagcaggcggacaacaugaucaccgagcuccugcagaaggaguacaucgaccggcagggcaagaccccgcuggggcugguggaccucuucgucuucagcacguccuucuaccugaucagcaucuuccugcaccucgugaagauccccacccaccgccacguggucggcaagcccugccccaagccgcaccggcugaaccacauggggaucugcuccugcggccuguacaagcaccccggggugcccgugaaguggaagcgcugaggacuagucccuguucccagagcccacuuuuuuuucuuuuuuugaaauaaaauagccugucuuucagaucucaaaggcucuuuucagagccaccaaaaaaaaaaaaaaaaaaaaaaaaaaaaaaaaaaaaaaaaaaaaaaaaaaaaaaaaaaaaaaaaaaaaaaaaaaaaaaaaaaaaaaaaaaaaaaaaaaaaa

SEQ ID NO: 31759 - RNA, 1745 nt, Artificial Sequence
  mRNA product Design a-1 (hSL-A100) comprising derived and/or modified sequence from LASV(Lassa virus/H.sapiens-wt/NGA/2015/ISTH_0543;Clade II)__AVO03639__GPCmut7 (opt1)
aggagagucccgcagucggcguccagcggcucugcuuguucgugugugugucguugcaggccuuauucaagcuuaccaugggccagaucaucaccuucuuccaggaggugccccacgucaucgaggaggugaugaacaucgugcugaucgcccucagccugcuggccauccucaaggggaucuacaacgucgcgaccugcggccuguucgggcugguguccuuccuccugcugugcggccgcagcugcuccacgaccuacaaggggguguacgagcuccagacccuggagcuggacauggccaaccucaacaugaccaugccgcugagcugcacgaagaacaacucccaccacuacaucauggucggcaacgagaccggccuggagcucacccugaccaacacgagcaucaucaaccacaaguucugcaaccuguccgacgcccacaagaagaaccucuacgaccacgcccugaugagcaucaucuccaccuuccaccugagcauccccaacuucaaccaguacgaggccauguccugcgacuucaacgggggcaagaucagcgugcaguacaaccucucccacaccuacgcgguggacgccgccaaccacugcgggaccaucgccaacggcguccugcagacguucaugcggauggcguggggcgggagcuacaucgcccuggacuccggcaaggggagcugggacugcaucaugaccuccuaccaguaccucgugauccagaacaccaccugggaggaccacugccaguucagccgccccucccccaucggcuaccuggggcugcucagccagcggacgcgcgacaucuacaucagccggcgccugcugggcaccuucaccuggacccucuccgacagcgagggcaacgagacgcccgggggcuacugccugacccgguggaugcugaucgaggccgagcucaagugcuucgggaacaccgccguggccaagugcaacgagaagcacgacgaggaguucugcgacaugcugcgccuguucgacuucaacaagcaggcgauccggcgccucaagaccccggcccagauguccauccagcugaucaacaaggccgucaacgcccugaucaacgaccagcucaucaugaagaaccaccuccgggacaucaugggcauccccuacugcaacuacagcaaguacugcuaccugaaccacacggugaccgggaagaccucccugccccgcugcugccuggugagcaacggcuccuaccugaacgagacccacuucagcgacgacaucgagcagcaggccgacaacaugaucacggagcuccugcagaaggaguacaucgaccggcagggcaagaccccgcuggggcuggucgaccucuucguguucuccaccagcuucuaccugaucuccaucuuccugcaccucgugaagauccccacccaccgccacaucacgggcaagcccugccccaagccgcaccggcugaaccacauggggaucugcagcugcggccuguacaagcaccccgggguccccgugaaguggaagcgcugaggacuagucccuguucccagagcccacuuuuuuuucuuuuuuugaaauaaaauagccugucuuucagaucucaaaggcucuuuucagagccaccaaaaaaaaaaaaaaaaaaaaaaaaaaaaaaaaaaaaaaaaaaaaaaaaaaaaaaaaaaaaaaaaaaaaaaaaaaaaaaaaaaaaaaaaaaaaaaaaaaaaa

SEQ ID NO: 31760 - RNA, 1745 nt, Artificial Sequence
  mRNA product Design a-1 (hSL-A100) comprising derived and/or modified sequence from LASV(Lassa virus/H.sapiens-wt/NGA/2016/ISTH_0009;Clade II)__AVO03571__GPCmut7 (opt1)
aggagagucccgcagucggcguccagcggcucugcuuguucgugugugugucguugcaggccuuauucaagcuuaccaugggccagaucaucaccuucuuccaggaggugccccacgucaucgaggaggugaugaacaucgugcugaucgcccucagccugcuggccauccucaaggggaucuacaacgucgcgaccugcggccugcuggggcucguguccuuccugcugcucugcggccgcagcugcuccacgaccuacaaggggguguacgagcugcagacccuggagcucgacauggccagccugaacaugaccaugccgcuguccugcacgaagaacaacagccaccacuacaucauggucggcaacgagaccggccucgagcugacccugaccaacacguccaucaucaaccacaaguucugcaaccucagcgacgcccacaagaagaaccuguacgaccacgcccugauguccaucaucagcaccuuccaccucuccauccccaacuucaaccaguacgaggccaugagcugcgacuucaacgggggccggaucuccgugcaguacaaccugagccacuccuacgcgguggacgccgccaaccacugcgggaccaucgccaacggcguccugcagaccuucaugcgcauggcguggggcgggagcuacaucgcccucgacuccggcaaggggagcugggacugcaucaugacguccuaccaguaccugaucauccagaacaccaccugggaggaccacugccaguucagccggcccagccccaucggcuaccuggggcuccugucccagcgcacccgggacaucuacaucagccgccggcugcucggcacguucaccuggacccuguccgacagcgagggcaacgagacccccgggggcuacugccugacgcgcuggaugcucaucgaggccgagcugaagugcuucgggaacaccgccguggccaagugcaacgagaagcacgacgaggaguucugcgacaugcugcggcuguucgacuucaacaagcaggcgauccgccggcugaagaccccggcccagauguccauccagcugaucaacaaggccgugaacgcccucaucaacgaccagcugaucaugaagaaccaccuccgcgacaucaugggcauccccuacugcaacuacagcaaguacugcuaccucaaccacaccgucacggggaagaccucccugccccggugcugccuggugagcaacggcuccuaccucaacgagacccacuucagcgacgacaucgagcagcaggccgacaacaugaucaccgagcugcugcagaaggaguacaucgaccgccagggcaagacgccgcuggggcucguggaccuguucgucuucuccaccagcuucuaccugaucuccaucuuccuccaccuggugaagauccccacccaccggcacaucaccggcaagcccugccccaagccgcaccgccugaaccacauggggaucugcagcugcggccucuacaaccaccccggggugcccgucaaguggaagcggugaggacuagucccuguucccagagcccacuuuuuuuucuuuuuuugaaauaaaauagccugucuuucagaucucaaaggcucuuuucagagccaccaaaaaaaaaaaaaaaaaaaaaaaaaaaaaaaaaaaaaaaaaaaaaaaaaaaaaaaaaaaaaaaaaaaaaaaaaaaaaaaaaaaaaaaaaaaaaaaaaaaaa

SEQ ID NO: 31761 - RNA, 1745 nt, Artificial Sequence
  mRNA product Design a-1 (hSL-A100) comprising derived and/or modified sequence from LASV(Lassa virus/H.sapiens-wt/NGA/2016/ISTH_0017;Clade II)__AVO03567__GPCmut7 (opt1)
aggagagucccgcagucggcguccagcggcucugcuuguucgugugugugucguugcaggccuuauucaagcuuaccaugggccagaucaucaccuucuuccaggaggugccccacgucaucgaggaggugaugaacaucgugcugaucgcccucagccugcuggccauccucaaggggaucuacaacgucgcgaccugcggccuguucgggcugguguccuuccuccugcugugcggccgcagcugcuccacgaccuacaaggggguguacgagcuccagacccuggagcuggacauggccagccucaacaugaccaugccgcuguccugcacgaagaacaacagccaccacuacaucauggucggcaacgagaccggccuggagcucacccugaccaacacguccaucaucaaccacaaguucugcaaccugagcgacgcccacaagaagaaccucuacgaccacgcccugauguccaucaucagcaccuuccaccuguccauccccaacuucaaccaguacgaggccaugagcugcgacuucaacgggggcaagaucuccgugcaguacaaccucagccacaccuacgcgaucgacgccgccaaccacugcgggaccaucgccaacggcgugcugcagacguucaugcggauggcguggggcggguccuacaucgcccuggacagcggcaagggguccugggacugcaucaugaccagcuaccaguaccucaucauccagaacaccaccugggaggaccacugccaguucucccgccccagccccaucggcuaccuggggcugcucagccagcggacgcgcgacaucuacaucucccggcgccugcugggcaccuucaccuggacccucagcgacuccgagggcaacgagacgcccgggggcuacugccugacccgguggaugcugaucgaggccgagcucaagugcuucgggaacaccgccgucgccaagugcaacgagaagcacgacgaggaguucugcgacaugcugcgccuguucgacuucaacaagcaggcgauccggcgccucaagaccccggcccagaugagcauccagcugaucaacaaggccgugaacgcccugaucaacgaccagcucaucaugaagaaccaccuccgggacaucaugggcauccccuacugcaacuacuccaaguacugcuaccugaaccacacggugaccgggaagaccagccugccccgcugcugccuggucuccaacggcagcuaccugaacgagacccacuucuccgacgacaucgagcagcaggccgacaacaugaucacggagcuccugcagaaggaguacauggaccggcagggcaagaccccgcuggggcugguggaccucuucguguucagcaccuccuucuaccugaucagcaucuuccugcaccucguccgcauccccacccaccggcacgugaucggcaagcccugccccaagccgcaccgccugaaccacauggggaucugcuccugcggccuguacaagcaccccggggugcccgucaaguggaagcggugaggacuagucccuguucccagagcccacuuuuuuuucuuuuuuugaaauaaaauagccugucuuucagaucucaaaggcucuuuucagagccaccaaaaaaaaaaaaaaaaaaaaaaaaaaaaaaaaaaaaaaaaaaaaaaaaaaaaaaaaaaaaaaaaaaaaaaaaaaaaaaaaaaaaaaaaaaaaaaaaaaaaa

SEQ ID NO: 31762 - RNA, 1745 nt, Artificial Sequence
  mRNA product Design a-1 (hSL-A100) comprising derived and/or modified sequence from LASV(Lassa virus/H.sapiens-wt/NGA/2018/ISTH_0959;Clade II)__AVV65099__GPCmut7 (opt1)
aggagagucccgcagucggcguccagcggcucugcuuguucgugugugugucguugcaggccuuauucaagcuuaccaugggccagaucaucaccuucuuccaggaggugccccacgucaucgaggaggugaugaacaucgugcugaucgcccucagccugcuggccauccucaaggggaucuacaacgucgugaccugcggccuguucgggcugguguccuuccuccugcugugcggccgcagcugcuccacgaccuacaagggggucuacgagcuccagacccuggagcuggacauggcgagccucaacaugaccaugccgcuguccugcacgaagaacaacagccaccacuacaucauggugggcaacgagaccggccuggagcucacccugaccaacacguccaucaucaaccacaaguucugcaaccugagcgacgcccacaagaagaaccucuacgaccacgcccugauguccaucaucagcaccuuccaccuguccauccccaacuucaaccaguacgaggccaugagcugcgacuucaacgggggcaagaucuccgugcaguacaaccucagccacgccuacgcgaucgacgccgccaaccacugcgggaccaucgccaacggcguccugcagaccuucaugcggauggcguggggcggguccuacaucgcccuggacagcggcaagggguccugggacugcaucaugacgagcuaccaguaccucaucauccagaacaccaccugggaggaccacugccaguucucccgccccagccccaucggcuaccuggggcugcucagccagcggacccgcgacaucuacaucucccggcgccugcugggcacguucaccuggacccucagcgacuccgagggcaacgagacccccgggggcuacugccugacgcgguggaugcugaucgaggccgagcucaagugcuucgggaacaccgccguggccaagugcaacgagaagcacgacgaggaguucugcgacaugcugcgccuguucgacuucaacaagcaggcgauccggcgccucaagaccccggcccagaugagcauccagcugaucaacaaggccgugaacgcccugaucaacgaccagcucaucaugaagaaccaccuccgggacaucaugggcauccccuacugcaacuacuccaaguacugcuaccugaaccacaccgucacggggaagaccagccugccccgcugcugccugguguccaacggcagcuaccugaacgagacccacuucuccgacgacaucgagcagcaggccgacaacaugaucaccgagcuccugcagaaggaguacaucgaccggcagggcaagacgccgcuggggcugguggaccucuucgucuucagcaccuccuucuaccugaucagcaucuuccugcaccucgugaagauccccacccaccgccacgugaucggcaagcccugccccaagccgcaccggcugaaccacauggggaucugcuccugcggccuguacaagcaccccgggguccccgugaaguggaagcgcugaggacuagucccuguucccagagcccacuuuuuuuucuuuuuuugaaauaaaauagccugucuuucagaucucaaaggcucuuuucagagccaccaaaaaaaaaaaaaaaaaaaaaaaaaaaaaaaaaaaaaaaaaaaaaaaaaaaaaaaaaaaaaaaaaaaaaaaaaaaaaaaaaaaaaaaaaaaaaaaaaaaaa

SEQ ID NO: 31763 - RNA, 1745 nt, Artificial Sequence
  mRNA product Design a-1 (hSL-A100) comprising derived and/or modified sequence from LASV(LASV003-NIG-2008;Clade II)__AIT17580__GPCmut7 (opt1)
aggagagucccgcagucggcguccagcggcucugcuuguucgugugugugucguugcaggccuuauucaagcuuaccaugggccagaucaucaccuucuuccaggaggugccccacgucaucgaggaggugaugaacaucgugcugaucgcccucagccugcuggccauccucaaggggaucuacaacgucgcgaccugcggccuguucgggcugguguccuuccuccugcugugcggccgcagcugcuccacgaccuacaaggggguguacgagcuccagacccuggagcuggacauggccagccucaacaugaccaugccgcuguccugcacgaagaacaacagccaccacuacaucauggucggcaacgagaccggccuggagcucacccugaccaacacguccaucaucaaccacaaguucugcaaccugagcgacgcccacaagaagaaccucuacgaccacgcccugauguccaucaucagcaccuuccaccuguccauccccaacuucaaccaguacgaggccaugagcugcgacuucaacgggggcaagaucuccgugcaguacaaccucagccacaccuacgcgguggacgccgccaaccacugcgggaccaucgccaacggcguccugcagacguucaugcggauggcguggggcggguccuacaucgcccuggacagcggcaagggguccugggacugcaucaugaccagcuaccaguaccucaucauccagaacaccaccugggaggaccacugccaguucucccgccccagccccaucggcuaccuggggcugcucagccagcggacgcgcgacaucuacaucucccggcgccugcugggcaccuucaccuggacccucagcgacuccgagagcaacgagacgccgggcggguacugccugacccgguggaugcugaucgaggccgagcucaagugcuucggcaacaccgccguggccaagugcaacgagaagcacgacgaggaguucugcgacaugcugcgccuguucgacuucaacaagcaggcgauccggcgccucaaggcccccgcccagauguccauccagcugaucaacaaggccgugaacgcccugaucaacgaccagcucaucaugaagaaccaccuccgggacaucauggggauccccuacugcaacuacagcaaguacugcuaccugaaccacaccgucacgggccgcaccucccugccccggugcugccuggugagcaacggguccuaccugaacgagacccacuucagcgacgacaucgagcagcaggcggacaacaugaucaccgagcuccugcagaaggaguacauggaccgccagggcaagacgccgcugggccugguggaccucuucgucuucuccaccagcuucuaccugaucuccaucuuccugcaccucgugaagauccccacccaccggcacgugaucgggaagcccugccccaagccgcaccgccugaaccacaugggcaucugcagcugcgggcuguacaagcaccccggcguccccgugaaguggaagcggugaggacuagucccuguucccagagcccacuuuuuuuucuuuuuuugaaauaaaauagccugucuuucagaucucaaaggcucuuuucagagccaccaaaaaaaaaaaaaaaaaaaaaaaaaaaaaaaaaaaaaaaaaaaaaaaaaaaaaaaaaaaaaaaaaaaaaaaaaaaaaaaaaaaaaaaaaaaaaaaaaaaaa

SEQ ID NO: 31764 - RNA, 1745 nt, Artificial Sequence
  mRNA product Design a-1 (hSL-A100) comprising derived and/or modified sequence from LASV(LASV035-NIG-2009;Clade II)__AIT17588__GPCmut7 (opt1)
aggagagucccgcagucggcguccagcggcucugcuuguucgugugugugucguugcaggccuuauucaagcuuaccaugggccagaucaucaccuucuuccaggaggugccccacgucaucgaggaggugaugaacaucgugcugaucgcccucagccugcuggccauccucaaggggaucuacaacgucgcgaccugcggccuguucgggcugguguccuuccuccugcugugcggccgcagcugcuccacgaccuacaaggggguguacgagcuccagacccuggagcuggacauggccagccucaacaugaccaugccgcuguccugcacgaagaacaacagccaccacuacaucauggucggcaacgagaccggccuggagcucacccugaccaacacguccaucaucaaccacaaguucugcaaccugagcgacgcccacaagaagaaccucuacgaccacgcccugauguccaucaucagcaccuuccaccuguccauccccaacuucaaccaguacgaggccaugagcugcgacuucaacgggggcaagaucuccgugcaguacaaccucagccacgcguacgccguggacgccgccaaccacugcgggaccaucgcgaacggcguccugcagaccuucaugcggauggccuggggcggguccuacaucgcccuggacagcggcaagggguccugggacugcaucaugacgagcuaccaguaccucaucauccagaacaccaccugggaggaccacugccaguucucccgccccagccccaucggcuaccuggggcugcucagccagcggacccgcgacaucuacaucucccggcgccugcugggcacguucaccuggacccucagcgacuccgagggcaacgagacccccgggggcuacugccugacgcgguggaugcugaucgaggccgagcucaagugcuucgggaacaccgccguggcgaagugcaacgagaagcacgacgaggaguucugcgacaugcugcgccuguucgacuucaacaagcaggccauccggcgccucaaggccccggcccagaugagcauccagcugaucaacaaggccgugaacgcgcugaucaacgaccagcucaucaugaagaaccaccuccgggacaucaugggcauccccuacugcaacuacuccaaguacugcuaccugaaccacaccgucaccgggaagacgagccugccccgcugcugccugguguccaacggcagcuaccugaacgagacccacuucuccgacgacaucgagcagcaggccgacaacaugaucaccgagcuccugcagaaggaguacaucgaccggcagggcaagaccccgcuggggcugguggaccucuucgucuucagcacguccuucuaccugaucagcaucuuccugcaccucgugaagauccccacccaccgccacgugaucggcaagcccugccccaagccgcaccggcugaaccacauggggaucugcuccugcggccuguacaagcaccccgggguccccgugaaguggaagcgcugaggacuagucccuguucccagagcccacuuuuuuuucuuuuuuugaaauaaaauagccugucuuucagaucucaaaggcucuuuucagagccaccaaaaaaaaaaaaaaaaaaaaaaaaaaaaaaaaaaaaaaaaaaaaaaaaaaaaaaaaaaaaaaaaaaaaaaaaaaaaaaaaaaaaaaaaaaaaaaaaaaaaa

SEQ ID NO: 31765 - RNA, 1745 nt, Artificial Sequence
  mRNA product Design a-1 (hSL-A100) comprising derived and/or modified sequence from LASV(LASV1000-NIG-2009;Clade II)__AIT17782__GPCmut7 (opt1)
aggagagucccgcagucggcguccagcggcucugcuuguucgugugugugucguugcaggccuuauucaagcuuaccaugggccagaucaucaccuucuuccaggaggugccccacgucaucgaggaggugaugaacaucgugcugaucgcccucagccugcuggccauccucaaggggaucuacaacgucgcgaccugcggccuguucgggcugguguccuuccuccugcugugcggccgcagcugcuccacgaccuacaaggggguguacgagcuccagacccuggagcuggacauggccagccucaacaugaccaugccgcuguccugcacgaagaacaacagccaccacuacaucauggucggcaacgagaccggccuggagcucacccugaccaacacguccaucaucaaccacaaguucugcaaccugagcgacgcccacaagaagaaccucuacgaccacgcccugauguccaucaucagcaccuuccaccuguccauccccaacuucaaccaguacgaggccaugagcugcgacuucaacgggggcaagaucuccgugcaguacaaccucagccacaccuacgcgguggacgccgccaaccacugcgggaccaucgccaacggcguccugcagacguucaugcggauggcguggggcggguccuacaucgcccuggacagcggcaagggguccugggacugcaucaugaccagcuaccaguaccucaucauccagaacaccaccugggaggaccacugccaguucucccgccccagccccaucggcuaccuggggcugcucagccagcggacgcgcgacaucuacaucucccggcgccugcugggcaccuucaccuggacccucagcgacuccgagggcaacgagacgcccgggggcuacugccugacccgguggaugcugaucgaggccgagcucaagugcuucgggaacaccgccguggccaagugcaacgagaagcacgacgaggaguucugcgacaugcugcgccuguucgacuucaacaagcaggcgaucaagcggcucaagaccccggcccagaugagcauccagcugaucaacaaggccgugaacgcccugaucaacgaccagcucaucaugaagaaccaccuccgcgacaucaugggcauccccuacugcaacuacuccaaguacugcuaccugaaccacacggucaccgggaagaccagccugccccggugcugccugguguccaacggcagcuaccugaacgagacccacuucuccgacgacaucgagcagcaggccgacaacaugaucacggagcuccugcagaaggaguacaucgaccgccagggcaagaccccgcuggggcugguggaccucuucgucuucagcaccuccuucuaccugaucagcaucuuccugcaccucgugaagauccccacccaccggcacguggucggcaagcccugccccaagccgcaccgccugaaccacauggggaucugcuccugcggccuguacaagcaccccggggugcccgugaaguggaagcggugaggacuagucccuguucccagagcccacuuuuuuuucuuuuuuugaaauaaaauagccugucuuucagaucucaaaggcucuuuucagagccaccaaaaaaaaaaaaaaaaaaaaaaaaaaaaaaaaaaaaaaaaaaaaaaaaaaaaaaaaaaaaaaaaaaaaaaaaaaaaaaaaaaaaaaaaaaaaaaaaaaaaa

SEQ ID NO: 31766 - RNA, 1745 nt, Artificial Sequence
  mRNA product Design a-1 (hSL-A100) comprising derived and/or modified sequence from LASV(LASV221-NIG-2010;Clade II)__AIT17624__GPCmut7 (opt1)
aggagagucccgcagucggcguccagcggcucugcuuguucgugugugugucguugcaggccuuauucaagcuuaccaugggccagaucaucaccuucuuccaggaggugccccacgucaucgaggaggugaugaacaucgugcugaucgcccucagccugcuggccauccucaaggggaucuacaacgucgcgaccugcggccuguucgggcugguguccuuccuccugcugugcggccgcagcugcuccacgaccuacaaggggguguacgagcuccagacccuggagcuggacauggccagccucaacaugaccaugccgcuguccugcacgaagaacaacagccaccacuacaucauggucggcaacgagaccggccuggagcucacccugaccaacacguccaucaucaaccacaaguucugcaaccugagcgacgcccacaagaagaaccucuacgaccacgcccugauguccaucaucagcaccuuccaccuguccauccccaacuucaaccaguacgaggccaugagcugcgacuucaacgggggcaagaucuccgugcaguacaaccucagccacaccuacgcgaucgacgccgccaaccacugcgggaccaucgccaacggcgugcugcagacguucaugcggauggcguggggcggguccuacaucgcccuggacagcggcaagggguccugggacugcaucaugaccagcuaccaguaccucaucauccagaacaccaccugggaggaccacugccaguucucccgccccagccccaucggcuaccuggggcugcucagccagcggacgcgcgacaucuacaucucccggcgccugcugggcaccuucaccuggacccucagcgacuccgagggcaacgagacgcccgggggcuacugccugacccgguggaugcugaucgaggccgagcucaagugcuucgggaacaccgccgucgccaagugcaacgagaagcacgacgaggaguucugcgacaugcugcgccuguucgacuucaacaagcaggcgauccggcgccucaagaccccggcccagaugagcauccagcugaucaacaaggccgugaacgcccugaucaacgaccagcucaucaugaagaaccaccuccgggacaucaugggcauccccuacugcaacuacuccaaguacugcuaccugaaccacacggugaccgggaagaccagccugccccgcugcugccuggucuccaacggcagcuaccugaacgagacccacuucuccgacgacaucgagcagcaggccgacaacaugaucacggagaugcuccagaaggaguacauggaccggcagggcaagaccccgcuggggcugguggaccuguucguguucagcaccuccuucuaccucaucagcaucuuccugcaccuggucaagauccccacccaccgccacgugaucggcaagcccugccccaagccgcaccggcucaaccacauggggaucugcuccugcggccuguacaagcaccccggggugcccgucaaguggaagcgcugaggacuagucccuguucccagagcccacuuuuuuuucuuuuuuugaaauaaaauagccugucuuucagaucucaaaggcucuuuucagagccaccaaaaaaaaaaaaaaaaaaaaaaaaaaaaaaaaaaaaaaaaaaaaaaaaaaaaaaaaaaaaaaaaaaaaaaaaaaaaaaaaaaaaaaaaaaaaaaaaaaaaa

SEQ ID NO: 31767 - RNA, 1745 nt, Artificial Sequence
  mRNA product Design a-1 (hSL-A100) comprising derived and/or modified sequence from LASV(LASV237-NIG-2010;Clade II)__AIT17638__GPCmut7 (opt1)
aggagagucccgcagucggcguccagcggcucugcuuguucgugugugugucguugcaggccuuauucaagcuuaccaugggccagaucaucaccuucuuccaggaggugccccacgucaucgaggaggugaugaacaucgugcugaucgcccucagccugcuggccauccucaaggggaucuacaacgucgcgaccugcggccuguucgggcugguguccuuccuccugcugugcggccgcagcugcuccacgaccuacaaggggguguacgagcuccagacccuggagcuggacauggccagccucaacaugaccaugccgcuguccugcacgaagaacaacagccaccacuacaucauggucggcaacgagaccggccuggagcucacccugaccaacacguccaucaucaaccacaaguucugcaaccugagcgacgcccacaagaaggaccucuacgaccacgcccugauguccaucaucagcaccuuccaccuguccauccccaacuucaaccaguacgaggccaugagcugcgacuucaacgggggcaagaucuccgugcaguacaaccucagccacaccuacgcgguggacgccgccaaccacugcgggaccaucgccaacggcguccugcagacguucaugcggauggcguggggcggguccuacaucgcccuggacagcggcaagggguccugggacugcaucaugaccagcuaccaguaccucaucauccagaacaccaccugggaggaccacugccaguucucccgccccagccccaucggcuaccuggggcugcucagccagcggacgcgcgacaucuacaucucccggcgccugcugggcaccuucaccuggacccucagcgacuccgagggcaacgagacgcccgggggcuacugccugacccgguggaugcugaucgaggccgagcucaagugcuucgggaacaccgccguggccaagugcaacgagaagcacgacgaggaguucugcgacaugcugcgccuguucgacuucaacaagcaggcgauccggcgccucaagaccccggcccagaugagcauccagcugaucaacaaggccgugaacgcccugaucaacgaccagcucaucaugaagaaccaccuccgggacaucaugggcauccccuacugcaacuacuccaaguacugcuaccugaaccacacggucaccgggaagaccagccugccccgcugcugccugguguccaacggcagcuaccugaacgagacccacuucuccgacgacaucgagcagcaggccgacaacaugaucacggagcuccugcagaaggaguacauggaccggcagggcaagaccccgcuggggcugguggaccucuucgucuucagcaccuccuucuaccugaucagcaucuuccugcaccucaucaagauccccacccaccgccacaucacgggcaagcccugccccaagccgcaccggcugaaccacauggggaucugcuccugcggccuguacaagcaccccggggugcccgugaaguggaagcgcugaggacuagucccuguucccagagcccacuuuuuuuucuuuuuuugaaauaaaauagccugucuuucagaucucaaaggcucuuuucagagccaccaaaaaaaaaaaaaaaaaaaaaaaaaaaaaaaaaaaaaaaaaaaaaaaaaaaaaaaaaaaaaaaaaaaaaaaaaaaaaaaaaaaaaaaaaaaaaaaaaaaaa

SEQ ID NO: 31768 - RNA, 1745 nt, Artificial Sequence
  mRNA product Design a-1 (hSL-A100) comprising derived and/or modified sequence from LASV(LASV253-NIG-2011;Clade II)__AIT17670__GPCmut7 (opt1)
aggagagucccgcagucggcguccagcggcucugcuuguucgugugugugucguugcaggccuuauucaagcuuaccaugggccagaucaucaccuucuuccaggaggugccccacgucaucgaggaggugaugaacaucgugcugaucgcccucagccugcuggccauccucaaggggaucuacaacgucgcgaccugcggccuguucgggcugguguccuuccuccugcugugcggccgcagcugcuccacgaccuacaaggggguguacgagcuccagacccuggagcuggacauggccagccucaacaugaccaugccgcuguccugcacgaagaacaacagccaccacuacaucauggucggcaacgagaccggccuggagcucacccugaccaacacguccaucaucaaccacaaguucugcaaccugagcgacgcccacaagaagaaccucuacgaccacgcccugauguccaucaucagcaccuuccaccuguccauccccaacuucaaccaguacgaggccaugagcugcgacuucaacgggggcaagaucuccgugcaguacaaccucagccacaccuacgcgguggacgccgccaaccacugcgggaccaucgccaacggcguccugcagacguucaugcggauggcguggggcggguccuacaucgcccuggacagcggcaagggguccugggacugcaucaugaccagcuaccaguaccucaucauccagaacaccaccugggaggaccacugccaguucucccgccccagccccaucggcuaccuggggcugcucagccagcggacgcgcgacaucuacaucucccggcgccugcugggcaccuucaccuggacccucagcgacuccgagggcaacgagacgcccgggggcuacugccugacccgguggaugcugaucgaggccgagcucaagugcuucgggaacaccgccguggccaagugcaacgagaagcacgacgaggaguucugcgacaugcugcgccuguucgacuucaacaagcaggcgauccggcgccucaaggccccggcccagaugagcauccagcugaucaacaaggccgugaacgcccugaucaacgaccagcucaucaugaagaaccaccuccgggacaucaugggcauccccuacugcaacuacuccaaguacugcuaccugaaccacaccgucacggggcgcaccagccugccccggugcugccugguguccaacggcagcuaccugaacgagacccacuucuccgacgacaucgagcagcaggcggacaacaugaucaccgagcuccugcagaaggaguacaucgaccgccagggcaagacgccgcuggggcugguggaccucuucgucuucagcaccuccuucuaccugaucagcaucuuccugcaccucgugaagauccccacccaccggcacaucaucggcaagcccugccccaagccgcaccgccugaaccacauggggaucugcuccugcggccuguacaagcaccccggggugcccgucaaguggaagcggugaggacuagucccuguucccagagcccacuuuuuuuucuuuuuuugaaauaaaauagccugucuuucagaucucaaaggcucuuuucagagccaccaaaaaaaaaaaaaaaaaaaaaaaaaaaaaaaaaaaaaaaaaaaaaaaaaaaaaaaaaaaaaaaaaaaaaaaaaaaaaaaaaaaaaaaaaaaaaaaaaaaaa

SEQ ID NO: 31769 - RNA, 1745 nt, Artificial Sequence
  mRNA product Design a-1 (hSL-A100) comprising derived and/or modified sequence from LASV(LASV254-NIG-2011;Clade II)__AIT17674__GPCmut7 (opt1)
aggagagucccgcagucggcguccagcggcucugcuuguucgugugugugucguugcaggccuuauucaagcuuaccaugggccagaucaucaccuucuuccaggaggugccccacgucaucgaggaggugaugaacaucgugcugaucgcccucagccugcuggccauccucaaggggaucuacaacgucgcgaccugcggccuguucgggcugguguccuuccuccugcugugcggccgcagcugcuccacgaccuacaaggggguguacgagcuccagacccuggagcuggacaugaccaaccucaacaugacgaugccgcugagcugcaccaagaacaacucccaccacuacaucauggucggcaacgagaccggccuggagcucacccugacgaacaccagcaucaucaaccacaaguucugcaaccuguccgacgcccacaagaagaaccucuacaaccacgcccugaugagcaucaucuccaccuuccaccugagcauccccaacuucaaccaguacgaggccauguccugcgacuucaacgggggcaagaucagcgugcaguacaaccucucccacagcuacgccguggacgcggccaaccacugcgggaccaucgccaacggcguccugcagacguucaugcggauggccuggggcggguccuacaucgcgcuggacagcggcaaggggaacugggacugcaucaugaccuccuaccaguaccucaucauccagaacaccaccugggaggaccacugccaguucagccgccccucccccaucggcuaccuggggcugcucagccagcggacgcgcgacaucuacaucagccggcgccugcugggcaccuucaccuggacccucuccgacagcgagggcaacgagacgcccgggggcuacugccugacccgguggaugcugaucgaggccgagcucaagugcuucgggaacaccgccguggccaagugcaacgagaagcacgacgaggaguucugcgacaugcugcgccuguucgacuucaacaagcaggccauccggcgccucaagaccccggcgcaggccaacauccagcugaucaacaaggccgugaacgcccugaucaacgaccagcucaucaugaagaaccaccuccgggacaucaugggcauccccuacugcaacuacuccaaguacugcuaccugaaccacacggucaccgggaagaccagccugccccgcugcugccugguguccaacggcagcuaccugaacgagacccacuucuccgacgacaucgagcagcaggccgacaacaugaucacggagcuccugcagaaggaguacauggaccggcagggcaagaccccgcuggggcugguggaccucuucgucuucagcaccuccuucuaccugaucagcaucuuccugcaccucgugaagauccccacccaccgccacgugaucggcaagcccugccccaagccgcaccggcugaaccacauggggaucugcuccugcggccuguacaagcaccccgggguccccgugaaguggaagcgcugaggacuagucccuguucccagagcccacuuuuuuuucuuuuuuugaaauaaaauagccugucuuucagaucucaaaggcucuuuucagagccaccaaaaaaaaaaaaaaaaaaaaaaaaaaaaaaaaaaaaaaaaaaaaaaaaaaaaaaaaaaaaaaaaaaaaaaaaaaaaaaaaaaaaaaaaaaaaaaaaaaaaa

SEQ ID NO: 31770 - RNA, 1745 nt, Artificial Sequence
  mRNA product Design a-1 (hSL-A100) comprising derived and/or modified sequence from LASV(Nig08-A19;Clade III)__ADU56618__GPCmut7 (opt1)
aggagagucccgcagucggcguccagcggcucugcuuguucgugugugugucguugcaggccuuauucaagcuuaccaugggccagaucgugaccuucuuccaggaggucccccacgugaucgaggaggugaugaacaucguccugaucgcccucagcauccuggccauccugaaggggcucuacaacaucgcgaccugcggccugaucgggcuggugacguuccuccugcuguccggccgcagcugcuccaugaccuacaaggggguguacgagcuccagacccuggagcugaacaugaacacccucaacaugacgaugccgcugagcugcaccaagaacaacucccaccacuacaucauggucggcaacgagaccggccuggagcucacccugacgaacaccagccugcuccaccacaaguucugcaaccuguccgacgcccacaagaagaaccuguacgaccacacccucaugagcaucaucuccaccuuccaccugagcauccccaacuucaaccaguacgaggccauguccugcgacuucaacgggggcaagaucacggugcaguacaaccugagccacuccuacgccaucgacgccgcgaaccacugcgggaccguggccaacggcguccuccagaccuucaugcggauggccuggggcgggagcuacaucgcccuggacuccggccgcgggaagugggacugcaucaugaccagcuaccaguaccugaucauccagaacacgaccugggaggaccacugccaguucucccggcccagccccaucggcuaccucgggcugcugucccagcgcacccgggacaucuacaucagccgccggcuccugggcaccuucacguggacccugagcgacuccgagggcaacgagacccccgggggcuacugccucacccgcuggaugcugaucgaggcggagcugaagugcuucgggaacacggccguggccaagugcaacgagaagcacgacgaggaguucugcgacaugcuccggcuguucgacuucaacaagcaggccauccgccggcugaaggccccggcgcagaugagcauccagcucaucaacaaggccgugaacgcccugaucaacgaccagcugaucaugaagaaccaccuccgcgacaucaugggcauccccuacugcaacuacuccaaguacugcuaccugaaccacaccagcaccgggcggaccucccugccccgcugcugccucgucagcaacggcuccuaccugaacgagacgcacuucagcgacgacaucgagcagcaggccgacaacaugaucaccgagaugcugcagaaggaguaccuggaccggcagggcaagaccccgcucgggcugguggaccuguucguguucuccaccagcuucuaccucaucuccaucuuccugcaccuggucaagauccccacgcaccgccacaucgugggcaagcccugccccaagccgcaccggcucaaccacauggggaucugcagcugcggccuguacaagcagcccggggugcccguccgcuggaagcggugaggacuagucccuguucccagagcccacuuuuuuuucuuuuuuugaaauaaaauagccugucuuucagaucucaaaggcucuuuucagagccaccaaaaaaaaaaaaaaaaaaaaaaaaaaaaaaaaaaaaaaaaaaaaaaaaaaaaaaaaaaaaaaaaaaaaaaaaaaaaaaaaaaaaaaaaaaaaaaaaaaaaa

SEQ ID NO: 31771 - RNA, 1748 nt, Artificial Sequence
  mRNA product Design a-1 (hSL-A100) comprising derived and/or modified sequence from LASV(G1180-SLE-2010;Clade IV)__AIT17168__GPCmut7 (opt1)
aggagagucccgcagucggcguccagcggcucugcuuguucgugugugugucguugcaggccuuauucaagcuuaccaugggccagaucgugaccuucuuccaggaggucccccacgugaucgaggaggugaugaacaucguccugaucgcccucagcauccuggccgugcugaaggggcucuacaacuucgcgaccugcggccugguggggcugcucacguuccugcugcucugcggccgcuccugcaccgccagccgguacaagggggucuacgagcugcagacccuggagcucaacauggagacccugaacaugacgaugccgcuguccugcaccaagaacaacagccaccacuacaucauggugggcaacgagaccggccucgagcugacccugacgaacaccuccaucaucaaccacaaguucugcaaccucagcgacgcccacaagaagaaccuguacgaccacgcccugauguccaucaucagcaccuuccaccucuccauccccaacuucaaccaguacgaggccaugagcugcgacuucaacgggggcaagaucuccgugcaguacaaccugagccacuccuacgcgggggacgccgccaaccacugcggcaccgucgccaacggggugcugcagacguucaugcgcauggcguggggcggcagcuacaucgcccucgacuccgggcacggcagcugggacugcaucaugaccuccuaccaguaccugaucauccagaacaccaccugggaggaccacugccaguucagccggcccucccccaucggguaccugggccuccugagccagcgcacgcgggacaucuacaucagccgccggcugcucggcaccuucaccuggacccuguccgacagcgaggggaaggacacgccgggcggguacugccugacccgcuggaugcucaucgaggccgagcugaagugcuucggcaacaccgccguggccaagugcaacgagaagcacgacgaggaguucugcgacaugcugcggcuguucgacuucaacaagcaggcgauccagcgccugaaggcccccgcccagauguccauccagcugaucaacaaggccgucaacgcccucaucaacgaccagcugaucaugaagaaccaccuccgggacaucauggggauccccuacugcaacuacagcaaguacugcuaccucaaccacaccacgaccggcaagaccucccugcccaagugcugccuggugagcaacggcuccuaccucaacgagacccacuucagcgacgacaucgagcagcaggcggacaacaugaucacggagaugcugcagaaggaguacauggagcgccaggggaagaccccgcugggccugguggaccucuucgucuucuccaccagcuucuaccugaucuccaucuuccugcaccucgugaagauccccacccaccggcacaucgugggcaagagcugccccaagccccaccgccugaaccacauggggaucugcuccugcgggcuguacaagcagccgggcguccccgugaaguggaagcggugaggacuagucccuguucccagagcccacuuuuuuuucuuuuuuugaaauaaaauagccugucuuucagaucucaaaggcucuuuucagagccaccaaaaaaaaaaaaaaaaaaaaaaaaaaaaaaaaaaaaaaaaaaaaaaaaaaaaaaaaaaaaaaaaaaaaaaaaaaaaaaaaaaaaaaaaaaaaaaaaaaaaa

SEQ ID NO: 31772 - RNA, 1748 nt, Artificial Sequence
  mRNA product Design a-1 (hSL-A100) comprising derived and/or modified sequence from LASV(G1442-SLE-2011;Clade IV)__AIT17180__GPCmut7 (opt1)
aggagagucccgcagucggcguccagcggcucugcuuguucgugugugugucguugcaggccuuauucaagcuuaccaugggccagaucgugaccuucuuccaggaggucccccacgugaucgaggaggugaugaacaucguccugaucgcccucagcauccuggccgugcugaaggggcucuacaacguggcgaccugcggccugaucgggcuggucacguuccuccugcugugcggccgcuccugcaccaccacccucuacaaggggguguacgagcugcagacgcuggagcucaacauggagacccugaacaugaccaugccgcugagcugcaccaagaacaacucccaccacuacauccgggugggcaacgagacgggccucgagcugacccugaccaacaccagcaucaucaaccacaaguucugcaaccucuccgacgcccacaagaagaaccuguacgaccacgcccugaugagcaucaucuccacguuccaccucagcauccccaacuucaaccaguacgaggccauguccugcgacuucaacgggggcaagaucagcguccaguacaaccugucccacagcuacgccggggacgcggccaaccacugcggcaccguggccaacggggugcugcagaccuucaugcgcauggccuggggcggcuccuacaucgcgcucgacagcgggcggggcaacugggacugcaucaugaccuccuaccaguaccugaucauccagaacacgaccugggacgaccacugccaguucagccgccccucccccaucggguaccugggccuccugagccagcggacccgcgacgucuacaucucccggcgccugcucggcaccuucacguggacccugagcgacagcgaggggaaggacaccccgggcggguacugccugacccgguggaugcucaucgaggccgagcugaagugcuucggcaacacggccguggccaagugcaacgagaagcacgacgaggaguucugcgacaugcugcgccucuucgacuucaacaagcaggccauccagcggcugaaggcgcccgcccagauguccauccagcugaucaacaaggccgugaacgcccucaucaacgaccagcugaucaugaagaaccaccuccgcgacaucauggggauccccuacugcaacuacagcaaguacugcuaccugaacaacaccgccaccggcaagaccucccugcccaagugcugccugaucagcaacggcuccuaccucaacgagacgcacuucagcgacgacaucgagcaggaggcggacaacaugaucaccgagaugcugcagaaggaguacauggagcggcaggggaagaccccgcugggccuggucgaccucuucguguucuccaccagcuucuaccugaucuccaucuuccugcaccucgugaagauccccacgcaccgccacaucgucggcaagagcugccccaagccccaccggcugaaccacauggggaucugcuccugcgggcuguacaagcagccgggcgugcccgugcgcuggaagcggugaggacuagucccuguucccagagcccacuuuuuuuucuuuuuuugaaauaaaauagccugucuuucagaucucaaaggcucuuuucagagccaccaaaaaaaaaaaaaaaaaaaaaaaaaaaaaaaaaaaaaaaaaaaaaaaaaaaaaaaaaaaaaaaaaaaaaaaaaaaaaaaaaaaaaaaaaaaaaaaaaaaaa

SEQ ID NO: 31773 - RNA, 1748 nt, Artificial Sequence
  mRNA product Design a-1 (hSL-A100) comprising derived and/or modified sequence from LASV(G3010-SLE-2013;Clade IV)__AIT17344__GPCmut7 (opt1)
aggagagucccgcagucggcguccagcggcucugcuuguucgugugugugucguugcaggccuuauucaagcuuaccaugggccagaucgugaccuucuuccaggaggucccccacgugaucgaggaggugaugaacaucguccugaucgcccucagcauccuggccgugcugaaggggcucuacaacuucgcgaccugcggccugguggggcuggucacguuccuccugcugugcggccgcuccugcaccaccagccucuacaaggggguguacgagcugcagacccuggagcucaacauggagacgcugaacaugaccaugccgcuguccugcaccaagaacaacagccaccacuacaucauggugggcaacgagaccggccucgagcugacgcugaccaacaccuccaucaucaaccacaaguucugcaaccucagcgacgcccacaagaagaaccuguacaaccacgcccugauguccaucaucagcaccuuccaccucuccauccccaacuucaaccaguacgaggccaugagcugcgacuucaacgggggcaagaucuccguccaguacaaccugagccacuccuacgccggggacgcggccagccacugcggcacgguggccaacggggugcugcagaccuucaugcggauggccuggggcggcuccuacaucgcgcucgacagcggguacggcaagugggacugcaucaugaccuccuaccaguaccugaucauccagaacaccacgugggaggaccacugccaguucagccgccccucccccaucggguaccugggccuccugagccagcggacccgcgacaucuacaucagccggcgccugcucggcaccuucaccuggacgcuguccgacagcgaggggaaggacaccccgggcggguacugccugacccgguggaugcucaucgaggccgagcugaagugcuucggcaacaccgccgucgccaagugcaacgagaagcacgacgaggaguucugcgacaugcugcgccucuucgacuucaacaagcaggccauccagcggcugaagacgcccgcgcagauguccauccagcugaucaacaaggccgugaacgcccucaucaacgaccagcugaucaugaagaaccaccuccgcgacaucauggggauccccuacugcaacuacagcaaguacugcuaccugaaccacaccaccaccggcaagacgucccugcccaagugcugccuggugagcaacggcuccuaccucaacgagacccacuucagcgacgacaucgagcagcaggccgacaacaugaucaccgagaugcugcagaaggaguacauggagcggcaggggaagaccccgcugggccuggucgaccucuucguguucuccacgagcuucuaccugaucuccaucuuccugcaccucgugaagauccccacccaccgccacaucgucggcaagagcugccccaagccccaccggcugaaccacauggggaucugcuccugcgggcuguacaagcagccgggcgugcccgugcgcuggaagcggugaggacuagucccuguucccagagcccacuuuuuuuucuuuuuuugaaauaaaauagccugucuuucagaucucaaaggcucuuuucagagccaccaaaaaaaaaaaaaaaaaaaaaaaaaaaaaaaaaaaaaaaaaaaaaaaaaaaaaaaaaaaaaaaaaaaaaaaaaaaaaaaaaaaaaaaaaaaaaaaaaaaaa

SEQ ID NO: 31774 - RNA, 1748 nt, Artificial Sequence
  mRNA product Design a-1 (hSL-A100) comprising derived and/or modified sequence from LASV(G502-SLE-2009;Clade IV)__AIT17126__GPCmut7 (opt1)
aggagagucccgcagucggcguccagcggcucugcuuguucgugugugugucguugcaggccuuauucaagcuuaccaugggccagaucgugaccuucuuccaggaggucccccacgugaucgaggaggugaugaacaucguccugaucgcccucagcauccuggccgugcugaaggggcucuacaacuucgcgaccugcggccugguggggcugcucacguuccugcugcucugcggccgcuccugcaccaccgggcuguacaagggcgucuacgagcugcagacccucgagcugaacauggagacgcugaacaugaccaugccgcucagcugcaccaagaacaacucccaccacuacaucauggugggcaacgagaccgggcuggagcugacgcucaccaacaccagcaucaucaaccacaaguucugcaaccuguccgacgcccacaagaagaaccuguacgaccacgcccucaugagcaucaucuccaccuuccaccugagcauccccaacuucaaccaguacgaggccauguccugcgacuucaacggcgggaagaucagcgugcaguacaaccugucccacagcuacgccggcgacgcggccgaccacugcgggacggucgccaacggcgugcuccagaccuucaugcggauggccuggggcggguccuacaucgcgcuggacagcggccgcgggcggugggacugcaucaugaccuccuaccaguaccugaucauccagaacaccacgugggaggaccacugccaguucagccgccccucccccaucggcuaccucggccugcugagccagcggacccgcgacaucuacaucucccggcgccuccuggggaccuucaccuggacgcugagcgacagcgagggcaaggacacccccgggggcuacugccucacccgguggaugcugaucgaggccgagcugaagugcuucgggaacaccgccguggccaagugcaacgagaagcacgacgaggaguucugcgacaugcuccgccuguucgacuucaacaagcaggccauccagcggcugaaggcgccggcccagauguccauccagcucaucaacaaggccgucaacgcccugaucaacgaccagcuggugaugaagaaccaccuccgcgacaucaugggcauccccuacugcaacuacagccgguacugcuaccugaaccacacgaccaccggccgcaccucccugcccaagugcugccucgugagcaacggguccuaccugaacgagacgcacuucagcgacgacaucgagcagcaggccgacaacaugaucaccgagaugcugcagaaggaguacauggagcggcagggcaagaccccgcuggggcucgucgaccuguucguguucuccaccagcuucuaccugaucuccaucuuccuccaccuggugaagauccccacgcaccgccacaucgucggcaagagcugccccaagccccaccggcugaaccacauggggaucugcuccugcggccucuacaagcagccgggcgugcccgugaaguggaagcgcugaggacuagucccuguucccagagcccacuuuuuuuucuuuuuuugaaauaaaauagccugucuuucagaucucaaaggcucuuuucagagccaccaaaaaaaaaaaaaaaaaaaaaaaaaaaaaaaaaaaaaaaaaaaaaaaaaaaaaaaaaaaaaaaaaaaaaaaaaaaaaaaaaaaaaaaaaaaaaaaaaaaaa

SEQ ID NO: 31775 - RNA, 1748 nt, Artificial Sequence
  mRNA product Design a-1 (hSL-A100) comprising derived and/or modified sequence from LASV(G733-SLE-2010;Clade IV)__AIT17154__GPCmut7 (opt1)
aggagagucccgcagucggcguccagcggcucugcuuguucgugugugugucguugcaggccuuauucaagcuuaccaugggccagaucgugaccuucuuccaggaggucccccacgugaucgaggaggugaugaacaucguccugaucgcccucagcauccuggccgugcugaaggggcucuacaacuucgcgaccugcggcaucguggggcuggucuccuuccugcuccugugcggccgcagcugcacgaccucccuguacaaggggguguacgagcuccagacccuggagcugaacauggagacccucaacaugacgaugccgcugagcugcaccaagaacaacucccaccacuacaucauggugggcaacgagaccggccuggagcucacccugacgaacaccagcaucaucaaccacaaguucugcaaccuguccgacgcccacaagaagaaccucuacgaccacgcccugaugagcaucaucuccaccuuccaccugagcauccccaacuucaaccaguacgaggccauguccugcgacuucaacgggggcaagaucagcguccaguacaaccucucccacagcuacgccggggacgcggccaaccacugcggcaccaucgccaacggggugcugcagacguucaugcggauggccuggggcggcuccuacaucgcgcuggacagcgggcgcgaccggugggacugcaucaugaccuccuaccaguaccucaucauccagaacaccaccugggaggaccacugccaguucagccgccccucccccaucggcuaccuggggcugcucagccagcggacgcgcgacaucuacaucagccggcgccugcugggcaccuucaccuggacccucuccgacagcgagggcaaggacacgcccgggggcuacugccugacccgguggaugcugaucgaggccgagcucaagugcuucgggaacaccgccguggccaagugcaacgagaagcacgacgaggaguucugcgacaugcugcgccuguucgacuucaacaagcaggccauccagcggcucaaggcgccggcccagauguccauccagcugaucaacaaggccgucaacgcccugaucaacgaccagcucaucaugaagaaccaccuccgcgacaucaugggcauccccuacugcaacuacagcaaguacugcuaccugaaccacaccacgaccgggaagaccucccugcccaagugcugccuggugagcaacggcuccuaccugaacgagacccacuucagcgacgacaucgagcagcaggccgacaacaugaucacggagaugcuccagaaggaguacauggagcggcagggcaagaccccgcuggggcugguggaccuguucgucuucuccaccagcuucuaccucaucuccaucuuccugcaccuggugaagauccccacccaccgccacguggucggcaagagcugccccaagccccaccggcucaaccacauggggaucugcuccugcggccuguacgggcagccgggcgugcccgugaaguggaagcgcugaggacuagucccuguucccagagcccacuuuuuuuucuuuuuuugaaauaaaauagccugucuuucagaucucaaaggcucuuuucagagccaccaaaaaaaaaaaaaaaaaaaaaaaaaaaaaaaaaaaaaaaaaaaaaaaaaaaaaaaaaaaaaaaaaaaaaaaaaaaaaaaaaaaaaaaaaaaaaaaaaaaaa

SEQ ID NO: 31776 - RNA, 1748 nt, Artificial Sequence
  mRNA product Design a-1 (hSL-A100) comprising derived and/or modified sequence from MOPV/LASV reassortant(IGS-1;Clade IV)__AFY05576__GPCmut7 (opt1)
aggagagucccgcagucggcguccagcggcucugcuuguucgugugugugucguugcaggccuuauucaagcuuaccaugggccagaucgugaccuucuuccaggaggucccccacgugaucgaggaggugaugaacaucguccugaucgcccucagcgugcuggccgugcugaaggggcucuacaacuucgcgaccugcggccuggucgggcuggugacguuccuccugcugugcggccgcuccugcaccaccagccucuacaaggggguguacgagcugcagacccuggagcucaacauggagacgcugaacaugaccaugccgcuguccugcaccaagaacaacagccaccacuacaucauggucggcaacgagaccggccucgagcugacgcugaccaacaccuccaucaucaaccacaaguucugcaaccucagcgacgcccacaagaagaaccuguacgaccacgcccugauguccaucaucagcaccuuccaccucuccauccccaacuucaaccaguacgaggccaugagcugcgacuucaacgggggcaagaucuccgugcaguacaaccugagccacuccuacgccggggacgcggccaaccacugcggcacgguggccaacgggguccugcagaccuucaugcggauggccuggggcggcagcuacaucgcgcucgacuccgggcgcggcaacugggacugcaucaugaccagcuaccaguaccugaucauccagaacaccacgugggaggaccacugccaguucucccggcccagccccaucggguaccugggccuccugucccagcgcacccgggacaucuacaucagccgccggcugcucggcaccuucaccuggacgcugagcgacuccgagggggaggacaccccgggcggguacugccugacccgcuggaugcucaucgaggccgagcugaagugcuucggcaacaccgccguggccaagugcaacgagaagcacgacgaggaguucugcgacaugcugcggcuguucgacuucaacaagcaggccauccagcgccugaaggcgcccgcccagaugagcauccagcugaucaacaaggccgugaacgcccucaucaacgaccagcugaucaugaagaaccaccuccgggacaucauggggauccccuacugcaacuacuccaaguacugcuaccucaaccacacgaccaccggccgcaccagccugcccaagugcugccuggucuccaacggcagcuaccucaacgagacgcacuucuccgacgacaucgagcagcaggccgacaacaugaucaccgagaugcugcagaaggaguacauggagcggcaggggaagaccccgcugggccugguggaccucuucguguucagcaccuccuucuaccugaucagcaucuuccugcaccucgucaagauccccacgcaccgccacaucguggggaaguccugccccaagccccaccggcugaaccacaugggcaucugcagcugcgggcuguacaagcagccgggcgugcccgucaaguggaagcgcugaggacuagucccuguucccagagcccacuuuuuuuucuuuuuuugaaauaaaauagccugucuuucagaucucaaaggcucuuuucagagccaccaaaaaaaaaaaaaaaaaaaaaaaaaaaaaaaaaaaaaaaaaaaaaaaaaaaaaaaaaaaaaaaaaaaaaaaaaaaaaaaaaaaaaaaaaaaaaaaaaaaaa

SEQ ID NO: 31777 - RNA, 1748 nt, Artificial Sequence
  mRNA product Design a-1 (hSL-A100) comprising derived and/or modified sequence from LASV(LM765-SLE-2012;Clade IV)__AIT17814__GPCmut7 (opt1)
aggagagucccgcagucggcguccagcggcucugcuuguucgugugugugucguugcaggccuuauucaagcuuaccaugggccagaucgugaccuucuuccaggaggucccccacgugaucgaggaggugaugaacaucguccugaucgcccucagcauccuggccgugcugaaggggcucuacaacuucgcgaccugcggccugguggggcuggucacguuccuccugcugugcggccgcuccugcaccaccagccucuacaaggggguguacgagcugcagacccuggagcucaacauggagacgcugaacaugaccaugccgcuguccugcaccaagaacaacagccaccacuacaucauggugggcaacgagaccggccucgagcugacgcugaccaacaccuccaucaucgaccacaaguucugcaaccucagcgacgcccaccggaagaaccuguacgaccacgcccugauguccaucaucagcaccuuccaccucuccauccccaacuucaaccaguacgaggccaugagcugcgacuucaacgggggcaagaucuccguccaguacaaccugagccacuccuacgccaaggacgcggccgaccacugcgggacgguggccaacggcgugcugcagaccuucaugcgcauggccuggggcgggagcuacaucgcgcucgacuccggccgggggcgcugggacugcaucaugaccagcuaccaguaccugaucauccagaacaccacgugggaggaccacugccaguucucccggcccagccccaucggcuaccuggggcuccugucccagcgcacccgggacaucuacaucagccgccggcugcucggcaccuucaccuggacgcugagcgacuccgagggcaaggacacccccgggggcuacugccugacccgcuggaugcucaucgaggccgagcugaagugcuucgggaacaccgccgucgccaagugcaacgagaagcacgacgaggaguucugcgacaugcugcggcuguucgacuucaacaagcaggccauccagcgccugaaggcgccggcccagaugagcauccagcugaucaacaaggccgugaacgcccucaucaacgaccagcugaucaugaagaaccaccuccgggacaucaugggcauccccuacugcaacuacuccaaguacugcuaccucaaccacacgaccaccgggaagaccagccugcccaagugcugccugguguccaacggcagcuaccucaacgagacgcacuucuccgacgacaucgagcagcaggccgacaacaugaucaccgagaugcugcagaaggaguacauggagcgccagggcaagaccccgcuggggcuggucgaccucuucguguucagcaccuccuucuaccugaucagcaucuuccugcaccucgugaagauccccacgcaccggcacaucgucggcaagcccugccccaagccgcaccgccugaaccacauggggaucugcuccugcggccuguacaagcagcccggggugcccgugaaguggaagcggugaggacuagucccuguucccagagcccacuuuuuuuucuuuuuuugaaauaaaauagccugucuuucagaucucaaaggcucuuuucagagccaccaaaaaaaaaaaaaaaaaaaaaaaaaaaaaaaaaaaaaaaaaaaaaaaaaaaaaaaaaaaaaaaaaaaaaaaaaaaaaaaaaaaaaaaaaaaaaaaaaaaaa

SEQ ID NO: 31778 - RNA, 1748 nt, Artificial Sequence
  mRNA product Design a-1 (hSL-A100) comprising derived and/or modified sequence from LASV(LM776-SLE-2012;Clade IV)__AIT17824__GPCmut7 (opt1)
aggagagucccgcagucggcguccagcggcucugcuuguucgugugugugucguugcaggccuuauucaagcuuaccaugggccagaucgugaccuucuuccaggaggucccccacgugaucgaggaggugaugaacaucguccugaucgcccucagcauccuggccgugcugaaggggcucuacaacuucgcgaccugcggccugguggggcuggucacguuccuccugcugugcggccgcuccugcaccaccagcguguacaaggggguguacgagcuccagacccuggagcugaacauggagacgcucaacaugaccaugccgcuguccugcaccaagaacaacagccaccacuacaucauggucggcaacgagaccggccuggagcucacgcugaccaacaccuccaucaucaaccacaaguucugcaaccugagcgacgcccacaagaagaaccucuacgaccacgcccugauguccaucaucagcaccuuccaccuguccauccccaacuucaaccaguacgaggccaugagcugcgacuucaacgggggcaagaucuccgugcaguacaaccucagccacuccuacgccggggacgcggccaaccacugcggcacgguggccaacgggguccugcagaccuucaugcggauggccuggggcggcagcuacaucgcgcuggacuccgggcacggcaagugggacugcaucaugaccagcuaccaguaccucaucauccagaacaccacgugggaggaccacugccaguucucccgccccagccccaucggguaccugggccugcucucccagcggacccgcgacaucuacaucagccggcgccugcugggcaccuucaccuggacgcucagcgacuccgaggggaaggacaccccgggcggguacugccugacccgguggaugcugaucgaggccgagcucaagugcuucggcaacaccgccguggccaagugcaacgagaagcacgacgaggaguucugcgacaugcugcgccuguucgacuucaacaagcaggccauccagcggcucaaggcgcccgcccagaugagcauccagcugaucaacaaggccgugaacgcccugaucaacgaccagcucaucaugaagaaccaccuccgcgacaucauggggauccccuacugcaacuacuccaaguacugcuaccugaaccacacgaccaccggcaagaccagccugcccaagugcugccuggucuccaacggcagcuaccugaacgagacgcacuucuccgacgacaucgagcagcaggccgacaacaugaucaccgagaugcuccagaaggaguacauggagcggcaggggaagaccccgcugggccugguggaccuguucguguucagcaccuccuucuaccucaucagcaucuuccugcaccuggucaagauccccacgcaccgccacaucguggggaaguccugccccaagccccaccggcucaaccacaugggcaucugcagcugcgggcuguacaagcagccgggcgugcccguccgcuggaagcggugaggacuagucccuguucccagagcccacuuuuuuuucuuuuuuugaaauaaaauagccugucuuucagaucucaaaggcucuuuucagagccaccaaaaaaaaaaaaaaaaaaaaaaaaaaaaaaaaaaaaaaaaaaaaaaaaaaaaaaaaaaaaaaaaaaaaaaaaaaaaaaaaaaaaaaaaaaaaaaaaaaaaa

SEQ ID NO: 31779 - RNA, 1748 nt, Artificial Sequence
  mRNA product Design a-1 (hSL-A100) comprising derived and/or modified sequence from LASV(Mad39;Clade IV)__ANH09722__GPCmut7 (opt1)
aggagagucccgcagucggcguccagcggcucugcuuguucgugugugugucguugcaggccuuauucaagcuuaccaugggccagaucgugaccuucuuccaggaggucccccacgugaucgaggaggugaugaacaucguccugaucgcccucagcauccuggccgugcugaaggggcucuacaacguggcgaccugcggccugaucgggcuggucacguuccuccugcugugcggccgcuccugcaccaccacccucuacaaggggguguacgagcugcaggcccuggagcucaacauggagacgcugaacaugaccaugccgcugagcugcaccaagaacaacucccaccacuacauccgggugggcaacgagaccggccucgagcugacgcugaccaacaccagccucaucaaccacaaguucugcaaccuguccgacgcccacaagaagaaccuguacgaccacgcccucaugagcaucaucuccaccuuccaccugagcauccccaacuucaaccaguacgaggccauguccugcgacuucaacgacgggaagaucagcguccaguacaaccugucccacacguacgcgggcgacaccgccaaccacugcgggaccguggccaacggcgugcuccagaccuucaugcgcauggccuggggcgggagcuacaucgcgcuggacuccggccgcgggggcugggacugcaucaugacgagcuaccaguaccugaucauccagaacaccaccugggaggaccacugccaguucucccggcccagccccaucggguaccucggccugcugucccagcggacccgcgacaucuacaucagccggcgccuccugggcacguucaccuggacccuguccgacagcgaggggaaggacaccccgggcggguacugccucacgcgguggaugcugaucgaggccgagcugaagugcuucggcaacaccgccgucgccaagugcaacgagaagcacgacgaggaguucugcgacaugcuccgccuguucgacuucaacaagcaggccauccagcggcugaaggcgcccgcccagaugagcauccagcucaucaacaaggccgugaacgcccugaucaacgaccagcugaucaugaagaaccaccuccgcgacaucauggggauccccuacugcaacuacuccaaguacugcuaccugaaccacaccgugaccggcaagacgagccugcccaagugcugccucgucuccaacggcagcuaccugaacgagacccacuucuccgacgacaucgagcagcaggccgacaacaugaucaccgagaugcugcagaaggaguacauggagcggcaggggaagaccccgcugggccucguggaccuguucguguucagcacguccuucuaccugaucagcaucuuccuccaccuggucaagauccccacccaccgccacgugguggggaagcccugccccaagccgcaccggcugaaccacaugggcaucugcuccugcggguucuacaagcagcccggcguccccgugcgcuggaagcggugaggacuagucccuguucccagagcccacuuuuuuuucuuuuuuugaaauaaaauagccugucuuucagaucucaaaggcucuuuucagagccaccaaaaaaaaaaaaaaaaaaaaaaaaaaaaaaaaaaaaaaaaaaaaaaaaaaaaaaaaaaaaaaaaaaaaaaaaaaaaaaaaaaaaaaaaaaaaaaaaaaaaa

SEQ ID NO: 31780 - RNA, 1748 nt, Artificial Sequence
  mRNA product Design a-1 (hSL-A100) comprising derived and/or modified sequence from LASV(Z0947-SLE-2011;Clade IV)__AIT17840__GPCmut7 (opt1)
aggagagucccgcagucggcguccagcggcucugcuuguucgugugugugucguugcaggccuuauucaagcuuaccaugggccagaucgugaccuucuuccaggaggucccccacgugaucgaggaggugaugaacaucguccugaucgcccucagcauccuggccgugcugaaggggcucuacaacuucgcgaccugcggccugguggggcuggucacguuccuccugcugugcggccgcuccugcaccaucagccucuacaaggggguguacgagcugcagacccuggagcucaacauggagacccugaacaugacgaugccgcuguccugcaccaagaacaacagccaccacuacaucauggugggcaacgagaccggccucgagcugacccugacgaacaccuccaucaucaaccacaaguucugcaaccucagcgacgcccacaagaagaaccuguacgaccacgcccugauguccaucaucagcaccuuccaccucuccauccccaacuucaaccaguacgaggccaugagcugcgacuucaacgggggcaagaucuccguccaguacaaccugagccacuccuacgccggggacgcggccaaccacugcggcaccguggccaacggggugcugcagacguucaugcggauggccuggggcggcagcuacaucgcgcucgacuccgggcgcgaccggugggacugcaucaugaccagcuaccaguaccugaucauccagaacaccaccugggaggaccacugccaguucucccgccccagccccaucggcuaccuggggcuccugucccagcggacgcgcgacaucuacaucagccggcgccugcucggcaccuucaccuggacccugagcgacuccgagggcaaggacacgcccgggggcuacugccugacccgguggaugcucaucgaggccgagcugaagugcuucgggaacaccgccgucgccaagugcaacgagaagcacgacgaggaguucugcgacaugcugcgccucuucgacuucaacaagcaggccauccagcggcugaaggcgccggcccagaugagcauccagcugaucaacaaggccgugaacgcccucaucaacgaccagcugaucaugaagaaccaccuccgcgacaucaugggcauccccuacugcaacuacuccaaguacugcuaccugaaccacaccacgaccgggaagaccagccugcccaagugcugccugguguccaacggcagcuaccucaacgagacccacuucuccgacgacaucgagcagcaggccgacaacaugaucacggagaugcugcagaaggaguacauggagcggcagggcaagaccccgcuggggcuggucgaccucuucguguucagcaccuccuucuaccugaucagcaucuuccugcaccucgugaagauccccacccaccgccacaucgucggcaagcccugccccaagccgcaccggcugaaccacauggggaucugcuccugcggccuguacaagcagcccggggugcccgugaaguggaagcgcugaggacuagucccuguucccagagcccacuuuuuuuucuuuuuuugaaauaaaauagccugucuuucagaucucaaaggcucuuuucagagccaccaaaaaaaaaaaaaaaaaaaaaaaaaaaaaaaaaaaaaaaaaaaaaaaaaaaaaaaaaaaaaaaaaaaaaaaaaaaaaaaaaaaaaaaaaaaaaaaaaaaaa

SEQ ID NO: 31781 - RNA, 1748 nt, Artificial Sequence
  mRNA product Design a-1 (hSL-A100) comprising derived and/or modified sequence from LASV(Josiah;Clade IV)__NP_694870__GPCmut7 (opt4)
aggagagucccgcagucggcguccagcggcucugcuuguucgugugugugucguugcaggccuuauucaagcuuaccaugggccagaucgugaccuucuuccaggaggugccccacgugaucgaggaggugaugaacaucgugcugaucgcccugagcgugcuggccgugcugaagggccuguacaacuucgccaccugcggccuggugggccuggugaccuuccugcugcugugcggcagaagcugcaccaccagccuguacaagggcguguacgagcugcagacccuggagcugaacauggagacccugaacaugaccaugccccugagcugcaccaagaacaacagccaccacuacaucauggugggcaacgagaccggccuggagcugacccugaccaacaccagcaucaucaaccacaaguucugcaaccugagcgacgcccacaagaagaaccuguacgaccacgcccugaugagcaucaucagcaccuuccaccugagcauccccaacuucaaccaguacgaggccaugagcugcgacuucaacggcggcaagaucagcgugcaguacaaccugagccacagcuacgccggcgacgccgccaaccacugcggcaccguggccaacggcgugcugcagaccuucaugagaauggccuggggcggcagcuacaucgcccuggacagcggcagaggcaacugggacugcaucaugaccagcuaccaguaccugaucauccagaacaccaccugggaggaccacugccaguucagcagacccagccccaucggcuaccugggccugcugagccagagaaccagagacaucuacaucagcagaagacugcugggcaccuucaccuggacccugagcgacagcgagggcaaggacacccccggcggcuacugccugaccagauggaugcugaucgaggccgagcugaagugcuucggcaacaccgccguggccaagugcaacgagaagcacgacgaggaguucugcgacaugcugagacuguucgacuucaacaagcaggccauccagagacugaaggcccccgcccagaugagcauccagcugaucaacaaggccgugaacgcccugaucaacgaccagcugaucaugaagaaccaccugagagacaucaugggcauccccuacugcaacuacagcaaguacugcuaccugaaccacaccaccaccggcagaaccagccugcccaagugcugccuggugagcaacggcagcuaccugaacgagacccacuucagcgacgacaucgagcagcaggccgacaacaugaucaccgagaugcugcagaaggaguacauggagagacagggcaagaccccccugggccugguggaccuguucguguucagcaccagcuucuaccugaucagcaucuuccugcaccuggugaagauccccacccacagacacaucgugggcaagagcugccccaagccccacagacugaaccacaugggcaucugcagcugcggccuguacaagcagcccggcgugcccgugaaguggaagagaugaggacuagucccuguucccagagcccacuuuuuuuucuuuuuuugaaauaaaauagccugucuuucagaucucaaaggcucuuuucagagccaccaaaaaaaaaaaaaaaaaaaaaaaaaaaaaaaaaaaaaaaaaaaaaaaaaaaaaaaaaaaaaaaaaaaaaaaaaaaaaaaaaaaaaaaaaaaaaaaaaaaaa

SEQ ID NO: 31782 - RNA, 1745 nt, Artificial Sequence
  mRNA product Design a-1 (hSL-A100) comprising derived and/or modified sequence from LASV(LP;Clade I)__AAF86701__GPCmut7 (opt4)
aggagagucccgcagucggcguccagcggcucugcuuguucgugugugugucguugcaggccuuauucaagcuuaccaugggccagaucaucaccuucuuccaggaggugccccacgugaucgaggaggugaugaacaucgugcugaucgcccugagccugcuggccauccugaagggccuguacaacaucgccaccugcggcaucaucggccugguggccuuccuguuccugugcggcaagagcugcagccugacccugaagggcggcuacgagcugcagacccuggagcugaacauggagacccugaacaugaccaugccccugagcugcaccaagaacagcagccaccacuacaucagagugggcaacgagaccggccuggagcugacccugaccaacaccagcaucaucaaccacaaguucugcaaccugagcgacgcccacaagaagaaccuguacgaccacgcccugaugagcaucaucagcaccuuccaccugagcauccccaacuucaaccaguacgaggccaugagcugcgacuucaacggcggcaagaucagcgugcaguacaaccugagccacagcuacgccggcgacgccgccgagcacugcggcaccguggccaacggcgugcugcagaccuucaugagaauggccuggggcggcagauacaucgcccuggacagcggcaagggcaacugggacugcaucaugaccagcuaccaguaccugaucauccagaacaccaccugggaggaccacugccaguucagcagacccagccccaucggcuaccugggccugcugagccagagaaccagagacaucuacaucagcagaagacugcugggcaccuucaccuggacccugagcgacagcgagggcaacgagacccccggcggcuacugccugaccagauggaugcugaucgaggccgagcugaagugcuucggcaacaccgccguggccaagugcaacgagaagcacgacgaggaguucugcgacaugcugagacuguucgacuucaacaagcaggccaucagaagacugaaggcccccgcccagaugagcauccagcugaucaacaaggccgugaacgcccugaucaacgaccagcugaucaugaagaaccaccugagagacaucaugggcauccccuacugcaacuacagcaaguacugcuaccugaaccacaccagcagcggcagaaccagccugcccaagugcugccugaucagcaacggcagcuaccugaacgagacccaguucagcgacgacaucgagcagcaggccgacaacaugaucaccgagaugcugcagaaggaguacaucgagagacagggcaagaccccccugggccugguggacaucuucaucuucagcaccagcuucuaccugaucagcaucuuccugcaccugaucaagauccccacccacagacacaucgugggcaagcccugccccaagccccacagacugaaccacaugggcgugugcagcugcggccuguacaagcaccccggcgugcccaccaaguggaagagaugaggacuagucccuguucccagagcccacuuuuuuuucuuuuuuugaaauaaaauagccugucuuucagaucucaaaggcucuuuucagagccaccaaaaaaaaaaaaaaaaaaaaaaaaaaaaaaaaaaaaaaaaaaaaaaaaaaaaaaaaaaaaaaaaaaaaaaaaaaaaaaaaaaaaaaaaaaaaaaaaaaaaa

SEQ ID NO: 31783 - RNA, 1745 nt, Artificial Sequence
  mRNA product Design a-1 (hSL-A100) comprising derived and/or modified sequence from LASV(803213;Clade II)__AAF86703__GPCmut7 (opt4)
aggagagucccgcagucggcguccagcggcucugcuuguucgugugugugucguugcaggccuuauucaagcuuaccaugggccagaucaucaccuucuuccaggaggugccccacgugaucgaggaggugaugaacaucgugcugaucgcccugagccugcuggccauccugaagggcaucuacaacguggccaccugcggccuguucggccugaucagcuuccugcugcugugcggcagaagcugcagcgugaccuacaagggcguguacgagcugcagacccuggagcugaacauggccaaccugaacaugaccaugccccugagcugcaccaagaacaacagccaccacuacaucauggugggcaacgagaccggccuggagcugacccugaccaacaccagcaucaucaaccacaaguucugcaaccugagcgacgcccacaagaagaaccuguacgaccacgcccugaugagcaucaucagcaccuuccaccugagcauccccaacuucaaccaguacgaggccaugagcugcgacuucaacggcggcaagaucagcgugcaguacaaccugagccacagcuucgccguggacgccgccaaccacugcggcaccaucgccaacggcgugcugcagaccuucaugagaauggccuggggcggcagcuacaucgcccuggacagcggcaagggcaacugggacugcaucaugaccagcuaccaguaccugaucauccagaacaccaccugggaggaccacugccaguucagcagacccagccccaucggcuaccugggccugcugagccagagaaccagagacaucuacaucagcagaagacugcugggcaccuucaccuggacccugagcgacagcgagggcaacgaggcccccggcggcuacugccugaccagauggaugcugaucgaggccgagcugaagugcuucggcaacaccgccguggccaagugcaacgagaagcacgacgaggaguucugcgacaugcugagacuguucgacuucaacaagcaggccaucaagagacugaagacccccgcccagaugagcauccagcugaucaacaaggccgugaacgcccugaucaacgaccagcugaucaugaagaaccaccugagagacaucaugggcauccccuacugcaacuacagcagauacugcuaccugaaccacaccgugaccggcaagaccagccugcccagaugcugccuggugagcaacggcagcuaccugaacgagacccacuucagcgacgacaucgagcagcaggccgacaacaugaucaccgagaugcugcagaaggaguacauggacagacagggcaagaccccccugggccugguggaccuguucguguucagcaccagcuucuaccugaucagcaucuuccugcaccuggugaagauccccacccacagacacaucgugggcaagcccugccccaagccccacagacugaaccacaugggcaucugcagcugcggccuguacaagcaccccggcgugcccgugaaguggaagagaugaggacuagucccuguucccagagcccacuuuuuuuucuuuuuuugaaauaaaauagccugucuuucagaucucaaaggcucuuuucagagccaccaaaaaaaaaaaaaaaaaaaaaaaaaaaaaaaaaaaaaaaaaaaaaaaaaaaaaaaaaaaaaaaaaaaaaaaaaaaaaaaaaaaaaaaaaaaaaaaaaaaaa

SEQ ID NO: 31784 - RNA, 1745 nt, Artificial Sequence
  mRNA product Design a-1 (hSL-A100) comprising derived and/or modified sequence from LASV(GA391;Clade III)__CAA36645__GPCmut7 (opt4)
aggagagucccgcagucggcguccagcggcucugcuuguucgugugugugucguugcaggccuuauucaagcuuaccaugggccagaucgugaccuucuuccaggaggugccccacgugaucgaggaggugaugaacaucgugcugaucgcccugagcauccuggccauccugaagggccuguacaacguggccaccugcggccugaucggccuggugaccuuccugcugcugagcggcagaagcugcagccugaucuacaagggcaccuacgagcugcagacccuggagcugaacauggagacccugaacaugaccaugccccugagcugcaccaagaacaacagccaccacuacaucagagugggcaacgagaccggccuggagcugacccugaccaacaccagcauccugaaccacaaguucugcaaccugagcgacgcccacaagagaaaccuguacgaccacagccugaugagcaucaucagcaccuuccaccugagcauccccaacuucaaccaguacgaggccaugagcugcgacuucaacggcggcaagaucaccgugcaguacaaccugagccacagcuucgccguggacgccgccggccacugcggcacccuggccaacggcgugcugcagaccuucaugagaauggccuggggcggcagcuacaucgcccuggacagcggcagaggcaacugggacugcaucaugaccagcuaccaguaccugaucauccagaacaccaccugggacgaccacugccaguucagcagacccagccccaucggcuaccugggccugcugagccagagaaccagagacaucuacaucagcagaagacugcugggcaccuucaccuggacccugagcgacagcgagggcaacgagacccccggcggcuacugccugaccagauggaugcugaucgaggccgagcugaagugcuucggcaacaccgccguggccaagugcaacgagaagcacgacgaggaguucugcgacaugcugagacuguucgacuucaacaagcaggccaucagaagacugaagacccccgcccagaugagcauccagcugaucaacaaggccgugaacgcccugaucaacgaccagcugaucaugaagaaccaccugagagacaucaugggcauccccuacugcaacuacagcagauacugcuaccugaaccacaccagcaccggcaagaccagccugcccagaugcugccugaucagcaacggcagcuaccugaacgagaccaaguucagcgacgacaucgagcagcaggccgacaacaugaucaccgagaugcugcagaaggaguacaucgacagacagggcaagaccccccugggccugguggaccuguucguguucagcaccagcuucuaccugaucagcaucuuccugcaccuggugaagauccccacccacagacacaucgugggcaagcccugccccaagccccacagacugaaccacaugggcaucugcagcugcggccuguacaagcagcccggcgugcccgugagauggaagagaugaggacuagucccuguucccagagcccacuuuuuuuucuuuuuuugaaauaaaauagccugucuuucagaucucaaaggcucuuuucagagccaccaaaaaaaaaaaaaaaaaaaaaaaaaaaaaaaaaaaaaaaaaaaaaaaaaaaaaaaaaaaaaaaaaaaaaaaaaaaaaaaaaaaaaaaaaaaaaaaaaaaaa

SEQ ID NO: 31785 - RNA, 1748 nt, Artificial Sequence
  mRNA product Design a-1 (hSL-A100) comprising derived and/or modified sequence from LASV(AV;Clade V)__CCA30314__GPCmut7 (opt4)
aggagagucccgcagucggcguccagcggcucugcuuguucgugugugugucguugcaggccuuauucaagcuuaccaugggccagaucgugaccuucuuccaggaggugccccacgugaucgaggaggugaugaacaucgugcugaucgcccugagcauccuggccgugcugaagggccuguacaacaucgccaccugcggccugaucggccugaucaccuuccugcugcugugcggcagaagcugcagcagcaaccuguacaagggcguguacgagcugcagagccuggaccugaacauggagacccugaacaugaccaugccccugagcugcaccaagaacaacagccaccacuacaucagagugggcaacgacaccggccuggagcugacccugaccaacaccagcauccugaaccacaaguucugcaaccugagcgacgcccacaagaaggaccuguacgaccacgcccugaugagcaucaucagcaccuuccaccugagcauccccaacuucaaccaguacgaggccaugagcugcgacuucaacggcggcaagaucagcgugcaguacaaccugagccacagcuacgccaucgacgccgccaaccacugcggcaccguggccaacggcauccugcagaccuucaugagaauggccuggggcggcagcuacaucgcccuggacagcggcagaggcaacugggacugcaucaugaccagcuaccaguaccugaucauccagaacaccaccugggagaaccacugccaguucagcagacccagccccaucggcuaccugggccugcugagccagagaaccagagacaucuacaucagcagaagacugcugggcaccuucaccuggacccugagcgacagcgagggcaacgccacccccggcggcuacugccugaccagauggaugcugaucgaggccgagcugaagugcuucggcaacaccgccguggccaagugcaacgagaagcacgacgaggaguucugcgacaugcugagacuguucgacuucaacaagcaggccaucagcagacugaagagccccgcccagaugagcauccagcugaucaacaaggccgugaacgcccugaucaacgaccagcugaucaugaagaaccaccugagagacaucaugggcauccccuacugcaacuacagcaaguacugcuaccugaaccacaccaucaccggcaagaccagccugcccaagugcugccuggugagcaacggcagcuaccugaacgagacccacuucagcgacgacaucgagcagcaggccgacaacaugaucaccgagaugcugcagaaggaguacauggagagacagggcaagaccccccugggccugguggaccuguucguguucagcaccagcuucuaccugaucagcaucuuccugagacuggugaagauccccacccacagacacaucgugggcaagcccugccccaagccccacagacugaaccacaugggcaucugcagcugcggccuguacaagcagcccggcgugcccgugagauggaagagaugaggacuagucccuguucccagagcccacuuuuuuuucuuuuuuugaaauaaaauagccugucuuucagaucucaaaggcucuuuucagagccaccaaaaaaaaaaaaaaaaaaaaaaaaaaaaaaaaaaaaaaaaaaaaaaaaaaaaaaaaaaaaaaaaaaaaaaaaaaaaaaaaaaaaaaaaaaaaaaaaaaaaa

SEQ ID NO: 31786 - RNA, 1745 nt, Artificial Sequence
  mRNA product Design a-1 (hSL-A100) comprising derived and/or modified sequence from LASV(Togo/2016/7082;Clade VI)__AMR44577__GPCmut7 (opt4)
aggagagucccgcagucggcguccagcggcucugcuuguucgugugugugucguugcaggccuuauucaagcuuaccaugggccagaucaucaccuucuuccaggaggugccccacgugaucgaggaggugaugaacaucgugcugaucgcccugagccugcuggccauccugaagggcguguacaacguggccaccugcggcaucaucggccuggugaccuuccuguuccugugcggcagaagcugcagccugaucuacaagggcagcuacgagcugcagacccuggagcugaacauggagacccugaacaugaccaugccccugagcugcaccaagaacagcagccaccacuacaucagagugggcaacgagaccggccuggagcugacccugaccaacaccagcaucaucaaccacaaguucugcaaccugagcgacgcccacaagagaaaccuguacgaccacgcccugaugagcauccugagcaccuuccaccugagcauccccaacuucaaccaguacgaggccaugagcugcgacuucaacggcggcaagaucagcgugcaguacaaccugagccacgccuacgccguggacgccgccgagcacugcggcaccguggccaacggcgugcugcagaccuucaugagaauggccuggggcggcagcuacaucgcccuggacagcggcagaggcaacugggacugcaucaugaccagcuaccaguaccugaucauccagaacaccaccugggaggaccacugccaguucagcagacccagccccaucggcuaccugggccugcugagccagagaaccagagacaucuacaucagcagaagacugcugggcaccuucaccuggacccugagcgacagcgagggcaacgagacccccggcggcuacugccugaccagauggaugcugaucgaggccgagcugaagugcuucggcaacaccgccguggccaagugcaacgagaagcacgacgaggaguucugcgacaugcugagacuguucgacuucaacaagcaggccauccagagacugaagagccccgcccagaugagcauccagcugaucaacaaggccgugaacgcccugaucaacgaccagcugaucaugaagaaccaccugagagacaugaugggcauccccuacugcaacuacagcaaguacugcuaccugaaccacaccagcagcggcagaaccagccugcccaagugcugccuggugagcaacggcagcuaccugaacgagacccacuucagcgacgacaucgagcagcaggccgacaacaugaucaccgagaugcugcagaaggaguacaucgacagacagggcaagaccccccugggccugguggaccuguucguguucagcaccagcuucuaccugaucagcaucuuccugcaccugaucaagauccccacccacagacacaucgugggcaagcccugccccaagccccacagacugaaccacaugggcaucugcagcugcggccuguacaagcagcccggcgugcccaccagauggaagagaugaggacuagucccuguucccagagcccacuuuuuuuucuuuuuuugaaauaaaauagccugucuuucagaucucaaaggcucuuuucagagccaccaaaaaaaaaaaaaaaaaaaaaaaaaaaaaaaaaaaaaaaaaaaaaaaaaaaaaaaaaaaaaaaaaaaaaaaaaaaaaaaaaaaaaaaaaaaaaaaaaaaaa

SEQ ID NO: 31787 - RNA, 1745 nt, Artificial Sequence
  mRNA product Design a-1 (hSL-A100) comprising derived and/or modified sequence from LASV(KAK-428;Clade n.d. (VII))__ANH09740__GPCmut7 (opt4)
aggagagucccgcagucggcguccagcggcucugcuuguucgugugugugucguugcaggccuuauucaagcuuaccaugggccagaucgugaccuucuuccaggaggugccccacgugaucgaggaggugaugaacaucgugcugaucgcccugagccugcuggccauccugaagggccuguacaacuucgccaccugcggcgugaucggccugaucaccuuccugcugcugugcggcagaagcugcagcgccaccuacaagggccaguacgagcugcagacccuggagcugaacauggagagccugaacaugaccaugccccugagcugcaccaagaacaacagccaccacuacaucagagccggcaacaacaccggccuggagcugacccugaccaacaccagcaucaucagccacaaguucugcaaccugagcgacgcccacaagaagaaccuguacgaccacacccugaugagcaucaucaccaccuuccaccugagcauccccaacuucaaccaguacgaggccaugagcugcgacuucaacggcggcaagaucagcauccaguacaaccugagccacagcuacgccggcgacgccgcccagcacugcggcaccguggccaacggcgugcugcagaccuucaugagaauggccuggggcggcagcuaccuggcccuggacagcggcagaagaggcugggacugcaucaucagcagcuaccaguaccugaucauccagaacaccaccugggacgaccacugccaguucagcagacccagccccaucggcuaccugggcuucgugagccagaagaccagagacaucuacaucagcagaagacugcugggcaccuucaccuggacccugagcgacagcgagggccacgacaugcccggcggcuacugccugaccagauggaugcugaucgaggccgaccugaagugcuucggcaacaccgccguggccaagugcaacgagaagcacgacgaggaguucugcgacauguggagacuguucgacuucaacaagcaggccauccagagacugaaggcccccgcccagaugaacauccagcugaucaacaaggccgugaacgcccugaucaacgaccagcugaugaugaagaaccaccugagagacaucaugggcauccccuacugcaacuacagcaaguucugcuaccugaacaacaccaccaccggcagaaccagccugcccagaugcugccugaucagcaacggcagcuaccugaacgagacccacuucagcgacgacaucgagcagcaggccgacaacaugaucaccgagaugcugcagaaggaguacauggacagacagggcaagaccccccugggccugguggaccuguucguguucagcaccagcuucuaccugaucaccaucuuccugcaccuggugaagauccccacccacagacacaucgugggcaagcccugccccaagccccacagacugaaccacaugggcaucugcagcugcggccuguacaagcagcccggcgugcccgugagauggaagagaugaggacuagucccuguucccagagcccacuuuuuuuucuuuuuuugaaauaaaauagccugucuuucagaucucaaaggcucuuuucagagccaccaaaaaaaaaaaaaaaaaaaaaaaaaaaaaaaaaaaaaaaaaaaaaaaaaaaaaaaaaaaaaaaaaaaaaaaaaaaaaaaaaaaaaaaaaaaaaaaaaaaaa

SEQ ID NO: 31788 - RNA, 1745 nt, Artificial Sequence; identical to SEQ ID NO: 31782
  mRNA product Design a-1 (hSL-A100) comprising derived and/or modified sequence from LASV(Pinneo-NIG-1969;Clade I)__AIT17836__GPCmut7 (opt4)

SEQ ID NO: 31789 - RNA, 1745 nt, Artificial Sequence
  mRNA product Design a-1 (hSL-A100) comprising derived and/or modified sequence from LASV(ISTH0009-NIG-2011;Clade II)__AIT17404__GPCmut7 (opt4)
aggagagucccgcagucggcguccagcggcucugcuuguucgugugugugucguugcaggccuuauucaagcuuaccaugggccagaucaucaccuucuuccaggaggugccccacgugaucgaggaggugaugaacaucgugcugaucgcccugagccugcuggccauccugaagggcaucuacaacguggccaccugcggccuguucggccuggugagcuuccugcugcugugcggcagaagcugcagcaccaccuacaagggcguguacgagcugcagacccuggagcuggacauggccagccugaacaugaccaugccccugagcugcaccaagaacaacagccaccacuacaucauggugggcaacgagaccggccuggagcugacccugaccaacaccagcaucaucaaccacaaguucugcaaccugagcgacgcccacaagaagaaccuguacgaccacgcccugaugagcaucaucagcaccuuccaccugagcauccccaacuucaaccaguacgaggccaugagcugcgacuucaacggcggcaagaucagcgugcaguacaaccugagccacgccuacgccguggacgccgccaaccacugcggcaccaucgccaacggcgugcugcagaccuucaugagaauggccuggggcggcagcuacaucgcccuggacagcggcaagggcagcugggacugcaucaugaccagcuaccaguaccugaucauccagaacaccaccugggaggaccacugccaguucagcagacccagccccaucggcuaccugggccugcugagccagagaaccagagacaucuacaucagcagaagacugcugggcaccuucaccuggacccugagcgacagcgagggcaacgagacccccggcggcuacugccugaccagauggaugcugaucgaggccgagcugaagugcuucggcaacaccgccguggccaagugcaacgagaagcacgacgaggaguucugcgacaugcugagacuguucgacuucaacaagcaggccaucagaagacugaagacccccgcccagaugagcauccagcugaucaacaaggccgugaacgcccugaucaacgaccagcugaucaugaagaaccaccugagagacaucaugggcauccccuacugcaacuacagcaaguacugcuaccugaaccacaccgugaccggcaagaccagccugcccagaugcugccuggugagcaacggcagcuaccugaacgagacccacuucagcgacgacaucgagcagcaggccgacaacaugaucaccgagcugcugcagaaggaguacauggacagacagggcaagaccccccugggccugguggaccuguucguguucagcaccagcuucuaccugaucagcaucuuccugcaccugaucaagauccccacccacagacacaucaccggcaagcccugccccaagccccacagacugaaccacaugggcaucugcagcugcggccuguacaagcaccccggcgugcccgugaaguggaagagaugaggacuagucccuguucccagagcccacuuuuuuuucuuuuuuugaaauaaaauagccugucuuucagaucucaaaggcucuuuucagagccaccaaaaaaaaaaaaaaaaaaaaaaaaaaaaaaaaaaaaaaaaaaaaaaaaaaaaaaaaaaaaaaaaaaaaaaaaaaaaaaaaaaaaaaaaaaaaaaaaaaaaa

SEQ ID NO: 31790 - RNA, 1745 nt, Artificial Sequence
  mRNA product Design a-1 (hSL-A100) comprising derived and/or modified sequence from LASV(ISTH2010-NIG-2012;Clade II)__AIT17482__GPCmut7 (opt4)
aggagagucccgcagucggcguccagcggcucugcuuguucgugugugugucguugcaggccuuauucaagcuuaccaugggccagaucaucaccuucuuccaggaggugccccacgugaucgaggaggugaugaacaucgugcugaucgcccugagccugcuggccauccugaagggcaucuacaacguggccaccugcggccuguucggccuggugagcuuccugcugcugugcggcagaagcugcagcaccaccuacaagggcguguacgagcugcagacccuggagcuggacauggccagccugaacaugaccaugccccugagcugcaccaagaacaacagccaccacuacaucauggugggcaacgagaccggccuggagcugacccugaccaacaccagcaucaucaaccacaaguucugcaaccugagcgacgcccacaagaagaaccuguacgaccacgcccugaugagcaucaucagcaccuuccaccugagcauccccaacuucaaccaguacgaggccaugagcugcgacuucaacggcggcaagaucagcgugcaguacaaccugagccacgccuacgccguggacgccgccaaccacugcggcaccaucgccaacggcgugcugcagaccuucaugagaauggccuggggcggcagcuacaucgcccuggacagcggcaagggcagcugggacugcaucaugaccagcuaccaguaccugaucauccagaacaucaccugggaggaccacugccaguucagcagacccagccccaucggcuaccugggccugcugagccagagaaccagagacaucuacaucagcagaagacugcugggcaccuucaccuggacccugagcgacagcgagggcaacgagacccccggcggcuacugccugaccagauggaugcugaucgaggccgagcugaagugcuucggcaacaccgccguggccaagugcaacgagaagcacgacgaggaguucugcgacaugcugagacuguucgacuucaacaagcaggccaucagaagacugaagacccccgcccagaugagcauccagcugaucaacaaggccgugaacgcccugaucaacgaccagcugaucaugaagaaccaccugagagacaucaugggcauccccuacugcaacuacagcaaguacugcuaccugaaccacaccgugaccggcaagaccagccugcccagaugcugccuggugagcaacggcagcuaccugaacgagacccacuucagcgacgacaucgagcagcaggccgacaacaugaucaccgagcugcugcagaaggaguacaucgacagacagggcaagaccccccugggccugguggaccuguucguguucagcaccagcuucuaccugaucagcaucuuccugcaccuggugaagauccccacccacagacacguggugggcaagcccugccccaagccccacagacugaaccacaugggcaucugcagcugcggccuguacaagcaccccggcgugcccgugaaguggaagagaugaggacuagucccuguucccagagcccacuuuuuuuucuuuuuuugaaauaaaauagccugucuuucagaucucaaaggcucuuuucagagccaccaaaaaaaaaaaaaaaaaaaaaaaaaaaaaaaaaaaaaaaaaaaaaaaaaaaaaaaaaaaaaaaaaaaaaaaaaaaaaaaaaaaaaaaaaaaaaaaaaaaaa

SEQ ID NO: 31791 - RNA, 1745 nt, Artificial Sequence
  mRNA product Design a-1 (hSL-A100) comprising derived and/or modified sequence from LASV(Lassa virus/H.sapiens-wt/NGA/2015/ISTH_0543;Clade II)__AVO03639__GPCmut7 (opt4)
aggagagucccgcagucggcguccagcggcucugcuuguucgugugugugucguugcaggccuuauucaagcuuaccaugggccagaucaucaccuucuuccaggaggugccccacgugaucgaggaggugaugaacaucgugcugaucgcccugagccugcuggccauccugaagggcaucuacaacguggccaccugcggccuguucggccuggugagcuuccugcugcugugcggcagaagcugcagcaccaccuacaagggcguguacgagcugcagacccuggagcuggacauggccaaccugaacaugaccaugccccugagcugcaccaagaacaacagccaccacuacaucauggugggcaacgagaccggccuggagcugacccugaccaacaccagcaucaucaaccacaaguucugcaaccugagcgacgcccacaagaagaaccuguacgaccacgcccugaugagcaucaucagcaccuuccaccugagcauccccaacuucaaccaguacgaggccaugagcugcgacuucaacggcggcaagaucagcgugcaguacaaccugagccacaccuacgccguggacgccgccaaccacugcggcaccaucgccaacggcgugcugcagaccuucaugagaauggccuggggcggcagcuacaucgcccuggacagcggcaagggcagcugggacugcaucaugaccagcuaccaguaccuggugauccagaacaccaccugggaggaccacugccaguucagcagacccagccccaucggcuaccugggccugcugagccagagaaccagagacaucuacaucagcagaagacugcugggcaccuucaccuggacccugagcgacagcgagggcaacgagacccccggcggcuacugccugaccagauggaugcugaucgaggccgagcugaagugcuucggcaacaccgccguggccaagugcaacgagaagcacgacgaggaguucugcgacaugcugagacuguucgacuucaacaagcaggccaucagaagacugaagacccccgcccagaugagcauccagcugaucaacaaggccgugaacgcccugaucaacgaccagcugaucaugaagaaccaccugagagacaucaugggcauccccuacugcaacuacagcaaguacugcuaccugaaccacaccgugaccggcaagaccagccugcccagaugcugccuggugagcaacggcagcuaccugaacgagacccacuucagcgacgacaucgagcagcaggccgacaacaugaucaccgagcugcugcagaaggaguacaucgacagacagggcaagaccccccugggccugguggaccuguucguguucagcaccagcuucuaccugaucagcaucuuccugcaccuggugaagauccccacccacagacacaucaccggcaagcccugccccaagccccacagacugaaccacaugggcaucugcagcugcggccuguacaagcaccccggcgugcccgugaaguggaagagaugaggacuagucccuguucccagagcccacuuuuuuuucuuuuuuugaaauaaaauagccugucuuucagaucucaaaggcucuuuucagagccaccaaaaaaaaaaaaaaaaaaaaaaaaaaaaaaaaaaaaaaaaaaaaaaaaaaaaaaaaaaaaaaaaaaaaaaaaaaaaaaaaaaaaaaaaaaaaaaaaaaaaa

SEQ ID NO: 31792 - RNA, 1745 nt, Artificial Sequence
  mRNA product Design a-1 (hSL-A100) comprising derived and/or modified sequence from LASV(Lassa virus/H.sapiens-wt/NGA/2016/ISTH_0009;Clade II)__AVO03571__GPCmut7 (opt4)
aggagagucccgcagucggcguccagcggcucugcuuguucgugugugugucguugcaggccuuauucaagcuuaccaugggccagaucaucaccuucuuccaggaggugccccacgugaucgaggaggugaugaacaucgugcugaucgcccugagccugcuggccauccugaagggcaucuacaacguggccaccugcggccugcugggccuggugagcuuccugcugcugugcggcagaagcugcagcaccaccuacaagggcguguacgagcugcagacccuggagcuggacauggccagccugaacaugaccaugccccugagcugcaccaagaacaacagccaccacuacaucauggugggcaacgagaccggccuggagcugacccugaccaacaccagcaucaucaaccacaaguucugcaaccugagcgacgcccacaagaagaaccuguacgaccacgcccugaugagcaucaucagcaccuuccaccugagcauccccaacuucaaccaguacgaggccaugagcugcgacuucaacggcggcagaaucagcgugcaguacaaccugagccacagcuacgccguggacgccgccaaccacugcggcaccaucgccaacggcgugcugcagaccuucaugagaauggccuggggcggcagcuacaucgcccuggacagcggcaagggcagcugggacugcaucaugaccagcuaccaguaccugaucauccagaacaccaccugggaggaccacugccaguucagcagacccagccccaucggcuaccugggccugcugagccagagaaccagagacaucuacaucagcagaagacugcugggcaccuucaccuggacccugagcgacagcgagggcaacgagacccccggcggcuacugccugaccagauggaugcugaucgaggccgagcugaagugcuucggcaacaccgccguggccaagugcaacgagaagcacgacgaggaguucugcgacaugcugagacuguucgacuucaacaagcaggccaucagaagacugaagacccccgcccagaugagcauccagcugaucaacaaggccgugaacgcccugaucaacgaccagcugaucaugaagaaccaccugagagacaucaugggcauccccuacugcaacuacagcaaguacugcuaccugaaccacaccgugaccggcaagaccagccugcccagaugcugccuggugagcaacggcagcuaccugaacgagacccacuucagcgacgacaucgagcagcaggccgacaacaugaucaccgagcugcugcagaaggaguacaucgacagacagggcaagaccccccugggccugguggaccuguucguguucagcaccagcuucuaccugaucagcaucuuccugcaccuggugaagauccccacccacagacacaucaccggcaagcccugccccaagccccacagacugaaccacaugggcaucugcagcugcggccuguacaaccaccccggcgugcccgugaaguggaagagaugaggacuagucccuguucccagagcccacuuuuuuuucuuuuuuugaaauaaaauagccugucuuucagaucucaaaggcucuuuucagagccaccaaaaaaaaaaaaaaaaaaaaaaaaaaaaaaaaaaaaaaaaaaaaaaaaaaaaaaaaaaaaaaaaaaaaaaaaaaaaaaaaaaaaaaaaaaaaaaaaaaaaa

SEQ ID NO: 31793 - RNA, 1745 nt, Artificial Sequence
  mRNA product Design a-1 (hSL-A100) comprising derived and/or modified sequence from LASV(Lassa virus/H.sapiens-wt/NGA/2016/ISTH_0017;Clade II)__AVO03567__GPCmut7 (opt4)
aggagagucccgcagucggcguccagcggcucugcuuguucgugugugugucguugcaggccuuauucaagcuuaccaugggccagaucaucaccuucuuccaggaggugccccacgugaucgaggaggugaugaacaucgugcugaucgcccugagccugcuggccauccugaagggcaucuacaacguggccaccugcggccuguucggccuggugagcuuccugcugcugugcggcagaagcugcagcaccaccuacaagggcguguacgagcugcagacccuggagcuggacauggccagccugaacaugaccaugccccugagcugcaccaagaacaacagccaccacuacaucauggugggcaacgagaccggccuggagcugacccugaccaacaccagcaucaucaaccacaaguucugcaaccugagcgacgcccacaagaagaaccuguacgaccacgcccugaugagcaucaucagcaccuuccaccugagcauccccaacuucaaccaguacgaggccaugagcugcgacuucaacggcggcaagaucagcgugcaguacaaccugagccacaccuacgccaucgacgccgccaaccacugcggcaccaucgccaacggcgugcugcagaccuucaugagaauggccuggggcggcagcuacaucgcccuggacagcggcaagggcagcugggacugcaucaugaccagcuaccaguaccugaucauccagaacaccaccugggaggaccacugccaguucagcagacccagccccaucggcuaccugggccugcugagccagagaaccagagacaucuacaucagcagaagacugcugggcaccuucaccuggacccugagcgacagcgagggcaacgagacccccggcggcuacugccugaccagauggaugcugaucgaggccgagcugaagugcuucggcaacaccgccguggccaagugcaacgagaagcacgacgaggaguucugcgacaugcugagacuguucgacuucaacaagcaggccaucagaagacugaagacccccgcccagaugagcauccagcugaucaacaaggccgugaacgcccugaucaacgaccagcugaucaugaagaaccaccugagagacaucaugggcauccccuacugcaacuacagcaaguacugcuaccugaaccacaccgugaccggcaagaccagccugcccagaugcugccuggugagcaacggcagcuaccugaacgagacccacuucagcgacgacaucgagcagcaggccgacaacaugaucaccgagcugcugcagaaggaguacauggacagacagggcaagaccccccugggccugguggaccuguucguguucagcaccagcuucuaccugaucagcaucuuccugcaccuggugagaauccccacccacagacacgugaucggcaagcccugccccaagccccacagacugaaccacaugggcaucugcagcugcggccuguacaagcaccccggcgugcccgugaaguggaagagaugaggacuagucccuguucccagagcccacuuuuuuuucuuuuuuugaaauaaaauagccugucuuucagaucucaaaggcucuuuucagagccaccaaaaaaaaaaaaaaaaaaaaaaaaaaaaaaaaaaaaaaaaaaaaaaaaaaaaaaaaaaaaaaaaaaaaaaaaaaaaaaaaaaaaaaaaaaaaaaaaaaaaa

SEQ ID NO: 31794 - RNA, 1745 nt, Artificial Sequence
  mRNA product Design a-1 (hSL-A100) comprising derived and/or modified sequence from LASV(Lassa virus/H.sapiens-wt/NGA/2018/ISTH_0959;Clade II)__AVV65099__GPCmut7 (opt4)
aggagagucccgcagucggcguccagcggcucugcuuguucgugugugugucguugcaggccuuauucaagcuuaccaugggccagaucaucaccuucuuccaggaggugccccacgugaucgaggaggugaugaacaucgugcugaucgcccugagccugcuggccauccugaagggcaucuacaacguggugaccugcggccuguucggccuggugagcuuccugcugcugugcggcagaagcugcagcaccaccuacaagggcguguacgagcugcagacccuggagcuggacauggccagccugaacaugaccaugccccugagcugcaccaagaacaacagccaccacuacaucauggugggcaacgagaccggccuggagcugacccugaccaacaccagcaucaucaaccacaaguucugcaaccugagcgacgcccacaagaagaaccuguacgaccacgcccugaugagcaucaucagcaccuuccaccugagcauccccaacuucaaccaguacgaggccaugagcugcgacuucaacggcggcaagaucagcgugcaguacaaccugagccacgccuacgccaucgacgccgccaaccacugcggcaccaucgccaacggcgugcugcagaccuucaugagaauggccuggggcggcagcuacaucgcccuggacagcggcaagggcagcugggacugcaucaugaccagcuaccaguaccugaucauccagaacaccaccugggaggaccacugccaguucagcagacccagccccaucggcuaccugggccugcugagccagagaaccagagacaucuacaucagcagaagacugcugggcaccuucaccuggacccugagcgacagcgagggcaacgagacccccggcggcuacugccugaccagauggaugcugaucgaggccgagcugaagugcuucggcaacaccgccguggccaagugcaacgagaagcacgacgaggaguucugcgacaugcugagacuguucgacuucaacaagcaggccaucagaagacugaagacccccgcccagaugagcauccagcugaucaacaaggccgugaacgcccugaucaacgaccagcugaucaugaagaaccaccugagagacaucaugggcauccccuacugcaacuacagcaaguacugcuaccugaaccacaccgugaccggcaagaccagccugcccagaugcugccuggugagcaacggcagcuaccugaacgagacccacuucagcgacgacaucgagcagcaggccgacaacaugaucaccgagcugcugcagaaggaguacaucgacagacagggcaagaccccccugggccugguggaccuguucguguucagcaccagcuucuaccugaucagcaucuuccugcaccuggugaagauccccacccacagacacgugaucggcaagcccugccccaagccccacagacugaaccacaugggcaucugcagcugcggccuguacaagcaccccggcgugcccgugaaguggaagagaugaggacuagucccuguucccagagcccacuuuuuuuucuuuuuuugaaauaaaauagccugucuuucagaucucaaaggcucuuuucagagccaccaaaaaaaaaaaaaaaaaaaaaaaaaaaaaaaaaaaaaaaaaaaaaaaaaaaaaaaaaaaaaaaaaaaaaaaaaaaaaaaaaaaaaaaaaaaaaaaaaaaaa

SEQ ID NO: 31795 - RNA, 1745 nt, Artificial Sequence
  mRNA product Design a-1 (hSL-A100) comprising derived and/or modified sequence from LASV(LASV003-NIG-2008;Clade II)__AIT17580__GPCmut7 (opt4)
aggagagucccgcagucggcguccagcggcucugcuuguucgugugugugucguugcaggccuuauucaagcuuaccaugggccagaucaucaccuucuuccaggaggugccccacgugaucgaggaggugaugaacaucgugcugaucgcccugagccugcuggccauccugaagggcaucuacaacguggccaccugcggccuguucggccuggugagcuuccugcugcugugcggcagaagcugcagcaccaccuacaagggcguguacgagcugcagacccuggagcuggacauggccagccugaacaugaccaugccccugagcugcaccaagaacaacagccaccacuacaucauggugggcaacgagaccggccuggagcugacccugaccaacaccagcaucaucaaccacaaguucugcaaccugagcgacgcccacaagaagaaccuguacgaccacgcccugaugagcaucaucagcaccuuccaccugagcauccccaacuucaaccaguacgaggccaugagcugcgacuucaacggcggcaagaucagcgugcaguacaaccugagccacaccuacgccguggacgccgccaaccacugcggcaccaucgccaacggcgugcugcagaccuucaugagaauggccuggggcggcagcuacaucgcccuggacagcggcaagggcagcugggacugcaucaugaccagcuaccaguaccugaucauccagaacaccaccugggaggaccacugccaguucagcagacccagccccaucggcuaccugggccugcugagccagagaaccagagacaucuacaucagcagaagacugcugggcaccuucaccuggacccugagcgacagcgagagcaacgagacccccggcggcuacugccugaccagauggaugcugaucgaggccgagcugaagugcuucggcaacaccgccguggccaagugcaacgagaagcacgacgaggaguucugcgacaugcugagacuguucgacuucaacaagcaggccaucagaagacugaaggcccccgcccagaugagcauccagcugaucaacaaggccgugaacgcccugaucaacgaccagcugaucaugaagaaccaccugagagacaucaugggcauccccuacugcaacuacagcaaguacugcuaccugaaccacaccgugaccggcagaaccagccugcccagaugcugccuggugagcaacggcagcuaccugaacgagacccacuucagcgacgacaucgagcagcaggccgacaacaugaucaccgagcugcugcagaaggaguacauggacagacagggcaagaccccccugggccugguggaccuguucguguucagcaccagcuucuaccugaucagcaucuuccugcaccuggugaagauccccacccacagacacgugaucggcaagcccugccccaagccccacagacugaaccacaugggcaucugcagcugcggccuguacaagcaccccggcgugcccgugaaguggaagagaugaggacuagucccuguucccagagcccacuuuuuuuucuuuuuuugaaauaaaauagccugucuuucagaucucaaaggcucuuuucagagccaccaaaaaaaaaaaaaaaaaaaaaaaaaaaaaaaaaaaaaaaaaaaaaaaaaaaaaaaaaaaaaaaaaaaaaaaaaaaaaaaaaaaaaaaaaaaaaaaaaaaaa

SEQ ID NO: 31796 - RNA, 1745 nt, Artificial Sequence
  mRNA product Design a-1 (hSL-A100) comprising derived and/or modified sequence from LASV(LASV035-NIG-2009;Clade II)__AIT17588__GPCmut7 (opt4)
aggagagucccgcagucggcguccagcggcucugcuuguucgugugugugucguugcaggccuuauucaagcuuaccaugggccagaucaucaccuucuuccaggaggugccccacgugaucgaggaggugaugaacaucgugcugaucgcccugagccugcuggccauccugaagggcaucuacaacguggccaccugcggccuguucggccuggugagcuuccugcugcugugcggcagaagcugcagcaccaccuacaagggcguguacgagcugcagacccuggagcuggacauggccagccugaacaugaccaugccccugagcugcaccaagaacaacagccaccacuacaucauggugggcaacgagaccggccuggagcugacccugaccaacaccagcaucaucaaccacaaguucugcaaccugagcgacgcccacaagaagaaccuguacgaccacgcccugaugagcaucaucagcaccuuccaccugagcauccccaacuucaaccaguacgaggccaugagcugcgacuucaacggcggcaagaucagcgugcaguacaaccugagccacgccuacgccguggacgccgccaaccacugcggcaccaucgccaacggcgugcugcagaccuucaugagaauggccuggggcggcagcuacaucgcccuggacagcggcaagggcagcugggacugcaucaugaccagcuaccaguaccugaucauccagaacaccaccugggaggaccacugccaguucagcagacccagccccaucggcuaccugggccugcugagccagagaaccagagacaucuacaucagcagaagacugcugggcaccuucaccuggacccugagcgacagcgagggcaacgagacccccggcggcuacugccugaccagauggaugcugaucgaggccgagcugaagugcuucggcaacaccgccguggccaagugcaacgagaagcacgacgaggaguucugcgacaugcugagacuguucgacuucaacaagcaggccaucagaagacugaaggcccccgcccagaugagcauccagcugaucaacaaggccgugaacgcccugaucaacgaccagcugaucaugaagaaccaccugagagacaucaugggcauccccuacugcaacuacagcaaguacugcuaccugaaccacaccgugaccggcaagaccagccugcccagaugcugccuggugagcaacggcagcuaccugaacgagacccacuucagcgacgacaucgagcagcaggccgacaacaugaucaccgagcugcugcagaaggaguacaucgacagacagggcaagaccccccugggccugguggaccuguucguguucagcaccagcuucuaccugaucagcaucuuccugcaccuggugaagauccccacccacagacacgugaucggcaagcccugccccaagccccacagacugaaccacaugggcaucugcagcugcggccuguacaagcaccccggcgugcccgugaaguggaagagaugaggacuagucccuguucccagagcccacuuuuuuuucuuuuuuugaaauaaaauagccugucuuucagaucucaaaggcucuuuucagagccaccaaaaaaaaaaaaaaaaaaaaaaaaaaaaaaaaaaaaaaaaaaaaaaaaaaaaaaaaaaaaaaaaaaaaaaaaaaaaaaaaaaaaaaaaaaaaaaaaaaaaa

SEQ ID NO: 31797 - RNA, 1745 nt, Artificial Sequence
  mRNA product Design a-1 (hSL-A100) comprising derived and/or modified sequence from LASV(LASV1000-NIG-2009;Clade II)__AIT17782__GPCmut7 (opt4)
aggagagucccgcagucggcguccagcggcucugcuuguucgugugugugucguugcaggccuuauucaagcuuaccaugggccagaucaucaccuucuuccaggaggugccccacgugaucgaggaggugaugaacaucgugcugaucgcccugagccugcuggccauccugaagggcaucuacaacguggccaccugcggccuguucggccuggugagcuuccugcugcugugcggcagaagcugcagcaccaccuacaagggcguguacgagcugcagacccuggagcuggacauggccagccugaacaugaccaugccccugagcugcaccaagaacaacagccaccacuacaucauggugggcaacgagaccggccuggagcugacccugaccaacaccagcaucaucaaccacaaguucugcaaccugagcgacgcccacaagaagaaccuguacgaccacgcccugaugagcaucaucagcaccuuccaccugagcauccccaacuucaaccaguacgaggccaugagcugcgacuucaacggcggcaagaucagcgugcaguacaaccugagccacaccuacgccguggacgccgccaaccacugcggcaccaucgccaacggcgugcugcagaccuucaugagaauggccuggggcggcagcuacaucgcccuggacagcggcaagggcagcugggacugcaucaugaccagcuaccaguaccugaucauccagaacaccaccugggaggaccacugccaguucagcagacccagccccaucggcuaccugggccugcugagccagagaaccagagacaucuacaucagcagaagacugcugggcaccuucaccuggacccugagcgacagcgagggcaacgagacccccggcggcuacugccugaccagauggaugcugaucgaggccgagcugaagugcuucggcaacaccgccguggccaagugcaacgagaagcacgacgaggaguucugcgacaugcugagacuguucgacuucaacaagcaggccaucaagagacugaagacccccgcccagaugagcauccagcugaucaacaaggccgugaacgcccugaucaacgaccagcugaucaugaagaaccaccugagagacaucaugggcauccccuacugcaacuacagcaaguacugcuaccugaaccacaccgugaccggcaagaccagccugcccagaugcugccuggugagcaacggcagcuaccugaacgagacccacuucagcgacgacaucgagcagcaggccgacaacaugaucaccgagcugcugcagaaggaguacaucgacagacagggcaagaccccccugggccugguggaccuguucguguucagcaccagcuucuaccugaucagcaucuuccugcaccuggugaagauccccacccacagacacguggugggcaagcccugccccaagccccacagacugaaccacaugggcaucugcagcugcggccuguacaagcaccccggcgugcccgugaaguggaagagaugaggacuagucccuguucccagagcccacuuuuuuuucuuuuuuugaaauaaaauagccugucuuucagaucucaaaggcucuuuucagagccaccaaaaaaaaaaaaaaaaaaaaaaaaaaaaaaaaaaaaaaaaaaaaaaaaaaaaaaaaaaaaaaaaaaaaaaaaaaaaaaaaaaaaaaaaaaaaaaaaaaaaa

SEQ ID NO: 31798 - RNA, 1745 nt, Artificial Sequence
  mRNA product Design a-1 (hSL-A100) comprising derived and/or modified sequence from LASV(LASV221-NIG-2010;Clade II)__AIT17624__GPCmut7 (opt4)
aggagagucccgcagucggcguccagcggcucugcuuguucgugugugugucguugcaggccuuauucaagcuuaccaugggccagaucaucaccuucuuccaggaggugccccacgugaucgaggaggugaugaacaucgugcugaucgcccugagccugcuggccauccugaagggcaucuacaacguggccaccugcggccuguucggccuggugagcuuccugcugcugugcggcagaagcugcagcaccaccuacaagggcguguacgagcugcagacccuggagcuggacauggccagccugaacaugaccaugccccugagcugcaccaagaacaacagccaccacuacaucauggugggcaacgagaccggccuggagcugacccugaccaacaccagcaucaucaaccacaaguucugcaaccugagcgacgcccacaagaagaaccuguacgaccacgcccugaugagcaucaucagcaccuuccaccugagcauccccaacuucaaccaguacgaggccaugagcugcgacuucaacggcggcaagaucagcgugcaguacaaccugagccacaccuacgccaucgacgccgccaaccacugcggcaccaucgccaacggcgugcugcagaccuucaugagaauggccuggggcggcagcuacaucgcccuggacagcggcaagggcagcugggacugcaucaugaccagcuaccaguaccugaucauccagaacaccaccugggaggaccacugccaguucagcagacccagccccaucggcuaccugggccugcugagccagagaaccagagacaucuacaucagcagaagacugcugggcaccuucaccuggacccugagcgacagcgagggcaacgagacccccggcggcuacugccugaccagauggaugcugaucgaggccgagcugaagugcuucggcaacaccgccguggccaagugcaacgagaagcacgacgaggaguucugcgacaugcugagacuguucgacuucaacaagcaggccaucagaagacugaagacccccgcccagaugagcauccagcugaucaacaaggccgugaacgcccugaucaacgaccagcugaucaugaagaaccaccugagagacaucaugggcauccccuacugcaacuacagcaaguacugcuaccugaaccacaccgugaccggcaagaccagccugcccagaugcugccuggugagcaacggcagcuaccugaacgagacccacuucagcgacgacaucgagcagcaggccgacaacaugaucaccgagaugcugcagaaggaguacauggacagacagggcaagaccccccugggccugguggaccuguucguguucagcaccagcuucuaccugaucagcaucuuccugcaccuggugaagauccccacccacagacacgugaucggcaagcccugccccaagccccacagacugaaccacaugggcaucugcagcugcggccuguacaagcaccccggcgugcccgugaaguggaagagaugaggacuagucccuguucccagagcccacuuuuuuuucuuuuuuugaaauaaaauagccugucuuucagaucucaaaggcucuuuucagagccaccaaaaaaaaaaaaaaaaaaaaaaaaaaaaaaaaaaaaaaaaaaaaaaaaaaaaaaaaaaaaaaaaaaaaaaaaaaaaaaaaaaaaaaaaaaaaaaaaaaaaa

SEQ ID NO: 31799 - RNA, 1745 nt, Artificial Sequence
  mRNA product Design a-1 (hSL-A100) comprising derived and/or modified sequence from LASV(LASV237-NIG-2010;Clade II)__AIT17638__GPCmut7 (opt4)
aggagagucccgcagucggcguccagcggcucugcuuguucgugugugugucguugcaggccuuauucaagcuuaccaugggccagaucaucaccuucuuccaggaggugccccacgugaucgaggaggugaugaacaucgugcugaucgcccugagccugcuggccauccugaagggcaucuacaacguggccaccugcggccuguucggccuggugagcuuccugcugcugugcggcagaagcugcagcaccaccuacaagggcguguacgagcugcagacccuggagcuggacauggccagccugaacaugaccaugccccugagcugcaccaagaacaacagccaccacuacaucauggugggcaacgagaccggccuggagcugacccugaccaacaccagcaucaucaaccacaaguucugcaaccugagcgacgcccacaagaaggaccuguacgaccacgcccugaugagcaucaucagcaccuuccaccugagcauccccaacuucaaccaguacgaggccaugagcugcgacuucaacggcggcaagaucagcgugcaguacaaccugagccacaccuacgccguggacgccgccaaccacugcggcaccaucgccaacggcgugcugcagaccuucaugagaauggccuggggcggcagcuacaucgcccuggacagcggcaagggcagcugggacugcaucaugaccagcuaccaguaccugaucauccagaacaccaccugggaggaccacugccaguucagcagacccagccccaucggcuaccugggccugcugagccagagaaccagagacaucuacaucagcagaagacugcugggcaccuucaccuggacccugagcgacagcgagggcaacgagacccccggcggcuacugccugaccagauggaugcugaucgaggccgagcugaagugcuucggcaacaccgccguggccaagugcaacgagaagcacgacgaggaguucugcgacaugcugagacuguucgacuucaacaagcaggccaucagaagacugaagacccccgcccagaugagcauccagcugaucaacaaggccgugaacgcccugaucaacgaccagcugaucaugaagaaccaccugagagacaucaugggcauccccuacugcaacuacagcaaguacugcuaccugaaccacaccgugaccggcaagaccagccugcccagaugcugccuggugagcaacggcagcuaccugaacgagacccacuucagcgacgacaucgagcagcaggccgacaacaugaucaccgagcugcugcagaaggaguacauggacagacagggcaagaccccccugggccugguggaccuguucguguucagcaccagcuucuaccugaucagcaucuuccugcaccugaucaagauccccacccacagacacaucaccggcaagcccugccccaagccccacagacugaaccacaugggcaucugcagcugcggccuguacaagcaccccggcgugcccgugaaguggaagagaugaggacuagucccuguucccagagcccacuuuuuuuucuuuuuuugaaauaaaauagccugucuuucagaucucaaaggcucuuuucagagccaccaaaaaaaaaaaaaaaaaaaaaaaaaaaaaaaaaaaaaaaaaaaaaaaaaaaaaaaaaaaaaaaaaaaaaaaaaaaaaaaaaaaaaaaaaaaaaaaaaaaaa

SEQ ID NO: 31800 - RNA, 1745 nt, Artificial Sequence
  mRNA product Design a-1 (hSL-A100) comprising derived and/or modified sequence from LASV(LASV253-NIG-2011;Clade II)__AIT17670__GPCmut7 (opt4)
aggagagucccgcagucggcguccagcggcucugcuuguucgugugugugucguugcaggccuuauucaagcuuaccaugggccagaucaucaccuucuuccaggaggugccccacgugaucgaggaggugaugaacaucgugcugaucgcccugagccugcuggccauccugaagggcaucuacaacguggccaccugcggccuguucggccuggugagcuuccugcugcugugcggcagaagcugcagcaccaccuacaagggcguguacgagcugcagacccuggagcuggacauggccagccugaacaugaccaugccccugagcugcaccaagaacaacagccaccacuacaucauggugggcaacgagaccggccuggagcugacccugaccaacaccagcaucaucaaccacaaguucugcaaccugagcgacgcccacaagaagaaccuguacgaccacgcccugaugagcaucaucagcaccuuccaccugagcauccccaacuucaaccaguacgaggccaugagcugcgacuucaacggcggcaagaucagcgugcaguacaaccugagccacaccuacgccguggacgccgccaaccacugcggcaccaucgccaacggcgugcugcagaccuucaugagaauggccuggggcggcagcuacaucgcccuggacagcggcaagggcagcugggacugcaucaugaccagcuaccaguaccugaucauccagaacaccaccugggaggaccacugccaguucagcagacccagccccaucggcuaccugggccugcugagccagagaaccagagacaucuacaucagcagaagacugcugggcaccuucaccuggacccugagcgacagcgagggcaacgagacccccggcggcuacugccugaccagauggaugcugaucgaggccgagcugaagugcuucggcaacaccgccguggccaagugcaacgagaagcacgacgaggaguucugcgacaugcugagacuguucgacuucaacaagcaggccaucagaagacugaaggcccccgcccagaugagcauccagcugaucaacaaggccgugaacgcccugaucaacgaccagcugaucaugaagaaccaccugagagacaucaugggcauccccuacugcaacuacagcaaguacugcuaccugaaccacaccgugaccggcagaaccagccugcccagaugcugccuggugagcaacggcagcuaccugaacgagacccacuucagcgacgacaucgagcagcaggccgacaacaugaucaccgagcugcugcagaaggaguacaucgacagacagggcaagaccccccugggccugguggaccuguucguguucagcaccagcuucuaccugaucagcaucuuccugcaccuggugaagauccccacccacagacacaucaucggcaagcccugccccaagccccacagacugaaccacaugggcaucugcagcugcggccuguacaagcaccccggcgugcccgugaaguggaagagaugaggacuagucccuguucccagagcccacuuuuuuuucuuuuuuugaaauaaaauagccugucuuucagaucucaaaggcucuuuucagagccaccaaaaaaaaaaaaaaaaaaaaaaaaaaaaaaaaaaaaaaaaaaaaaaaaaaaaaaaaaaaaaaaaaaaaaaaaaaaaaaaaaaaaaaaaaaaaaaaaaaaaa

SEQ ID NO: 31801 - RNA, 1745 nt, Artificial Sequence
  mRNA product Design a-1 (hSL-A100) comprising derived and/or modified sequence from LASV(LASV254-NIG-2011;Clade II)__AIT17674__GPCmut7 (opt4)
aggagagucccgcagucggcguccagcggcucugcuuguucgugugugugucguugcaggccuuauucaagcuuaccaugggccagaucaucaccuucuuccaggaggugccccacgugaucgaggaggugaugaacaucgugcugaucgcccugagccugcuggccauccugaagggcaucuacaacguggccaccugcggccuguucggccuggugagcuuccugcugcugugcggcagaagcugcagcaccaccuacaagggcguguacgagcugcagacccuggagcuggacaugaccaaccugaacaugaccaugccccugagcugcaccaagaacaacagccaccacuacaucauggugggcaacgagaccggccuggagcugacccugaccaacaccagcaucaucaaccacaaguucugcaaccugagcgacgcccacaagaagaaccuguacaaccacgcccugaugagcaucaucagcaccuuccaccugagcauccccaacuucaaccaguacgaggccaugagcugcgacuucaacggcggcaagaucagcgugcaguacaaccugagccacagcuacgccguggacgccgccaaccacugcggcaccaucgccaacggcgugcugcagaccuucaugagaauggccuggggcggcagcuacaucgcccuggacagcggcaagggcaacugggacugcaucaugaccagcuaccaguaccugaucauccagaacaccaccugggaggaccacugccaguucagcagacccagccccaucggcuaccugggccugcugagccagagaaccagagacaucuacaucagcagaagacugcugggcaccuucaccuggacccugagcgacagcgagggcaacgagacccccggcggcuacugccugaccagauggaugcugaucgaggccgagcugaagugcuucggcaacaccgccguggccaagugcaacgagaagcacgacgaggaguucugcgacaugcugagacuguucgacuucaacaagcaggccaucagaagacugaagacccccgcccaggccaacauccagcugaucaacaaggccgugaacgcccugaucaacgaccagcugaucaugaagaaccaccugagagacaucaugggcauccccuacugcaacuacagcaaguacugcuaccugaaccacaccgugaccggcaagaccagccugcccagaugcugccuggugagcaacggcagcuaccugaacgagacccacuucagcgacgacaucgagcagcaggccgacaacaugaucaccgagcugcugcagaaggaguacauggacagacagggcaagaccccccugggccugguggaccuguucguguucagcaccagcuucuaccugaucagcaucuuccugcaccuggugaagauccccacccacagacacgugaucggcaagcccugccccaagccccacagacugaaccacaugggcaucugcagcugcggccuguacaagcaccccggcgugcccgugaaguggaagagaugaggacuagucccuguucccagagcccacuuuuuuuucuuuuuuugaaauaaaauagccugucuuucagaucucaaaggcucuuuucagagccaccaaaaaaaaaaaaaaaaaaaaaaaaaaaaaaaaaaaaaaaaaaaaaaaaaaaaaaaaaaaaaaaaaaaaaaaaaaaaaaaaaaaaaaaaaaaaaaaaaaaaa

SEQ ID NO: 31802 - RNA, 1745 nt, Artificial Sequence
  mRNA product Design a-1 (hSL-A100) comprising derived and/or modified sequence from LASV(Nig08-A19;Clade III)__ADU56618__GPCmut7 (opt4)
aggagagucccgcagucggcguccagcggcucugcuuguucgugugugugucguugcaggccuuauucaagcuuaccaugggccagaucgugaccuucuuccaggaggugccccacgugaucgaggaggugaugaacaucgugcugaucgcccugagcauccuggccauccugaagggccuguacaacaucgccaccugcggccugaucggccuggugaccuuccugcugcugagcggcagaagcugcagcaugaccuacaagggcguguacgagcugcagacccuggagcugaacaugaacacccugaacaugaccaugccccugagcugcaccaagaacaacagccaccacuacaucauggugggcaacgagaccggccuggagcugacccugaccaacaccagccugcugcaccacaaguucugcaaccugagcgacgcccacaagaagaaccuguacgaccacacccugaugagcaucaucagcaccuuccaccugagcauccccaacuucaaccaguacgaggccaugagcugcgacuucaacggcggcaagaucaccgugcaguacaaccugagccacagcuacgccaucgacgccgccaaccacugcggcaccguggccaacggcgugcugcagaccuucaugagaauggccuggggcggcagcuacaucgcccuggacagcggcagaggcaagugggacugcaucaugaccagcuaccaguaccugaucauccagaacaccaccugggaggaccacugccaguucagcagacccagccccaucggcuaccugggccugcugagccagagaaccagagacaucuacaucagcagaagacugcugggcaccuucaccuggacccugagcgacagcgagggcaacgagacccccggcggcuacugccugaccagauggaugcugaucgaggccgagcugaagugcuucggcaacaccgccguggccaagugcaacgagaagcacgacgaggaguucugcgacaugcugagacuguucgacuucaacaagcaggccaucagaagacugaaggcccccgcccagaugagcauccagcugaucaacaaggccgugaacgcccugaucaacgaccagcugaucaugaagaaccaccugagagacaucaugggcauccccuacugcaacuacagcaaguacugcuaccugaaccacaccagcaccggcagaaccagccugcccagaugcugccuggugagcaacggcagcuaccugaacgagacccacuucagcgacgacaucgagcagcaggccgacaacaugaucaccgagaugcugcagaaggaguaccuggacagacagggcaagaccccccugggccugguggaccuguucguguucagcaccagcuucuaccugaucagcaucuuccugcaccuggugaagauccccacccacagacacaucgugggcaagcccugccccaagccccacagacugaaccacaugggcaucugcagcugcggccuguacaagcagcccggcgugcccgugagauggaagagaugaggacuagucccuguucccagagcccacuuuuuuuucuuuuuuugaaauaaaauagccugucuuucagaucucaaaggcucuuuucagagccaccaaaaaaaaaaaaaaaaaaaaaaaaaaaaaaaaaaaaaaaaaaaaaaaaaaaaaaaaaaaaaaaaaaaaaaaaaaaaaaaaaaaaaaaaaaaaaaaaaaaaa

SEQ ID NO: 31803 - RNA, 1748 nt, Artificial Sequence
  mRNA product Design a-1 (hSL-A100) comprising derived and/or modified sequence from LASV(G1180-SLE-2010;Clade IV)__AIT17168__GPCmut7 (opt4)
aggagagucccgcagucggcguccagcggcucugcuuguucgugugugugucguugcaggccuuauucaagcuuaccaugggccagaucgugaccuucuuccaggaggugccccacgugaucgaggaggugaugaacaucgugcugaucgcccugagcauccuggccgugcugaagggccuguacaacuucgccaccugcggccuggugggccugcugaccuuccugcugcugugcggcagaagcugcaccgccagcagauacaagggcguguacgagcugcagacccuggagcugaacauggagacccugaacaugaccaugccccugagcugcaccaagaacaacagccaccacuacaucauggugggcaacgagaccggccuggagcugacccugaccaacaccagcaucaucaaccacaaguucugcaaccugagcgacgcccacaagaagaaccuguacgaccacgcccugaugagcaucaucagcaccuuccaccugagcauccccaacuucaaccaguacgaggccaugagcugcgacuucaacggcggcaagaucagcgugcaguacaaccugagccacagcuacgccggcgacgccgccaaccacugcggcaccguggccaacggcgugcugcagaccuucaugagaauggccuggggcggcagcuacaucgcccuggacagcggccacggcagcugggacugcaucaugaccagcuaccaguaccugaucauccagaacaccaccugggaggaccacugccaguucagcagacccagccccaucggcuaccugggccugcugagccagagaaccagagacaucuacaucagcagaagacugcugggcaccuucaccuggacccugagcgacagcgagggcaaggacacccccggcggcuacugccugaccagauggaugcugaucgaggccgagcugaagugcuucggcaacaccgccguggccaagugcaacgagaagcacgacgaggaguucugcgacaugcugagacuguucgacuucaacaagcaggccauccagagacugaaggcccccgcccagaugagcauccagcugaucaacaaggccgugaacgcccugaucaacgaccagcugaucaugaagaaccaccugagagacaucaugggcauccccuacugcaacuacagcaaguacugcuaccugaaccacaccaccaccggcaagaccagccugcccaagugcugccuggugagcaacggcagcuaccugaacgagacccacuucagcgacgacaucgagcagcaggccgacaacaugaucaccgagaugcugcagaaggaguacauggagagacagggcaagaccccccugggccugguggaccuguucguguucagcaccagcuucuaccugaucagcaucuuccugcaccuggugaagauccccacccacagacacaucgugggcaagagcugccccaagccccacagacugaaccacaugggcaucugcagcugcggccuguacaagcagcccggcgugcccgugaaguggaagagaugaggacuagucccuguucccagagcccacuuuuuuuucuuuuuuugaaauaaaauagccugucuuucagaucucaaaggcucuuuucagagccaccaaaaaaaaaaaaaaaaaaaaaaaaaaaaaaaaaaaaaaaaaaaaaaaaaaaaaaaaaaaaaaaaaaaaaaaaaaaaaaaaaaaaaaaaaaaaaaaaaaaaa

SEQ ID NO: 31804 - RNA, 1748 nt, Artificial Sequence
  mRNA product Design a-1 (hSL-A100) comprising derived and/or modified sequence from LASV(G1442-SLE-2011;Clade IV)__AIT17180__GPCmut7 (opt4)
aggagagucccgcagucggcguccagcggcucugcuuguucgugugugugucguugcaggccuuauucaagcuuaccaugggccagaucgugaccuucuuccaggaggugccccacgugaucgaggaggugaugaacaucgugcugaucgcccugagcauccuggccgugcugaagggccuguacaacguggccaccugcggccugaucggccuggugaccuuccugcugcugugcggcagaagcugcaccaccacccuguacaagggcguguacgagcugcagacccuggagcugaacauggagacccugaacaugaccaugccccugagcugcaccaagaacaacagccaccacuacaucagagugggcaacgagaccggccuggagcugacccugaccaacaccagcaucaucaaccacaaguucugcaaccugagcgacgcccacaagaagaaccuguacgaccacgcccugaugagcaucaucagcaccuuccaccugagcauccccaacuucaaccaguacgaggccaugagcugcgacuucaacggcggcaagaucagcgugcaguacaaccugagccacagcuacgccggcgacgccgccaaccacugcggcaccguggccaacggcgugcugcagaccuucaugagaauggccuggggcggcagcuacaucgcccuggacagcggcagaggcaacugggacugcaucaugaccagcuaccaguaccugaucauccagaacaccaccugggacgaccacugccaguucagcagacccagccccaucggcuaccugggccugcugagccagagaaccagagacguguacaucagcagaagacugcugggcaccuucaccuggacccugagcgacagcgagggcaaggacacccccggcggcuacugccugaccagauggaugcugaucgaggccgagcugaagugcuucggcaacaccgccguggccaagugcaacgagaagcacgacgaggaguucugcgacaugcugagacuguucgacuucaacaagcaggccauccagagacugaaggcccccgcccagaugagcauccagcugaucaacaaggccgugaacgcccugaucaacgaccagcugaucaugaagaaccaccugagagacaucaugggcauccccuacugcaacuacagcaaguacugcuaccugaacaacaccgccaccggcaagaccagccugcccaagugcugccugaucagcaacggcagcuaccugaacgagacccacuucagcgacgacaucgagcaggaggccgacaacaugaucaccgagaugcugcagaaggaguacauggagagacagggcaagaccccccugggccugguggaccuguucguguucagcaccagcuucuaccugaucagcaucuuccugcaccuggugaagauccccacccacagacacaucgugggcaagagcugccccaagccccacagacugaaccacaugggcaucugcagcugcggccuguacaagcagcccggcgugcccgugagauggaagagaugaggacuagucccuguucccagagcccacuuuuuuuucuuuuuuugaaauaaaauagccugucuuucagaucucaaaggcucuuuucagagccaccaaaaaaaaaaaaaaaaaaaaaaaaaaaaaaaaaaaaaaaaaaaaaaaaaaaaaaaaaaaaaaaaaaaaaaaaaaaaaaaaaaaaaaaaaaaaaaaaaaaaa

SEQ ID NO: 31805 - RNA, 1748 nt, Artificial Sequence
  mRNA product Design a-1 (hSL-A100) comprising derived and/or modified sequence from LASV(G3010-SLE-2013;Clade IV)__AIT17344__GPCmut7 (opt4)
aggagagucccgcagucggcguccagcggcucugcuuguucgugugugugucguugcaggccuuauucaagcuuaccaugggccagaucgugaccuucuuccaggaggugccccacgugaucgaggaggugaugaacaucgugcugaucgcccugagcauccuggccgugcugaagggccuguacaacuucgccaccugcggccuggugggccuggugaccuuccugcugcugugcggcagaagcugcaccaccagccuguacaagggcguguacgagcugcagacccuggagcugaacauggagacccugaacaugaccaugccccugagcugcaccaagaacaacagccaccacuacaucauggugggcaacgagaccggccuggagcugacccugaccaacaccagcaucaucaaccacaaguucugcaaccugagcgacgcccacaagaagaaccuguacaaccacgcccugaugagcaucaucagcaccuuccaccugagcauccccaacuucaaccaguacgaggccaugagcugcgacuucaacggcggcaagaucagcgugcaguacaaccugagccacagcuacgccggcgacgccgccagccacugcggcaccguggccaacggcgugcugcagaccuucaugagaauggccuggggcggcagcuacaucgcccuggacagcggcuacggcaagugggacugcaucaugaccagcuaccaguaccugaucauccagaacaccaccugggaggaccacugccaguucagcagacccagccccaucggcuaccugggccugcugagccagagaaccagagacaucuacaucagcagaagacugcugggcaccuucaccuggacccugagcgacagcgagggcaaggacacccccggcggcuacugccugaccagauggaugcugaucgaggccgagcugaagugcuucggcaacaccgccguggccaagugcaacgagaagcacgacgaggaguucugcgacaugcugagacuguucgacuucaacaagcaggccauccagagacugaagacccccgcccagaugagcauccagcugaucaacaaggccgugaacgcccugaucaacgaccagcugaucaugaagaaccaccugagagacaucaugggcauccccuacugcaacuacagcaaguacugcuaccugaaccacaccaccaccggcaagaccagccugcccaagugcugccuggugagcaacggcagcuaccugaacgagacccacuucagcgacgacaucgagcagcaggccgacaacaugaucaccgagaugcugcagaaggaguacauggagagacagggcaagaccccccugggccugguggaccuguucguguucagcaccagcuucuaccugaucagcaucuuccugcaccuggugaagauccccacccacagacacaucgugggcaagagcugccccaagccccacagacugaaccacaugggcaucugcagcugcggccuguacaagcagcccggcgugcccgugagauggaagagaugaggacuagucccuguucccagagcccacuuuuuuuucuuuuuuugaaauaaaauagccugucuuucagaucucaaaggcucuuuucagagccaccaaaaaaaaaaaaaaaaaaaaaaaaaaaaaaaaaaaaaaaaaaaaaaaaaaaaaaaaaaaaaaaaaaaaaaaaaaaaaaaaaaaaaaaaaaaaaaaaaaaaa

SEQ ID NO: 31806 - RNA, 1748 nt, Artificial Sequence
  mRNA product Design a-1 (hSL-A100) comprising derived and/or modified sequence from LASV(G502-SLE-2009;Clade IV)__AIT17126__GPCmut7 (opt4)
aggagagucccgcagucggcguccagcggcucugcuuguucgugugugugucguugcaggccuuauucaagcuuaccaugggccagaucgugaccuucuuccaggaggugccccacgugaucgaggaggugaugaacaucgugcugaucgcccugagcauccuggccgugcugaagggccuguacaacuucgccaccugcggccuggugggccugcugaccuuccugcugcugugcggcagaagcugcaccaccggccuguacaagggcguguacgagcugcagacccuggagcugaacauggagacccugaacaugaccaugccccugagcugcaccaagaacaacagccaccacuacaucauggugggcaacgagaccggccuggagcugacccugaccaacaccagcaucaucaaccacaaguucugcaaccugagcgacgcccacaagaagaaccuguacgaccacgcccugaugagcaucaucagcaccuuccaccugagcauccccaacuucaaccaguacgaggccaugagcugcgacuucaacggcggcaagaucagcgugcaguacaaccugagccacagcuacgccggcgacgccgccgaccacugcggcaccguggccaacggcgugcugcagaccuucaugagaauggccuggggcggcagcuacaucgcccuggacagcggcagaggcagaugggacugcaucaugaccagcuaccaguaccugaucauccagaacaccaccugggaggaccacugccaguucagcagacccagccccaucggcuaccugggccugcugagccagagaaccagagacaucuacaucagcagaagacugcugggcaccuucaccuggacccugagcgacagcgagggcaaggacacccccggcggcuacugccugaccagauggaugcugaucgaggccgagcugaagugcuucggcaacaccgccguggccaagugcaacgagaagcacgacgaggaguucugcgacaugcugagacuguucgacuucaacaagcaggccauccagagacugaaggcccccgcccagaugagcauccagcugaucaacaaggccgugaacgcccugaucaacgaccagcuggugaugaagaaccaccugagagacaucaugggcauccccuacugcaacuacagcagauacugcuaccugaaccacaccaccaccggcagaaccagccugcccaagugcugccuggugagcaacggcagcuaccugaacgagacccacuucagcgacgacaucgagcagcaggccgacaacaugaucaccgagaugcugcagaaggaguacauggagagacagggcaagaccccccugggccugguggaccuguucguguucagcaccagcuucuaccugaucagcaucuuccugcaccuggugaagauccccacccacagacacaucgugggcaagagcugccccaagccccacagacugaaccacaugggcaucugcagcugcggccuguacaagcagcccggcgugcccgugaaguggaagagaugaggacuagucccuguucccagagcccacuuuuuuuucuuuuuuugaaauaaaauagccugucuuucagaucucaaaggcucuuuucagagccaccaaaaaaaaaaaaaaaaaaaaaaaaaaaaaaaaaaaaaaaaaaaaaaaaaaaaaaaaaaaaaaaaaaaaaaaaaaaaaaaaaaaaaaaaaaaaaaaaaaaaa

SEQ ID NO: 31807 - RNA, 1748 nt, Artificial Sequence
  mRNA product Design a-1 (hSL-A100) comprising derived and/or modified sequence from LASV(G733-SLE-2010;Clade IV)__AIT17154__GPCmut7 (opt4)
aggagagucccgcagucggcguccagcggcucugcuuguucgugugugugucguugcaggccuuauucaagcuuaccaugggccagaucgugaccuucuuccaggaggugccccacgugaucgaggaggugaugaacaucgugcugaucgcccugagcauccuggccgugcugaagggccuguacaacuucgccaccugcggcaucgugggccuggugagcuuccugcugcugugcggcagaagcugcaccaccagccuguacaagggcguguacgagcugcagacccuggagcugaacauggagacccugaacaugaccaugccccugagcugcaccaagaacaacagccaccacuacaucauggugggcaacgagaccggccuggagcugacccugaccaacaccagcaucaucaaccacaaguucugcaaccugagcgacgcccacaagaagaaccuguacgaccacgcccugaugagcaucaucagcaccuuccaccugagcauccccaacuucaaccaguacgaggccaugagcugcgacuucaacggcggcaagaucagcgugcaguacaaccugagccacagcuacgccggcgacgccgccaaccacugcggcaccaucgccaacggcgugcugcagaccuucaugagaauggccuggggcggcagcuacaucgcccuggacagcggcagagacagaugggacugcaucaugaccagcuaccaguaccugaucauccagaacaccaccugggaggaccacugccaguucagcagacccagccccaucggcuaccugggccugcugagccagagaaccagagacaucuacaucagcagaagacugcugggcaccuucaccuggacccugagcgacagcgagggcaaggacacccccggcggcuacugccugaccagauggaugcugaucgaggccgagcugaagugcuucggcaacaccgccguggccaagugcaacgagaagcacgacgaggaguucugcgacaugcugagacuguucgacuucaacaagcaggccauccagagacugaaggcccccgcccagaugagcauccagcugaucaacaaggccgugaacgcccugaucaacgaccagcugaucaugaagaaccaccugagagacaucaugggcauccccuacugcaacuacagcaaguacugcuaccugaaccacaccaccaccggcaagaccagccugcccaagugcugccuggugagcaacggcagcuaccugaacgagacccacuucagcgacgacaucgagcagcaggccgacaacaugaucaccgagaugcugcagaaggaguacauggagagacagggcaagaccccccugggccugguggaccuguucguguucagcaccagcuucuaccugaucagcaucuuccugcaccuggugaagauccccacccacagacacguggugggcaagagcugccccaagccccacagacugaaccacaugggcaucugcagcugcggccuguacggccagcccggcgugcccgugaaguggaagagaugaggacuagucccuguucccagagcccacuuuuuuuucuuuuuuugaaauaaaauagccugucuuucagaucucaaaggcucuuuucagagccaccaaaaaaaaaaaaaaaaaaaaaaaaaaaaaaaaaaaaaaaaaaaaaaaaaaaaaaaaaaaaaaaaaaaaaaaaaaaaaaaaaaaaaaaaaaaaaaaaaaaaa

SEQ ID NO: 31808 - RNA, 1748 nt, Artificial Sequence
  mRNA product Design a-1 (hSL-A100) comprising derived and/or modified sequence from MOPV/LASV reassortant(IGS-1;Clade IV)__AFY05576__GPCmut7 (opt4)
aggagagucccgcagucggcguccagcggcucugcuuguucgugugugugucguugcaggccuuauucaagcuuaccaugggccagaucgugaccuucuuccaggaggugccccacgugaucgaggaggugaugaacaucgugcugaucgcccugagcgugcuggccgugcugaagggccuguacaacuucgccaccugcggccuggugggccuggugaccuuccugcugcugugcggcagaagcugcaccaccagccuguacaagggcguguacgagcugcagacccuggagcugaacauggagacccugaacaugaccaugccccugagcugcaccaagaacaacagccaccacuacaucauggugggcaacgagaccggccuggagcugacccugaccaacaccagcaucaucaaccacaaguucugcaaccugagcgacgcccacaagaagaaccuguacgaccacgcccugaugagcaucaucagcaccuuccaccugagcauccccaacuucaaccaguacgaggccaugagcugcgacuucaacggcggcaagaucagcgugcaguacaaccugagccacagcuacgccggcgacgccgccaaccacugcggcaccguggccaacggcgugcugcagaccuucaugagaauggccuggggcggcagcuacaucgcccuggacagcggcagaggcaacugggacugcaucaugaccagcuaccaguaccugaucauccagaacaccaccugggaggaccacugccaguucagcagacccagccccaucggcuaccugggccugcugagccagagaaccagagacaucuacaucagcagaagacugcugggcaccuucaccuggacccugagcgacagcgagggcgaggacacccccggcggcuacugccugaccagauggaugcugaucgaggccgagcugaagugcuucggcaacaccgccguggccaagugcaacgagaagcacgacgaggaguucugcgacaugcugagacuguucgacuucaacaagcaggccauccagagacugaaggcccccgcccagaugagcauccagcugaucaacaaggccgugaacgcccugaucaacgaccagcugaucaugaagaaccaccugagagacaucaugggcauccccuacugcaacuacagcaaguacugcuaccugaaccacaccaccaccggcagaaccagccugcccaagugcugccuggugagcaacggcagcuaccugaacgagacccacuucagcgacgacaucgagcagcaggccgacaacaugaucaccgagaugcugcagaaggaguacauggagagacagggcaagaccccccugggccugguggaccuguucguguucagcaccagcuucuaccugaucagcaucuuccugcaccuggugaagauccccacccacagacacaucgugggcaagagcugccccaagccccacagacugaaccacaugggcaucugcagcugcggccuguacaagcagcccggcgugcccgugaaguggaagagaugaggacuagucccuguucccagagcccacuuuuuuuucuuuuuuugaaauaaaauagccugucuuucagaucucaaaggcucuuuucagagccaccaaaaaaaaaaaaaaaaaaaaaaaaaaaaaaaaaaaaaaaaaaaaaaaaaaaaaaaaaaaaaaaaaaaaaaaaaaaaaaaaaaaaaaaaaaaaaaaaaaaaa

SEQ ID NO: 31809 - RNA, 1748 nt, Artificial Sequence
  mRNA product Design a-1 (hSL-A100) comprising derived and/or modified sequence from LASV(LM765-SLE-2012;Clade IV)__AIT17814__GPCmut7 (opt4)
aggagagucccgcagucggcguccagcggcucugcuuguucgugugugugucguugcaggccuuauucaagcuuaccaugggccagaucgugaccuucuuccaggaggugccccacgugaucgaggaggugaugaacaucgugcugaucgcccugagcauccuggccgugcugaagggccuguacaacuucgccaccugcggccuggugggccuggugaccuuccugcugcugugcggcagaagcugcaccaccagccuguacaagggcguguacgagcugcagacccuggagcugaacauggagacccugaacaugaccaugccccugagcugcaccaagaacaacagccaccacuacaucauggugggcaacgagaccggccuggagcugacccugaccaacaccagcaucaucgaccacaaguucugcaaccugagcgacgcccacagaaagaaccuguacgaccacgcccugaugagcaucaucagcaccuuccaccugagcauccccaacuucaaccaguacgaggccaugagcugcgacuucaacggcggcaagaucagcgugcaguacaaccugagccacagcuacgccaaggacgccgccgaccacugcggcaccguggccaacggcgugcugcagaccuucaugagaauggccuggggcggcagcuacaucgcccuggacagcggcagaggcagaugggacugcaucaugaccagcuaccaguaccugaucauccagaacaccaccugggaggaccacugccaguucagcagacccagccccaucggcuaccugggccugcugagccagagaaccagagacaucuacaucagcagaagacugcugggcaccuucaccuggacccugagcgacagcgagggcaaggacacccccggcggcuacugccugaccagauggaugcugaucgaggccgagcugaagugcuucggcaacaccgccguggccaagugcaacgagaagcacgacgaggaguucugcgacaugcugagacuguucgacuucaacaagcaggccauccagagacugaaggcccccgcccagaugagcauccagcugaucaacaaggccgugaacgcccugaucaacgaccagcugaucaugaagaaccaccugagagacaucaugggcauccccuacugcaacuacagcaaguacugcuaccugaaccacaccaccaccggcaagaccagccugcccaagugcugccuggugagcaacggcagcuaccugaacgagacccacuucagcgacgacaucgagcagcaggccgacaacaugaucaccgagaugcugcagaaggaguacauggagagacagggcaagaccccccugggccugguggaccuguucguguucagcaccagcuucuaccugaucagcaucuuccugcaccuggugaagauccccacccacagacacaucgugggcaagcccugccccaagccccacagacugaaccacaugggcaucugcagcugcggccuguacaagcagcccggcgugcccgugaaguggaagagaugaggacuagucccuguucccagagcccacuuuuuuuucuuuuuuugaaauaaaauagccugucuuucagaucucaaaggcucuuuucagagccaccaaaaaaaaaaaaaaaaaaaaaaaaaaaaaaaaaaaaaaaaaaaaaaaaaaaaaaaaaaaaaaaaaaaaaaaaaaaaaaaaaaaaaaaaaaaaaaaaaaaaa

SEQ ID NO: 31810 - RNA, 1748 nt, Artificial Sequence
  mRNA product Design a-1 (hSL-A100) comprising derived and/or modified sequence from LASV(LM776-SLE-2012;Clade IV)__AIT17824__GPCmut7 (opt4)
aggagagucccgcagucggcguccagcggcucugcuuguucgugugugugucguugcaggccuuauucaagcuuaccaugggccagaucgugaccuucuuccaggaggugccccacgugaucgaggaggugaugaacaucgugcugaucgcccugagcauccuggccgugcugaagggccuguacaacuucgccaccugcggccuggugggccuggugaccuuccugcugcugugcggcagaagcugcaccaccagcguguacaagggcguguacgagcugcagacccuggagcugaacauggagacccugaacaugaccaugccccugagcugcaccaagaacaacagccaccacuacaucauggugggcaacgagaccggccuggagcugacccugaccaacaccagcaucaucaaccacaaguucugcaaccugagcgacgcccacaagaagaaccuguacgaccacgcccugaugagcaucaucagcaccuuccaccugagcauccccaacuucaaccaguacgaggccaugagcugcgacuucaacggcggcaagaucagcgugcaguacaaccugagccacagcuacgccggcgacgccgccaaccacugcggcaccguggccaacggcgugcugcagaccuucaugagaauggccuggggcggcagcuacaucgcccuggacagcggccacggcaagugggacugcaucaugaccagcuaccaguaccugaucauccagaacaccaccugggaggaccacugccaguucagcagacccagccccaucggcuaccugggccugcugagccagagaaccagagacaucuacaucagcagaagacugcugggcaccuucaccuggacccugagcgacagcgagggcaaggacacccccggcggcuacugccugaccagauggaugcugaucgaggccgagcugaagugcuucggcaacaccgccguggccaagugcaacgagaagcacgacgaggaguucugcgacaugcugagacuguucgacuucaacaagcaggccauccagagacugaaggcccccgcccagaugagcauccagcugaucaacaaggccgugaacgcccugaucaacgaccagcugaucaugaagaaccaccugagagacaucaugggcauccccuacugcaacuacagcaaguacugcuaccugaaccacaccaccaccggcaagaccagccugcccaagugcugccuggugagcaacggcagcuaccugaacgagacccacuucagcgacgacaucgagcagcaggccgacaacaugaucaccgagaugcugcagaaggaguacauggagagacagggcaagaccccccugggccugguggaccuguucguguucagcaccagcuucuaccugaucagcaucuuccugcaccuggugaagauccccacccacagacacaucgugggcaagagcugccccaagccccacagacugaaccacaugggcaucugcagcugcggccuguacaagcagcccggcgugcccgugagauggaagagaugaggacuagucccuguucccagagcccacuuuuuuuucuuuuuuugaaauaaaauagccugucuuucagaucucaaaggcucuuuucagagccaccaaaaaaaaaaaaaaaaaaaaaaaaaaaaaaaaaaaaaaaaaaaaaaaaaaaaaaaaaaaaaaaaaaaaaaaaaaaaaaaaaaaaaaaaaaaaaaaaaaaaa

SEQ ID NO: 31811 - RNA, 1748 nt, Artificial Sequence
  mRNA product Design a-1 (hSL-A100) comprising derived and/or modified sequence from LASV(Mad39;Clade IV)__ANH09722__GPCmut7 (opt4)
aggagagucccgcagucggcguccagcggcucugcuuguucgugugugugucguugcaggccuuauucaagcuuaccaugggccagaucgugaccuucuuccaggaggugccccacgugaucgaggaggugaugaacaucgugcugaucgcccugagcauccuggccgugcugaagggccuguacaacguggccaccugcggccugaucggccuggugaccuuccugcugcugugcggcagaagcugcaccaccacccuguacaagggcguguacgagcugcaggcccuggagcugaacauggagacccugaacaugaccaugccccugagcugcaccaagaacaacagccaccacuacaucagagugggcaacgagaccggccuggagcugacccugaccaacaccagccugaucaaccacaaguucugcaaccugagcgacgcccacaagaagaaccuguacgaccacgcccugaugagcaucaucagcaccuuccaccugagcauccccaacuucaaccaguacgaggccaugagcugcgacuucaacgacggcaagaucagcgugcaguacaaccugagccacaccuacgccggcgacaccgccaaccacugcggcaccguggccaacggcgugcugcagaccuucaugagaauggccuggggcggcagcuacaucgcccuggacagcggcagaggcggcugggacugcaucaugaccagcuaccaguaccugaucauccagaacaccaccugggaggaccacugccaguucagcagacccagccccaucggcuaccugggccugcugagccagagaaccagagacaucuacaucagcagaagacugcugggcaccuucaccuggacccugagcgacagcgagggcaaggacacccccggcggcuacugccugaccagauggaugcugaucgaggccgagcugaagugcuucggcaacaccgccguggccaagugcaacgagaagcacgacgaggaguucugcgacaugcugagacuguucgacuucaacaagcaggccauccagagacugaaggcccccgcccagaugagcauccagcugaucaacaaggccgugaacgcccugaucaacgaccagcugaucaugaagaaccaccugagagacaucaugggcauccccuacugcaacuacagcaaguacugcuaccugaaccacaccgugaccggcaagaccagccugcccaagugcugccuggugagcaacggcagcuaccugaacgagacccacuucagcgacgacaucgagcagcaggccgacaacaugaucaccgagaugcugcagaaggaguacauggagagacagggcaagaccccccugggccugguggaccuguucguguucagcaccagcuucuaccugaucagcaucuuccugcaccuggugaagauccccacccacagacacguggugggcaagcccugccccaagccccacagacugaaccacaugggcaucugcagcugcggcuucuacaagcagcccggcgugcccgugagauggaagagaugaggacuagucccuguucccagagcccacuuuuuuuucuuuuuuugaaauaaaauagccugucuuucagaucucaaaggcucuuuucagagccaccaaaaaaaaaaaaaaaaaaaaaaaaaaaaaaaaaaaaaaaaaaaaaaaaaaaaaaaaaaaaaaaaaaaaaaaaaaaaaaaaaaaaaaaaaaaaaaaaaaaaa

SEQ ID NO: 31812 - RNA, 1748 nt, Artificial Sequence
  mRNA product Design a-1 (hSL-A100) comprising derived and/or modified sequence from LASV(Z0947-SLE-2011;Clade IV)__AIT17840__GPCmut7 (opt4)
aggagagucccgcagucggcguccagcggcucugcuuguucgugugugugucguugcaggccuuauucaagcuuaccaugggccagaucgugaccuucuuccaggaggugccccacgugaucgaggaggugaugaacaucgugcugaucgcccugagcauccuggccgugcugaagggccuguacaacuucgccaccugcggccuggugggccuggugaccuuccugcugcugugcggcagaagcugcaccaucagccuguacaagggcguguacgagcugcagacccuggagcugaacauggagacccugaacaugaccaugccccugagcugcaccaagaacaacagccaccacuacaucauggugggcaacgagaccggccuggagcugacccugaccaacaccagcaucaucaaccacaaguucugcaaccugagcgacgcccacaagaagaaccuguacgaccacgcccugaugagcaucaucagcaccuuccaccugagcauccccaacuucaaccaguacgaggccaugagcugcgacuucaacggcggcaagaucagcgugcaguacaaccugagccacagcuacgccggcgacgccgccaaccacugcggcaccguggccaacggcgugcugcagaccuucaugagaauggccuggggcggcagcuacaucgcccuggacagcggcagagacagaugggacugcaucaugaccagcuaccaguaccugaucauccagaacaccaccugggaggaccacugccaguucagcagacccagccccaucggcuaccugggccugcugagccagagaaccagagacaucuacaucagcagaagacugcugggcaccuucaccuggacccugagcgacagcgagggcaaggacacccccggcggcuacugccugaccagauggaugcugaucgaggccgagcugaagugcuucggcaacaccgccguggccaagugcaacgagaagcacgacgaggaguucugcgacaugcugagacuguucgacuucaacaagcaggccauccagagacugaaggcccccgcccagaugagcauccagcugaucaacaaggccgugaacgcccugaucaacgaccagcugaucaugaagaaccaccugagagacaucaugggcauccccuacugcaacuacagcaaguacugcuaccugaaccacaccaccaccggcaagaccagccugcccaagugcugccuggugagcaacggcagcuaccugaacgagacccacuucagcgacgacaucgagcagcaggccgacaacaugaucaccgagaugcugcagaaggaguacauggagagacagggcaagaccccccugggccugguggaccuguucguguucagcaccagcuucuaccugaucagcaucuuccugcaccuggugaagauccccacccacagacacaucgugggcaagcccugccccaagccccacagacugaaccacaugggcaucugcagcugcggccuguacaagcagcccggcgugcccgugaaguggaagagaugaggacuagucccuguucccagagcccacuuuuuuuucuuuuuuugaaauaaaauagccugucuuucagaucucaaaggcucuuuucagagccaccaaaaaaaaaaaaaaaaaaaaaaaaaaaaaaaaaaaaaaaaaaaaaaaaaaaaaaaaaaaaaaaaaaaaaaaaaaaaaaaaaaaaaaaaaaaaaaaaaaaaa

SEQ ID NO: 31813 - RNA, 1748 nt, Artificial Sequence
  mRNA product Design a-1 (hSL-A100) comprising derived and/or modified sequence from LASV(Josiah;Clade IV)__NP_694870__GPCmut7 (opt5)
aggagagucccgcagucggcguccagcggcucugcuuguucgugugugugucguugcaggccuuauucaagcuuaccaugggccagaucgugaccuucuuucaagaggucccccacguuauugaagaggugaugaacaucgugcugauugcccucagcguccuggcugugcuuaaggggcuguacaauuucgccacaugcggacucguuggccuggugacguuucuucugcucugugggagauccugcaccacaucucuguauaaaggagucuacgaacugcagacccucgagcugaacauggaaacacuuaauaugaccaugccucugagcuguacaaagaacaauucccaucacuauaucauggugggcaacgagaccgggcucgagcugacgcuuaccaauacaucuauuaucaaccauaaauucugcaaucugagcgacgcgcacaagaaaaaccucuacgaucaugcucugauguccaucauuucuaccuuucaccugagcaucccgaauuucaaccaguaugaagccauguccugugacuuuaauggaggcaagauuagcguucaguacaaccucucucacuccuaugccggcgaugcugccaaucauugcgggacaguggcuaacggaguccugcaaaccuucaugcggauggccuggggcgggagcuacaucgcgcuugacucuggacgcggcaacugggauuguauuaugacguccuaccaguaucugaucauucagaauacaaccugggaggaccacugccaguuuagcagacccucuccuaucggguaccucggacugcuuucccaacggacacgcgauaucuauauuagcagacggcugcucggcaccuucaccuggacacuguccgacucugaaggcaaggauacgcccgggggauacugucugacccgcuggaugcucaucgaggccgagcugaaaugcuuuggcaacacagcuguggccaaguguaaugaaaaacaugacgaggaguucugcgauaugcuuagacuguuugacuucaacaagcaggcuauucagcggcucaaagccccugcgcagaugagcauccaacugauuaauaaggccgugaacgcucuuaucaaugaucagcugaucaugaagaaccaccuccgcgacauuauggggauccccuauugcaauuacuccaaauauuguuaccugaaccacaccacaaccggaagaacgagccugccuaagugcugucucgucucuaauggcuccuaccugaacgaaacacauuucagcgacgauauugaacagcaagccgacaauaugaucaccgagaugcuucagaaagaguauauggaacggcaggggaagaccccgcugggacucguugaucuguuuguguucucuaccagcuuuuaccugauuuccaucuuccuucaccucgugaaaauccccacacaucgccacauugucggcaagucuugcccuaaaccccauagacugaaccacaugggcaucuguagcugcgggcuguauaagcagccuggagugcccguuaaguggaaacggugaggacuagucccuguucccagagcccacuuuuuuuucuuuuuuugaaauaaaauagccugucuuucagaucucaaaggcucuuuucagagccaccaaaaaaaaaaaaaaaaaaaaaaaaaaaaaaaaaaaaaaaaaaaaaaaaaaaaaaaaaaaaaaaaaaaaaaaaaaaaaaaaaaaaaaaaaaaaaaaaaaaaa

SEQ ID NO: 31814 - RNA, 1745 nt, Artificial Sequence
  mRNA product Design a-1 (hSL-A100) comprising derived and/or modified sequence from LASV(LP;Clade I)__AAF86701__GPCmut7 (opt5)
aggagagucccgcagucggcguccagcggcucugcuuguucgugugugugucguugcaggccuuauucaagcuuaccaugggccagaucauuaccuucuuucaagaggugccccacgucaucgaagagguuaugaacauugugcugaucgcccucagccugcuugcuauucugaaggggcucuacaauaucgccacaugcggaaucauuggccugguggcguuccuuuuucugugugggaaauccugcucucucacgcugaagggaggcuaugaacugcagacccucgagcugaacauggaaacacuuaauaugaccaugccucugagcuguaccaaaaacuccucucaucacuacaucagagucgggaaugagacaggacucgagcugacacuuaccaacacgagcauuaucaaucauaaguucugcaaccuguccgacgcucacaaaaagaaucucuaugaucaugcccugaugucuauuaucagcaccuuucaccuguccauuccgaacuucaaucaguacgaagccaugagcugugacuuuaacggcggcaagaucucugugcaguauaaucucucccacagcuacgcuggggaugccgcugagcauugcggaacaguugccaacggcgugcugcaaaccuucaugcggauggcguggggagggcgcuauaucgcccuugacucuggcaaagggaauugggauuguauuaugacauccuaccaguaccugaucauucagaacaccacgugggaagaccacugccaguuuagcagacccucuccuaucggauaucucggccugcuuucccaacggacacgcgauauuuacaucagcagacggcugcucggcaccuucacauggacccuguccgacucugaggggaacgagacccccggaggcuauugucugacacgcuggaugcucaucgaagcugagcugaagugcuuugggaauacggccgucgcuaaauguaacgaaaagcaugaugaggaguucugcgacaugcuuagacuguuugauuucaauaaacaggccauucggcgccucaaggcgccugcccagaugagcauccagcugauuaacaaggcugugaaugcccuuaucaacgaccaacugauuaugaaaaaucaccucagagauaucaugggaauccccuacugcaacuauuccaaguacuguuaucugaaucacaccagcucuggccggacaucccugccuaaaugcugucucauuagcaacgggucuuaccugaaugaaacccaguucagcgacgacaucgagcagcaagcugauaacaugauuacagaaaugcuucagaaggaguacaucgaacgccagggaaaaaccccgcugggccucguugacauuuuuaucuucuccacgucuuuuuaucugauuagcaucuuccugcaucuuaucaagauucccacacacagacauaucgugggcaaaccuugccccaagccucaccggcucaaucauaugggggucuguuccugcggacuguacaagcaccccggcgugccgaccaaauggaagcgcugaggacuagucccuguucccagagcccacuuuuuuuucuuuuuuugaaauaaaauagccugucuuucagaucucaaaggcucuuuucagagccaccaaaaaaaaaaaaaaaaaaaaaaaaaaaaaaaaaaaaaaaaaaaaaaaaaaaaaaaaaaaaaaaaaaaaaaaaaaaaaaaaaaaaaaaaaaaaaaaaaaaaa

SEQ ID NO: 31815 - RNA, 1745 nt, Artificial Sequence
  mRNA product Design a-1 (hSL-A100) comprising derived and/or modified sequence from LASV(803213;Clade II)__AAF86703__GPCmut7 (opt5)
aggagagucccgcagucggcguccagcggcucugcuuguucgugugugugucguugcaggccuuauucaagcuuaccaugggccagaucauuaccuucuuucaagaggugccccacgucaucgaagagguuaugaacauugugcugaucgcccucagccugcuugcuauucugaaggggaucuacaauguggccacaugcggacucuucggccugaucuccuuucuucugcucugugggagaucuugcagcgucacguauaaaggaguguacgaacugcagacccuggagcucaacauggcgaaucugaacaugacaaugccucuuuccuguaccaagaauaacucucaucacuauauuaugguuggcaaugaaacagggcuggagcucacccugacaaacaccagcaucauuaaucauaaauucugcaaccuuuccgacgcucacaagaaaaaucuguacgaucaugcccucaugucuaucauuagcacguuucaccuguccaucccgaacuucaaucaguaugaggccaugagcugugacuuuaacggaggcaagauuucugugcaguacaaucugucccacagcuucgcugucgaugccgcuaaccauugcggcaccaucgccaacggggugcuccaaacauuuaugcggauggcguggggaggcucuuauaucgcccuggacuccgggaagggaaauugggauuguauuaugaccagcuaccaguaccuuaucauucagaacacaaccugggaagaccacugccaguucucucgccccuccccuaucggcuaucuggggcuccugagccaaagaacgcgggauauuuacaucucccgcagacuucugggaacauuuaccuggacacucucugacagcgagggcaaugaagcucccggcggguauugucugacccgguggaugcugaucgaggccgagcucaaaugcuucggaaacaccgcuguugccaaguguaaugaaaaacaugaugaggaauuuugcgacaugcugcgccuuuucgauuucaacaagcaggcgauuaaaagacugaagacgccugcccagauguccauccagcucauuaauaaggcugugaacgcccugaucaaugaccaacuuauuaugaaaaaccaucugcgggauaucaugggcauccccuacugcaauuauagccgcuacuguuaucucaaccacacagucaccgggaagacaucucugccuagaugcugucugguguccaauggaagcuaccucaacgagacccacuuuucugacgacauugaacagcaggcugauaauaugaucacagagaugcugcaaaaagaguacauggaccggcagggcaagaccccgcuugggcugguggaucucuucgucuuuagcacguccuucuaucugauuucuaucuuucugcaccuuguuaaaauucccacacaucgccacaucgugggaaagccuugccccaaaccucauagacucaaccacaugggcauuuguagcugcggccuguacaagcaccccggggugccggucaaguggaaacggugaggacuagucccuguucccagagcccacuuuuuuuucuuuuuuugaaauaaaauagccugucuuucagaucucaaaggcucuuuucagagccaccaaaaaaaaaaaaaaaaaaaaaaaaaaaaaaaaaaaaaaaaaaaaaaaaaaaaaaaaaaaaaaaaaaaaaaaaaaaaaaaaaaaaaaaaaaaaaaaaaaaaa

SEQ ID NO: 31816 - RNA, 1745 nt, Artificial Sequence
  mRNA product Design a-1 (hSL-A100) comprising derived and/or modified sequence from LASV(GA391;Clade III)__CAA36645__GPCmut7 (opt5)
aggagagucccgcagucggcguccagcggcucugcuuguucgugugugugucguugcaggccuuauucaagcuuaccaugggccagaucgugaccuucuuucaagaggucccccacguuauugaagaggugaugaacaucgugcugauugcccucagcauccuggcuauucuuaaggggcuguacaaugucgccacaugcggacucaucggccuggugacguuccuucugcucuccgggagaucuuguagccugaucuauaaaggaaccuacgaacugcagacacucgagcugaacauggaaacccuuaauaugacaaugccucuguccugcaccaagaacaauucucaucacuauauucggguuggcaacgagacagggcucgagcugacccuuacgaauaccagcauccugaaccauaaauuuuguaaucucuccgacgcgcacaagcgcaaccuguacgaucauucucugaugagcauuaucuccacauuccaccucagcauuccgaauuuuaaccaguaugaagcuaugucuugcgacuucaauggaggcaaaaucaccgugcaguacaaccugucccacagcuuugccgucgaugccgcuggccauugugggacacuugccaauggagugcugcaaaccuucaugagaauggcuuggggcgggucuuauauugcccucgacuccggacggggcaacugggauugcaucaugacgagcuaccaguaccugaucauucagaacacaaccugggacgaucacugucaguuuucucgccccuccccuaucggguaucuuggacugcucagccaaagaacacgggacauuuacaucucccgcagacugcugggcaccuucaccuggacacucucugauagcgagggcaaugaaacgcccgggggauauugccugacccgguggaugcuuauugaggcggagcugaaguguuuuggcaacacagccguugcuaagugcaaugaaaaacaugacgaggaguucugugauaugcuccgccuguuugacuucaacaagcaggccaucagacggcuuaaaaccccugcucagauguccauccagcugauuaauaaggccgugaacgcgcucaucaaugaucaacugauuaugaaaaaccaucugcgcgacaucauggggauucccuacugcaauuauagcagauacugcuaucucaaccacacaucuaccggaaagacgucccugccucgguguugccuuaucagcaauggcucuuaccugaacgaaacaaaguucagcgacgauaucgaacagcaggccgacaauaugauuaccgagaugcuccaaaaagaguacaucgaucgccaggggaagaccccgcugggacuggucgaccuuuuuguguucuccacaucuuuuuaucucauuagcaucuuccugcaccuggugaaaauucccacccacagacauaucgucggcaagccuugucccaaaccucaccggcucaaccauaugggcauuugcuccugugggcuguacaagcagcccggaguuccggugagauggaaacgcugaggacuagucccuguucccagagcccacuuuuuuuucuuuuuuugaaauaaaauagccugucuuucagaucucaaaggcucuuuucagagccaccaaaaaaaaaaaaaaaaaaaaaaaaaaaaaaaaaaaaaaaaaaaaaaaaaaaaaaaaaaaaaaaaaaaaaaaaaaaaaaaaaaaaaaaaaaaaaaaaaaaaa

SEQ ID NO: 31817 - RNA, 1748 nt, Artificial Sequence
  mRNA product Design a-1 (hSL-A100) comprising derived and/or modified sequence from LASV(AV;Clade V)__CCA30314__GPCmut7 (opt5)
aggagagucccgcagucggcguccagcggcucugcuuguucgugugugugucguugcaggccuuauucaagcuuaccaugggccagaucgugaccuucuuucaagaggucccccacguuauugaagaggugaugaacaucgugcugauugcccucagcauccuggcuguccuuaaggggcuguacaauauugccacaugcggacucaucggccugaucacguuccuucugcucugugggagauccugcucuagcaaccuguauaaaggaguguacgaacugcagucccucgaccugaauauggagacccuuaacaugacaaugccucugucuuguaccaagaauaacagccaucacuauauucggguuggcaaugauacagggcucgaacugacccuuacaaacaccuccauccugaaucauaaauuuugcaaccucucugacgcgcacaagaaagaucuguacgaccaugcucugaugagcauuaucuccacguuccaccucagcauuccgaauuuuaaccaguaugaggccaugucuugugauuucaauggaggcaagaucuccgugcaguacaaccugagccacucuuaugccauugacgcugccaaucauugcggcaccgucgcuaacgggauccuucaaacauuuaugcgcauggccuggggaggcuccuacaucgcgcuggauagcgggagaggaaacugggacuguauuaugaccucuuaccaguaucucaucauucagaauacaaccugggagaaccacugccaguucucccggcccagcccuaucggcuaccuggggcuucugucccaacgcacgagagauauuuauaucucucggcgccuccugggaacauuuaccuggacacugagcgacuccgaaggcaaugccacccccggcggguacugucucaccagauggaugcugaucgaggcugaacuuaagugcuucggaaacacagccguggcuaaauguaaugagaagcaugaugaggaauuuugcgacaugcugcgccucuucgauuuuaacaaacaggccauuagccggcugaagucuccugcgcagauguccauccagcuuauuaauaaagccguuaacgcucugaucaaugaccaacucauuaugaagaaccaccugagagacaucaugggcauccccuauugcaauuacagcaaguauuguuaccugaaccacacgauuaccgggaaaacaucucucccuaagugcugucuggugagcaauggauccuaccuuaacgagacccauuucucugaugacaucgaacagcaggccgauaauaugauuacagagaugcugcaaaaagaauauauggagcggcagggcaagaccccgcucgggcuggucgaccuguucguguuuagcacguccuucuaccuuaucagcauuuuucuccgccuggugaaaauccccacacacagacauauugucggaaagccuugccccaaaccucaccggcugaaccauaugggcaucuguucuugcggccucuauaagcagcccgggguuccggugcgcuggaagagaugaggacuagucccuguucccagagcccacuuuuuuuucuuuuuuugaaauaaaauagccugucuuucagaucucaaaggcucuuuucagagccaccaaaaaaaaaaaaaaaaaaaaaaaaaaaaaaaaaaaaaaaaaaaaaaaaaaaaaaaaaaaaaaaaaaaaaaaaaaaaaaaaaaaaaaaaaaaaaaaaaaaaa

SEQ ID NO: 31818 - RNA, 1745 nt, Artificial Sequence
  mRNA product Design a-1 (hSL-A100) comprising derived and/or modified sequence from LASV(Togo/2016/7082;Clade VI)__AMR44577__GPCmut7 (opt5)
aggagagucccgcagucggcguccagcggcucugcuuguucgugugugugucguugcaggccuuauucaagcuuaccaugggccagaucauuaccuucuuucaagaggugccccacgucaucgaagagguuaugaacauugugcugaucgcccucagccugcuugcuauucugaaggggguguacaaugucgccacaugcggaaucaucggccucgugacguuccuguuucuuugugggagauccugcucucugauuuauaaaggaagcuacgaacuccagacccuggagcugaacauggaaacacucaauaugaccaugccucuguccuguacaaagaacucuagccaucacuauauccggguuggcaaugagaccgggcuugagcugacacucaccaacacguccauuaucaaucauaaauucugcaaccugucugacgcgcacaagcgcaaucuuuacgaucaugcucugaugagcauucucuccaccuuucaccugagcaucccgaacuucaaucaguaugaagccaugucuugugacuuuaacggaggcaaaauuuccgugcaguacaaucugagccacgccuaugcugucgaugccgcugagcauugcggcacaguggccaacgggguucuccaaaccuucaugagaauggcguggggaggcucuuacaucgcccuggacuccgggcggggaaauugggauuguaucaugacaagcuaccaguaucuuauuauccagaacaccacgugggaagaccacugccaguuuucucgccccuccccuauuggcuaccuggggcuccugagccaaagaacacgggauaucuauauuucccgcagacuucugggaaccuucacauggacccucucugacagcgagggcaacgagacccccggcggguacugucugacacgguggaugcugaucgaagcugagcucaagugcuuuggaaauacggccguggcuaaguguaacgaaaaacaugaugaggaguucugcgacaugcugcgccuuuuugauuucaauaagcaggccauccagagacugaaauccccugcgcagaugagcauucaacucaucaacaaggccgucaaugcucugauuaacgaccagcuuaucaugaaaaaucaucugcgggauaugaugggcauucccuauugcaacuacucuaaguauuguuaccucaaucacaccuccagcgggcgcacaucucugccuaagugcugucuggugagcaacggauccuaccucaaugaaacccacuucucugacgacaucgagcagcaagccgauaacaugaucacagaaaugcugcagaaagaguauauugacagacagggcaagaccccgcuugggcugguggaucucuuugucuucagcacguccuuuuaccugaucagcauuuuccugcaccuuaucaaaauucccacacaucggcacaucguuggaaagccuugccccaaaccucaucgccucaaucacaugggcauuuguucuugcggccuguauaagcagcccggggugccgaccagauggaaacggugaggacuagucccuguucccagagcccacuuuuuuuucuuuuuuugaaauaaaauagccugucuuucagaucucaaaggcucuuuucagagccaccaaaaaaaaaaaaaaaaaaaaaaaaaaaaaaaaaaaaaaaaaaaaaaaaaaaaaaaaaaaaaaaaaaaaaaaaaaaaaaaaaaaaaaaaaaaaaaaaaaaaa

SEQ ID NO: 31819 - RNA, 1745 nt, Artificial Sequence
  mRNA product Design a-1 (hSL-A100) comprising derived and/or modified sequence from LASV(KAK-428;Clade n.d. (VII))__ANH09740__GPCmut7 (opt5)
aggagagucccgcagucggcguccagcggcucugcuuguucgugugugugucguugcaggccuuauucaagcuuaccaugggccagaucgugaccuucuuucaagaggucccccacguuauugaagaggugaugaacaucgugcugauugcccucagccugcuugcuauccugaaggggcucuacaauuucgccacaugcggagucauuggccugaucacguuucuucugcucugugggagauccugcucugcgaccuauaaaggacaguacgaacugcagacacuggagcucaacauggaaagccugaauaugaccaugccucuuuccuguacaaagaacaauucucaucacuauauccgggcuggcaacaauaccgggcuggagcucacacugaccaacacgagcauuaucucccauaaauucugcaaucuuucugacgcccacaagaaaaaccuguacgaucauacccucaugagcauuaucacaaccuuucaccuguccauuccgaauuucaaccaguaugaggccaugagcugugacuuuaauggaggcaagaucucuauucaauacaaccugucccacagcuaugcuggcgaugccgcucagcauugcgggacaguggccaauggaguucuccagaccuucaugcgcauggcguggggcgggucuuaccuggcccuugacuccggaagacggggcugggauuguaucaucagcucuuaccaguaucugauuauccaaaacacgacaugggacgaucacugccaguuuucccgccccagcccuauuggguaccucggauucgugucccagaagaccagagacaucuauauuucucggcgccugcuuggcacauuuaccuggacccugagcgauuccgaaggccaugacaugcccgggggauacugucucacaagauggaugcugaucgaggcugaucugaaaugcuucggcaacacggccgucgcuaaguguaaugaaaaacacgacgaggaguuuugcgauauguggcgccucuucgacuucaacaagcaggccauccaacggcugaaagcgccugcccagaugaauauucagcuuaucaacaaggcugugaaugcccugauuaacgaccaacucaugaugaagaaucaccugagagauaucauggggauucccuauugcaacuacagcaaauuuuguuaucuuaauaacaccacaaccggacggacaucucugccucgcugcugucucaucuccaauggcagcuaccugaacgaaacccauuucucugacgauaucgagcagcaggcugacaauaugauuacggaaaugcugcagaaggaguacauggauagacaagggaaaacaccgcucggacugguugaccuuuuuguguucagcaccuccuuuuaucugaucaccauuuuccuccaccuggucaagauccccacacaucggcacauugugggcaaaccuugccccaagccucaucgccugaaccacaugggcaucuguucuugcgggcuuuacaaacagcccggagugccggucagauggaagcggugaggacuagucccuguucccagagcccacuuuuuuuucuuuuuuugaaauaaaauagccugucuuucagaucucaaaggcucuuuucagagccaccaaaaaaaaaaaaaaaaaaaaaaaaaaaaaaaaaaaaaaaaaaaaaaaaaaaaaaaaaaaaaaaaaaaaaaaaaaaaaaaaaaaaaaaaaaaaaaaaaaaaa

SEQ ID NO: 31820 - RNA, 1745 nt, Artificial Sequence; identical to SEQ ID NO: 31814
  mRNA product Design a-1 (hSL-A100) comprising derived and/or modified sequence from LASV(Pinneo-NIG-1969;Clade I)__AIT17836__GPCmut7 (opt5)

SEQ ID NO: 31821 - RNA, 1745 nt, Artificial Sequence
  mRNA product Design a-1 (hSL-A100) comprising derived and/or modified sequence from LASV(ISTH0009-NIG-2011;Clade II)__AIT17404__GPCmut7 (opt5)
aggagagucccgcagucggcguccagcggcucugcuuguucgugugugugucguugcaggccuuauucaagcuuaccaugggccagaucauuaccuucuuucaagaggugccccacgucaucgaagagguuaugaacauugugcugaucgcccucagccugcuugcuauucugaaggggaucuacaauguggccacaugcggacucuucggccuggucuccuuucuucugcucugugggagaucuugcagcacgaccuauaaaggaguguacgaacugcagacacuggagcucgacauggcgucccugaacaugaccaugccucuuucuuguacaaagaauaacagccaucacuauaucaugguuggcaaugaaaccgggcuggagcucacacugaccaacacguccauuaucaaucauaaauucugcaaccuuucugaugcucacaagaaaaaucuguacgaccaugcccucaugagcauuaucuccaccuuucaccugagcauuccgaacuucaaucaguaugaggccaugucuugugauuuuaacggaggcaagaucuccgugcaguacaaucugagccacgcuuaugccgucgacgcugccaaccauugcggcacaauugcgaauggggugcuccaaaccuucaugcggauggccuggggaggcucuuacaucgcucuggauuccgggaagggaagcugggacuguaucaugacaucuuaccaguaucuuauuauccagaacaccacgugggaagaucacugccaguuuucccgccccagcccuauuggcuaccuggggcuccugucccaaagaacacgggacaucuauauuucucgcagacuucugggaaccuucacauggacccucagcgauuccgagggcaacgaaacccccggcggguacugucugacacgguggaugcugaucgaggccgagcucaaaugcuuuggaaauacggcuguugccaaguguaacgaaaaacaugacgaggaguucugcgauaugcugcgccuuuuugacuucaauaagcaggcgaucagacggcugaaaaccccugcccagaugagcauucagcucaucaacaaggcugugaaugcccugauuaacgaucaacuuaucaugaagaaucaucugcgcgacauuaugggcauccccuauugcaacuacucuaaauauuguuaccucaaucacacagucaccgggaagacaucccugccuagaugcugucuggugagcaacggaucuuaccucaaugaaacccacuucagcgacgauaucgaacagcaggcugacaacaugauuacggagcugcuucaaaaagaguauauggaucggcagggcaagacaccgcuggggcucguggaccuguuugucuucuccaccucuuuuuaccugaucagcauuuuccuucaccucaucaaaauucccacccaucgccacaucacaggaaagccuugccccaaaccucauagacugaaucacaugggcauuuguuccugcggccuguauaagcaccccgggguuccggugaaguggaaacggugaggacuagucccuguucccagagcccacuuuuuuuucuuuuuuugaaauaaaauagccugucuuucagaucucaaaggcucuuuucagagccaccaaaaaaaaaaaaaaaaaaaaaaaaaaaaaaaaaaaaaaaaaaaaaaaaaaaaaaaaaaaaaaaaaaaaaaaaaaaaaaaaaaaaaaaaaaaaaaaaaaaaa

SEQ ID NO: 31822 - RNA, 1745 nt, Artificial Sequence
  mRNA product Design a-1 (hSL-A100) comprising derived and/or modified sequence from LASV(ISTH2010-NIG-2012;Clade II)__AIT17482__GPCmut7 (opt5)
aggagagucccgcagucggcguccagcggcucugcuuguucgugugugugucguugcaggccuuauucaagcuuaccaugggccagaucauuaccuucuuucaagaggugccccacgucaucgaagagguuaugaacauugugcugaucgcccucagccugcuugcuauucugaaggggaucuacaauguggccacaugcggacucuucggccuggucuccuuucuucugcucugugggagaucuugcagcacgaccuauaaaggaguguacgaacugcagacacuggagcucgacauggcgucccugaacaugaccaugccucuuucuuguacaaagaauaacagccaucacuauaucaugguuggcaaugaaaccgggcuggagcucacacugaccaacacguccauuaucaaucauaaauucugcaaccuuucugaugcucacaagaaaaaucuguacgaccaugcccucaugagcauuaucuccaccuuucaccugagcauuccgaacuucaaucaguaugaggccaugucuugugauuuuaacggaggcaagaucuccgugcaguacaaucugagccacgcuuaugccgucgacgcugccaaccauugcggcacaauugcgaauggggugcuccaaaccuucaugcggauggccuggggaggcucuuacaucgcucuggauuccgggaagggaagcugggacuguaucaugacaucuuaccaguaucuuauuauccagaacauuaccugggaagaucacugccaguuuucccgccccagcccuaucggcuaccuggggcuccugucccaaagaacgcgggacauuuauaucucucgcagacuucugggaacauucaccuggacacucagcgauuccgagggcaacgaaacccccggcggguacugucugacccgguggaugcugaucgaggccgagcucaaaugcuuuggaaauacagcuguugccaaguguaacgaaaaacaugacgaggaguucugcgauaugcugcgccuuuuugacuucaauaagcaggcgauuagacggcugaaaacgccugcccagaugagcauccagcucauuaacaaggcugugaaugcccugaucaacgaucaacuuauuaugaagaaucaucugcgcgacaucaugggcauccccuauugcaacuacucuaaauauuguuaccucaaucacaccgucacagggaagaccucccugccuagaugcugucuggugagcaacggaucuuaccucaaugaaacacacuucagcgacgauauugaacagcaggcugacaacaugaucaccgagcugcuucaaaaagaguauauugaucggcagggcaagacgccgcuggggcucguggaccuguuugucuucuccacaucuuuuuaccugaucagcauuuuccuucaccucguuaaaauccccacccaucgccacguggugggaaagccuugccccaaaccucauagacugaaucacaugggcauuuguuccugcggccuguauaagcaccccggggucccggugaaguggaaacggugaggacuagucccuguucccagagcccacuuuuuuuucuuuuuuugaaauaaaauagccugucuuucagaucucaaaggcucuuuucagagccaccaaaaaaaaaaaaaaaaaaaaaaaaaaaaaaaaaaaaaaaaaaaaaaaaaaaaaaaaaaaaaaaaaaaaaaaaaaaaaaaaaaaaaaaaaaaaaaaaaaaaa

SEQ ID NO: 31823 - RNA, 1745 nt, Artificial Sequence
  mRNA product Design a-1 (hSL-A100) comprising derived and/or modified sequence from LASV(Lassa virus/H.sapiens-wt/NGA/2015/ISTH_0543;Clade II)__AVO03639__GPCmut7 (opt5)
aggagagucccgcagucggcguccagcggcucugcuuguucgugugugugucguugcaggccuuauucaagcuuaccaugggccagaucauuaccuucuuucaagaggugccccacgucaucgaagagguuaugaacauugugcugaucgcccucagccugcuugcuauucugaaggggaucuacaauguggccacaugcggacucuucggccuggucuccuuucuucugcucugugggagaucuugcagcacgaccuauaaaggaguguacgaacugcagacacuggagcucgacauggcgaaccugaauaugaccaugccucuuuccuguacaaagaacaauucucaucacuauaucaugguuggcaacgaaaccgggcuggagcucacacugaccaauacgagcauuaucaaccauaaauucugcaaucuuuccgaugcucacaagaaaaaccuguacgaccaugcccucaugucuauuaucagcaccuuucaccuguccauuccgaauuucaaccaguaugaggccaugagcugugauuuuaauggaggcaagaucucugugcaguacaaccugucccacacauaugcugucgacgccgcuaaucauugcggcaccauugccaacggggugcuccaaacauucaugcggauggcguggggaggcagcuacaucgcccuggauucugggaagggauccugggacuguaucaugaccagcuaccaguaucuuguuauucagaacacgacaugggaagaucacugccaguuuucucgccccuccccuaucggcuaccuggggcuccugagccaaagaacccgggacauuuauaucucccgcagacuucugggaacauucaccuggacccucucugauagcgagggcaaugaaacacccggcggguacugucugacgcgguggaugcugauugaggcugagcucaaaugcuuuggaaacaccgccguggcuaaguguaaugaaaaacaugacgaggaguucugcgauaugcugcgccuuuuugacuucaacaagcaggccaucagacggcugaaaaccccugcgcagauguccauccagcucauuaauaaggccgucaacgcucugaucaaugaucaacuuauuaugaagaaccaucugcgcgacaucaugggcauucccuauugcaauuacagcaaauauuguuaccucaaccacacagugacagggaagaccucucugccuagaugcugucugguguccaauggaagcuaccucaacgaaacgcacuucucugacgauaucgaacagcaggccgacaauaugaucacagagcugcuucaaaaagaguauauugaucggcagggcaagaccccgcuggggcucgucgaccuguuuguuuucagcaccuccuuuuaccugaucucuauuuuccuucaccucgugaaaauccccacacaucgccacauuaccggaaagccuugccccaaaccucauagacugaaccacaugggcaucuguagcugcggccuguauaagcaccccggggugccggucaaguggaaacggugaggacuagucccuguucccagagcccacuuuuuuuucuuuuuuugaaauaaaauagccugucuuucagaucucaaaggcucuuuucagagccaccaaaaaaaaaaaaaaaaaaaaaaaaaaaaaaaaaaaaaaaaaaaaaaaaaaaaaaaaaaaaaaaaaaaaaaaaaaaaaaaaaaaaaaaaaaaaaaaaaaaaa

SEQ ID NO: 31824 - RNA, 1745 nt, Artificial Sequence
  mRNA product Design a-1 (hSL-A100) comprising derived and/or modified sequence from LASV(Lassa virus/H.sapiens-wt/NGA/2016/ISTH_0009;Clade II)__AVO03571__GPCmut7 (opt5)
aggagagucccgcagucggcguccagcggcucugcuuguucgugugugugucguugcaggccuuauucaagcuuaccaugggccagaucauuaccuucuuucaagaggugccccacgucaucgaagagguuaugaacauugugcugaucgcccucagccugcuugcuauucugaaggggaucuacaauguggccacaugcggacuccugggccuugucuccuuccugcuccugugugggagaucuugcagcacgaccuauaaaggaguguacgaacugcagacacucgagcuggacauggcgucccuuaacaugaccaugccucugucuuguacaaagaauaacagccaucacuauaucaugguuggcaaugaaaccgggcucgagcugacacuuaccaacacguccauuaucaaucauaaauuuugcaaccugucugaugcucacaagaaaaaucucuacgaccaugcccugaugagcauuaucuccaccuuccaccugagcauuccgaacuuuaaucaguaugaggccaugucuugugauuucaacggaggccggaucuccgugcaguacaaucucagccacucuuaugcugucgacgccgcuaaccauugcggcacaauugccaauggggugcugcaaaccuuuaugcgcauggcguggggaggcuccuacaucgcccuugauagcgggaagggaucuugggacuguaucaugacauccuaccaguaucugauuauccagaacaccacgugggaagaucacugccaguucagcagacccuccccuauuggcuaccucgggcugcuuucucaacggacacgcgacaucuauauuagcagacggcugcucggaaccuuuacauggacccuguccgauagcgagggcaacgaaacccccggcggguacugucugacacgcuggaugcucaucgaggcugagcugaagugcuucggaaauacggccguugcuaaauguaacgaaaagcaugacgaggaauuuugcgauaugcuuagacuguucgacuuuaauaaacaggccauccggcgccucaagaccccugcgcagaugucuauucagcugaucaacaaagccgugaaugcucuuauuaacgaucaacugaucaugaagaaucaccucagagacauuaugggcauccccuauugcaacuacuccaaguauuguuaccugaaucacacagucaccgggaaaacaagccugccucggugcugucucgugucuaacggaagcuaccugaaugagacccauuucuccgacgauaucgaacagcaggccgacaacaugauuacggagcuucugcaaaaggaguauaucgaucgccagggcaaaacaccgcucgggcugguggaccuguucgucuuuucuaccagcuucuaccuuauuuccaucuuucuccaccugguuaagauucccacccauagacacaucacaggaaaaccuugccccaagccucaucggcugaaucacaugggcauuuguagcugcggccucuauaaccaccccggggugccggugaaauggaagcgcugaggacuagucccuguucccagagcccacuuuuuuuucuuuuuuugaaauaaaauagccugucuuucagaucucaaaggcucuuuucagagccaccaaaaaaaaaaaaaaaaaaaaaaaaaaaaaaaaaaaaaaaaaaaaaaaaaaaaaaaaaaaaaaaaaaaaaaaaaaaaaaaaaaaaaaaaaaaaaaaaaaaaa

SEQ ID NO: 31825 - RNA, 1745 nt, Artificial Sequence
  mRNA product Design a-1 (hSL-A100) comprising derived and/or modified sequence from LASV(Lassa virus/H.sapiens-wt/NGA/2016/ISTH_0017;Clade II)__AVO03567__GPCmut7 (opt5)
aggagagucccgcagucggcguccagcggcucugcuuguucgugugugugucguugcaggccuuauucaagcuuaccaugggccagaucauuaccuucuuucaagaggugccccacgucaucgaagagguuaugaacauugugcugaucgcccucagccugcuugcuauucugaaggggaucuacaauguggccacaugcggacucuucggccuggucuccuuucuucugcucugugggagaucuugcagcacgaccuauaaaggaguguacgaacugcagacacuggagcucgacauggcgucccugaacaugaccaugccucuuucuuguacaaagaauaacagccaucacuauaucaugguuggcaaugaaaccgggcuggagcucacacugaccaacacguccauuaucaaucauaaauucugcaaccuuucugaugcucacaagaaaaaucuguacgaccaugcccucaugagcauuaucuccaccuuucaccugagcauuccgaacuucaaucaguaugaggccaugucuugugauuuuaacggaggcaagaucuccgugcaguacaaucugagccacacauaugcuauugacgccgcuaaccauugcggcaccaucgccaaugggguccuccaaacauucaugcggauggcguggggaggcucuuacaucgcccuggauuccgggaagggaagcugggacuguauuaugaccucuuaccaguaucuuaucauucagaacacgacaugggaagaucacugccaguuuucccgccccagcccuaucggcuaccuggggcuccugucccaaagaacccgggacauuuauaucucucgcagacuucugggaacauucaccuggacccucagcgauuccgagggcaacgaaacacccggcggguacugucugacgcgguggaugcugaucgaggcugagcucaaaugcuuuggaaauaccgccguggcuaaguguaacgaaaaacaugacgaggaguucugcgauaugcugcgccuuuuugacuucaauaagcaggccauuagacggcugaaaaccccugcgcagaugagcauccagcucauuaacaaggccguuaaugcucugaucaacgaucaacuuauuaugaagaaucaucugcgcgacaucaugggcauccccuauugcaacuacucuaaauauuguuaccucaaucacacagugacagggaagaccucccugccuagaugcugucuggucagcaacggaucuuaccucaaugaaacgcacuucagcgacgauauugaacagcaggccgacaacaugaucacagagcugcuucaaaaagaguauauggaucggcagggcaagaccccgcuggggcucguggaccuguuuguguucuccaccucuuuuuaccugauuagcaucuuccuucaccucguccgcauucccacacauagacacguuaucggaaaaccuugccccaagccucaucggcugaaucacaugggcauuuguuccugcggccuguauaaacaccccggggugccggugaaguggaagcgcugaggacuagucccuguucccagagcccacuuuuuuuucuuuuuuugaaauaaaauagccugucuuucagaucucaaaggcucuuuucagagccaccaaaaaaaaaaaaaaaaaaaaaaaaaaaaaaaaaaaaaaaaaaaaaaaaaaaaaaaaaaaaaaaaaaaaaaaaaaaaaaaaaaaaaaaaaaaaaaaaaaaaa

SEQ ID NO: 31826 - RNA, 1745 nt, Artificial Sequence
  mRNA product Design a-1 (hSL-A100) comprising derived and/or modified sequence from LASV(Lassa virus/H.sapiens-wt/NGA/2018/ISTH_0959;Clade II)__AVV65099__GPCmut7 (opt5)
aggagagucccgcagucggcguccagcggcucugcuuguucgugugugugucguugcaggccuuauucaagcuuaccaugggccagaucauuaccuucuuucaagaggugccccacgucaucgaagagguuaugaacauugugcugaucgcccucagccugcuugcuauucugaaggggaucuacaauguggucacaugcggacucuucggccugguguccuuucuucugcucugugggagaucuugcagcacgaccuauaaaggaguuuacgaacugcagacacuggagcucgacauggccucccugaacaugaccaugccucuuucuuguacaaagaauaacagccaucacuauaucauggugggcaaugaaaccgggcuggagcucacacugaccaacacguccauuaucaaucauaaauucugcaaccuuucugaugcgcacaagaaaaaucuguacgaccaugcucucaugagcauuaucuccaccuuucaccugagcauuccgaacuucaaucaguaugaggccaugucuugugauuuuaacggaggcaagaucuccguccaguacaaucugagccacgccuaugcuauugacgccgcuaaccauugcggcacaaucgccaauggggugcuccaaaccuucaugcggauggcguggggaggcucuuacaucgcccuggauuccgggaagggaagcugggacuguauuaugacaucuuaccaguaucuuaucauucagaacaccacgugggaagaucacugccaguuuucccgccccagcccuaucggcuaccuggggcuccugucccaaagaacacgggacauuuauaucucucgcagacuucugggaaccuucacauggacccucagcgauuccgagggcaacgaaacccccggcggguacugucugacacgguggaugcugaucgaggcugagcucaaaugcuuuggaaauacggccguugcuaaguguaacgaaaaacaugacgaggaguucugcgauaugcugcgccuuuuugacuucaauaagcaggccauuagacggcugaaaaccccugcgcagaugagcauccagcucauuaacaaggccgugaaugcucugaucaacgaucaacuuauuaugaagaaucaucugcgcgacaucaugggcauccccuauugcaacuacucuaaauauuguuaccucaaucacacagucaccgggaagacaucccugccuagaugcugucuggugagcaacggaucuuaccucaaugaaacccacuucagcgacgauauugaacagcaggccgacaacaugaucacggagcugcuucaaaaagaguauauugaucggcagggcaagacaccgcuggggcucguggaccuguuugucuucuccaccucuuuuuaccugaucagcauuuuccuucaccucguuaaaauccccacccaucgccacgugauuggaaagccuugccccaaaccucauagacugaaucacaugggcaucuguuccugcggccuguauaagcaccccggggugccggucaaguggaaacggugaggacuagucccuguucccagagcccacuuuuuuuucuuuuuuugaaauaaaauagccugucuuucagaucucaaaggcucuuuucagagccaccaaaaaaaaaaaaaaaaaaaaaaaaaaaaaaaaaaaaaaaaaaaaaaaaaaaaaaaaaaaaaaaaaaaaaaaaaaaaaaaaaaaaaaaaaaaaaaaaaaaaa

SEQ ID NO: 31827 - RNA, 1745 nt, Artificial Sequence
  mRNA product Design a-1 (hSL-A100) comprising derived and/or modified sequence from LASV(LASV003-NIG-2008;Clade II)__AIT17580__GPCmut7 (opt5)
aggagagucccgcagucggcguccagcggcucugcuuguucgugugugugucguugcaggccuuauucaagcuuaccaugggccagaucauuaccuucuuucaagaggugccccacgucaucgaagagguuaugaacauugugcugaucgcccucagccugcuugcuauucugaaggggaucuacaauguggccacaugcggacucuucggccuggucuccuuucuucugcucugugggagaucuugcagcacgaccuauaaaggaguguacgaacugcagacacuggagcucgacauggcgucccugaacaugaccaugccucuuucuuguacaaagaauaacagccaucacuauaucaugguuggcaaugaaaccgggcuggagcucacacugaccaacacguccauuaucaaucauaaauucugcaaccuuucugaugcucacaagaaaaaucuguacgaccaugcccucaugagcauuaucuccaccuuucaccugagcauuccgaacuucaaucaguaugaggccaugucuugugauuuuaacggaggcaagaucuccgugcaguacaaucugagccacacauaugcugucgacgccgcuaaccauugcggcaccauugccaauggggugcuccaaacauucaugcggauggcguggggaggcucuuacaucgcccuggauuccgggaagggaagcugggacuguaucaugaccucuuaccaguaucuuauuauccagaacacgacaugggaagaucacugccaguuuucccgccccagcccuauuggcuaccuggggcuccugucccaaagaacccgggacaucuauauuucucgcagacuucugggaacauucaccuggacccucagcgauuccgagagcaacgaaacacccggcggcuacugucugacgcgguggaugcugaucgaggcugagcucaaaugcuuugggaauaccgccguugcuaaguguaacgaaaaacaugacgaggaguucugcgauaugcugcgccuuuuugacuucaauaagcaggccaucagacggcugaaagcgccugcccagaugucuauucagcucaucaacaaggcugugaaugcccugauuaacgaucaacuuaucaugaagaaucaucugcgcgacauuaugggaauccccuauugcaacuacuccaaauauuguuaccucaaucacacagucaccggcagaacaagccugccucggugcugucuggugucuaacgggagcuaccucaaugaaacccacuucuccgacgauaucgaacagcaggcugacaacaugauuacggagcugcuucaaaaggaguauauggaucgccagggaaaaacaccgcugggccucguggaccuguuugucuucucuaccagcuuuuaccugaucuccauuuuccuucaccucguuaagauccccacccauagacacgugauugggaaaccuugccccaagccucaucggcugaaucacaugggaaucuguagcugcggccuguauaaacaccccggcgugccggucaaguggaagcgcugaggacuagucccuguucccagagcccacuuuuuuuucuuuuuuugaaauaaaauagccugucuuucagaucucaaaggcucuuuucagagccaccaaaaaaaaaaaaaaaaaaaaaaaaaaaaaaaaaaaaaaaaaaaaaaaaaaaaaaaaaaaaaaaaaaaaaaaaaaaaaaaaaaaaaaaaaaaaaaaaaaaaa

SEQ ID NO: 31828 - RNA, 1745 nt, Artificial Sequence
  mRNA product Design a-1 (hSL-A100) comprising derived and/or modified sequence from LASV(LASV035-NIG-2009;Clade II)__AIT17588__GPCmut7 (opt5)
aggagagucccgcagucggcguccagcggcucugcuuguucgugugugugucguugcaggccuuauucaagcuuaccaugggccagaucauuaccuucuuucaagaggugccccacgucaucgaagagguuaugaacauugugcugaucgcccucagccugcuugcuauucugaaggggaucuacaauguggccacaugcggacucuucggccuggucuccuuucuucugcucugugggagaucuugcagcacgaccuauaaaggaguguacgaacugcagacacuggagcucgacauggcgucccugaacaugaccaugccucuuucuuguacaaagaauaacagccaucacuauaucaugguuggcaaugaaaccgggcuggagcucacacugaccaacacguccauuaucaaucauaaauucugcaaccuuucugaugcucacaagaaaaaucuguacgaccaugcccucaugagcauuaucuccaccuuucaccugagcauuccgaacuucaaucaguaugaggccaugucuugugauuuuaacggaggcaagaucuccgugcaguacaaucugagccacgcuuaugccgucgacgcugccaaccauugcggcacaauugcgaauggggugcuccaaaccuucaugcggauggccuggggaggcucuuacaucgcucuggauuccgggaagggaagcugggacuguaucaugacaucuuaccaguaucuuauuauccagaacaccacgugggaagaucacugccaguuuucccgccccagcccuauuggcuaccuggggcuccugucccaaagaacacgggacaucuauauuucucgcagacuucugggaaccuucacauggacccucagcgauuccgagggcaacgaaacccccggcggguacugucugacacgguggaugcugaucgaggccgagcucaaaugcuuuggaaauacggcuguugccaaguguaacgaaaaacaugacgaggaguucugcgauaugcugcgccuuuuugacuucaauaagcaggcgaucagacggcugaaagccccugcucagaugagcauucagcucaucaacaaggccgugaaugcucugauuaacgaucaacuuaucaugaagaaucaucugcgcgacauuaugggcauccccuauugcaacuacucuaaauauuguuaccucaaucacaccgucacagggaagaccucccugccuagaugcugucuggugagcaacggaucuuaccucaaugaaacacacuucagcgacgauaucgaacagcaggccgacaacaugauuaccgagcugcuucaaaaagaguauaucgaucggcagggcaagacgccgcuggggcucguggaccuguuugucuucuccacaucuuuuuaccugauuagcaucuuccuucaccucguuaaaauucccacccaucgccacgugaucggaaagccuugccccaaaccucauagacugaaucacaugggcauuuguuccugcggccuguauaagcaccccggggugccggucaaguggaaacggugaggacuagucccuguucccagagcccacuuuuuuuucuuuuuuugaaauaaaauagccugucuuucagaucucaaaggcucuuuucagagccaccaaaaaaaaaaaaaaaaaaaaaaaaaaaaaaaaaaaaaaaaaaaaaaaaaaaaaaaaaaaaaaaaaaaaaaaaaaaaaaaaaaaaaaaaaaaaaaaaaaaaa

SEQ ID NO: 31829 - RNA, 1745 nt, Artificial Sequence
  mRNA product Design a-1 (hSL-A100) comprising derived and/or modified sequence from LASV(LASV1000-NIG-2009;Clade II)__AIT17782__GPCmut7 (opt5)
aggagagucccgcagucggcguccagcggcucugcuuguucgugugugugucguugcaggccuuauucaagcuuaccaugggccagaucauuaccuucuuucaagaggugccccacgucaucgaagagguuaugaacauugugcugaucgcccucagccugcuugcuauucugaaggggaucuacaauguggccacaugcggacucuucggccuggucuccuuucuucugcucugugggagaucuugcagcacgaccuauaaaggaguguacgaacugcagacacuggagcucgacauggcgucccugaacaugaccaugccucuuucuuguacaaagaauaacagccaucacuauaucaugguuggcaaugaaaccgggcuggagcucacacugaccaacacguccauuaucaaucauaaauucugcaaccuuucugaugcucacaagaaaaaucuguacgaccaugcccucaugagcauuaucuccaccuuucaccugagcauuccgaacuucaaucaguaugaggccaugucuugugauuuuaacggaggcaagaucuccgugcaguacaaucugagccacacauaugcugucgacgccgcuaaccauugcggcaccauugccaauggggugcuccaaacauucaugcggauggcguggggaggcucuuacaucgcccuggauuccgggaagggaagcugggacuguaucaugaccucuuaccaguaucuuauuauccagaacacgacaugggaagaucacugccaguuuucccgccccagcccuauuggcuaccuggggcuccugucccaaagaacccgggacaucuauauuucucgcagacuucugggaacauucaccuggacccucagcgauuccgagggcaacgaaacacccggcggguacugucugacgcgguggaugcugaucgaggcugagcucaaaugcuuuggaaauaccgccguugcuaaguguaacgaaaaacaugacgaggaguucugcgauaugcugcgccuuuuugacuucaauaagcaggccaucaaaagacugaagaccccugcgcagaugagcauucagcucaucaacaaggccgugaaugcucugauuaacgaucaacuuaucaugaaaaaucaucugcgggacauuaugggcauccccuauugcaacuacucuaaguauuguuaccucaaucacacagucacagggaaaaccucccugccucgcugcugucuggugagcaacggaucuuaccucaaugaaacgcacuucagcgacgauaucgaacagcaggccgacaacaugauuacagagcugcuucaaaaggaguauaucgauagacagggcaaaaccccgcuggggcucguggaccuguuugucuucuccaccucuuuuuaccugauuagcaucuuccuucaccucguuaagauucccacacaucggcacguggugggaaaaccuugccccaagccucaucgccugaaucacaugggcaucuguuccugcggccuguauaagcaccccggggucccggugaaauggaagagaugaggacuagucccuguucccagagcccacuuuuuuuucuuuuuuugaaauaaaauagccugucuuucagaucucaaaggcucuuuucagagccaccaaaaaaaaaaaaaaaaaaaaaaaaaaaaaaaaaaaaaaaaaaaaaaaaaaaaaaaaaaaaaaaaaaaaaaaaaaaaaaaaaaaaaaaaaaaaaaaaaaaaa

SEQ ID NO: 31830 - RNA, 1745 nt, Artificial Sequence
  mRNA product Design a-1 (hSL-A100) comprising derived and/or modified sequence from LASV(LASV221-NIG-2010;Clade II)__AIT17624__GPCmut7 (opt5)
aggagagucccgcagucggcguccagcggcucugcuuguucgugugugugucguugcaggccuuauucaagcuuaccaugggccagaucauuaccuucuuucaagaggugccccacgucaucgaagagguuaugaacauugugcugaucgcccucagccugcuugcuauucugaaggggaucuacaauguggccacaugcggacucuucggccuggucuccuuucuucugcucugugggagaucuugcagcacgaccuauaaaggaguguacgaacugcagacacuggagcucgacauggcgucccugaacaugaccaugccucuuucuuguacaaagaauaacagccaucacuauaucaugguuggcaaugaaaccgggcuggagcucacacugaccaacacguccauuaucaaucauaaauucugcaaccuuucugaugcucacaagaaaaaucuguacgaccaugcccucaugagcauuaucuccaccuuucaccugagcauuccgaacuucaaucaguaugaggccaugucuugugauuuuaacggaggcaagaucuccgugcaguacaaucugagccacacauaugcuauugacgccgcuaaccauugcggcaccaucgccaaugggguccuccaaacauucaugcggauggcguggggaggcucuuacaucgcccuggauuccgggaagggaagcugggacuguauuaugaccucuuaccaguaucuuaucauucagaacacgacaugggaagaucacugccaguuuucccgccccagcccuaucggcuaccuggggcuccugucccaaagaacccgggacauuuauaucucucgcagacuucugggaacauucaccuggacccucagcgauuccgagggcaacgaaacacccggcggguacugucugacgcgguggaugcugaucgaggcugagcucaaaugcuuuggaaauaccgccguggcuaaguguaacgaaaaacaugacgaggaguucugcgauaugcugcgccuuuuugacuucaauaagcaggccauuagacggcugaaaaccccugcgcagaugagcauccagcucauuaacaaggccguuaaugcucugaucaacgaucaacuuauuaugaagaaucaucugcgcgacaucaugggcauccccuauugcaacuacucuaaauauuguuaccucaaucacacagugacagggaagaccucccugccuagaugcugucuggucagcaacggaucuuaccucaaugaaacgcacuucagcgacgauauugaacagcaggccgacaacaugaucacagagaugcugcaaaaagaguauauggaucggcagggcaagaccccgcuugggcugguggaccucuuuguguucuccaccucuuuuuaccugauuagcaucuuccugcaccuugucaaaauucccacacaucgccacguuaucggaaagccuugccccaaaccucauagacucaaucacaugggcauuuguuccugcggccuguauaagcaccccggggugccggugaaguggaaacggugaggacuagucccuguucccagagcccacuuuuuuuucuuuuuuugaaauaaaauagccugucuuucagaucucaaaggcucuuuucagagccaccaaaaaaaaaaaaaaaaaaaaaaaaaaaaaaaaaaaaaaaaaaaaaaaaaaaaaaaaaaaaaaaaaaaaaaaaaaaaaaaaaaaaaaaaaaaaaaaaaaaaa

SEQ ID NO: 31831 - RNA, 1745 nt, Artificial Sequence
  mRNA product Design a-1 (hSL-A100) comprising derived and/or modified sequence from LASV(LASV237-NIG-2010;Clade II)__AIT17638__GPCmut7 (opt5)
aggagagucccgcagucggcguccagcggcucugcuuguucgugugugugucguugcaggccuuauucaagcuuaccaugggccagaucauuaccuucuuucaagaggugccccacgucaucgaagagguuaugaacauugugcugaucgcccucagccugcuugcuauucugaaggggaucuacaauguggccacaugcggacucuucggccuggucuccuuucuucugcucugugggagaucuugcagcacgaccuauaaaggaguguacgaacugcagacacuggagcucgacauggcgucccugaacaugaccaugccucuuucuuguacaaagaauaacagccaucacuauaucaugguuggcaaugaaaccgggcuggagcucacacugaccaacacguccauuaucaaucauaaauucugcaaccuuucugaugcucacaagaaagaccuguacgaucaugcccucaugagcauuaucuccaccuuucaccugagcauuccgaauuucaaccaguaugaggccaugucuugugacuuuaauggaggcaagaucuccgugcaguacaaccugagccacacauaugcugucgaugccgcuaaucauugcggcaccauugccaacggggugcuccaaacauucaugcggauggcguggggaggcucuuacaucgcccuggacuccgggaagggaagcugggauuguaucaugaccucuuaccaguaucuuauuauccagaauacgacaugggaagaccacugccaguuuucccgccccagcccuauuggcuaccuggggcuccugucccaaagaacccgggauaucuauauuucucgcagacuucugggaacauucaccuggacccucagcgacuccgagggcaacgaaacacccggcggguacugucugacgcgguggaugcugaucgaggcugagcucaaaugcuuuggaaacaccgccguugcuaaguguaaugaaaaacaugaugaggaguucugcgacaugcugcgccuuuuugauuucaacaagcaggccaucagacggcugaaaaccccugcgcagaugagcauucagcucaucaauaaggccgugaacgcucugauuaaugaccaacuuaucaugaagaaccaucugcgcgacauuaugggcauccccuauugcaauuacucuaaauauuguuaccucaaccacacagucacagggaagaccucccugccuagaugcugucuggugagcaauggaucuuaccucaacgaaacgcacuucagcgaugacaucgaacagcaggccgauaauaugauuacagagcugcuucaaaaagaguauauggaccggcagggcaagaccccgcuggggcucguggaucuguuugucuucuccaccucuuuuuaccugaucagcauuuuccuucaccucaucaaaauucccacacaucgccacaucaccggaaagccuugccccaaaccucauagacugaaccacaugggcauuuguuccugcggccuguauaagcaccccgggguuccggugaaguggaaacggugaggacuagucccuguucccagagcccacuuuuuuuucuuuuuuugaaauaaaauagccugucuuucagaucucaaaggcucuuuucagagccaccaaaaaaaaaaaaaaaaaaaaaaaaaaaaaaaaaaaaaaaaaaaaaaaaaaaaaaaaaaaaaaaaaaaaaaaaaaaaaaaaaaaaaaaaaaaaaaaaaaaaa

SEQ ID NO: 31832 - RNA, 1745 nt, Artificial Sequence
  mRNA product Design a-1 (hSL-A100) comprising derived and/or modified sequence from LASV(LASV253-NIG-2011;Clade II)__AIT17670__GPCmut7 (opt5)
aggagagucccgcagucggcguccagcggcucugcuuguucgugugugugucguugcaggccuuauucaagcuuaccaugggccagaucauuaccuucuuucaagaggugccccacgucaucgaagagguuaugaacauugugcugaucgcccucagccugcuugcuauucugaaggggaucuacaauguggccacaugcggacucuucggccuggucuccuuucuucugcucugugggagaucuugcagcacgaccuauaaaggaguguacgaacugcagacacuggagcucgacauggcgucccugaacaugaccaugccucuuucuuguacaaagaauaacagccaucacuauaucaugguuggcaaugaaaccgggcuggagcucacacugaccaacacguccauuaucaaucauaaauucugcaaccuuucugaugcucacaagaaaaaucuguacgaccaugcccucaugagcauuaucuccaccuuucaccugagcauuccgaacuucaaucaguaugaggccaugucuugugauuuuaacggaggcaagaucuccgugcaguacaaucugagccacacauaugcugucgacgccgcuaaccauugcggcaccauugccaauggggugcuccaaacauucaugcggauggcguggggaggcucuuacaucgcccuggauuccgggaagggaagcugggacuguaucaugaccucuuaccaguaucuuauuauccagaacacgacaugggaagaucacugccaguuuucccgccccagcccuauuggcuaccuggggcuccugucccaaagaacccgggacaucuauauuucucgcagacuucugggaacauucaccuggacccucagcgauuccgagggcaacgaaacacccggcggguacugucugacgcgguggaugcugaucgaggcugagcucaaaugcuuuggaaauaccgccguugcuaaguguaacgaaaaacaugacgaggaguucugcgauaugcugcgccuuuuugacuucaauaagcaggccaucagacggcugaaagcgccugcccagaugagcauucagcucaucaacaaggcugugaaugcccugauuaacgaucaacuuaucaugaagaaucaucugcgcgacauuaugggcauccccuauugcaacuacucuaaauauuguuaccucaaucacacagucaccgggagaacaucccugccucggugcugucuggugagcaacggaucuuaccucaaugaaacccacuucagcgacgauaucgaacagcaggcugacaacaugauuacggagcugcuucaaaaggaguauaucgaucgccagggcaaaacaccgcuggggcucguggaccuguuugucuucuccaccucuuuuuaccugauuagcaucuuccuucaccucguuaagauucccacccauagacacaucauuggaaaaccuugccccaagccucaucggcugaaucacaugggcaucuguuccugcggccuguauaaacaccccggggugccggugaaguggaagcgcugaggacuagucccuguucccagagcccacuuuuuuuucuuuuuuugaaauaaaauagccugucuuucagaucucaaaggcucuuuucagagccaccaaaaaaaaaaaaaaaaaaaaaaaaaaaaaaaaaaaaaaaaaaaaaaaaaaaaaaaaaaaaaaaaaaaaaaaaaaaaaaaaaaaaaaaaaaaaaaaaaaaaa

SEQ ID NO: 31833 - RNA, 1745 nt, Artificial Sequence
  mRNA product Design a-1 (hSL-A100) comprising derived and/or modified sequence from LASV(LASV254-NIG-2011;Clade II)__AIT17674__GPCmut7 (opt5)
aggagagucccgcagucggcguccagcggcucugcuuguucgugugugugucguugcaggccuuauucaagcuuaccaugggccagaucauuaccuucuuucaagaggugccccacgucaucgaagagguuaugaacauugugcugaucgcccucagccugcuugcuauucugaaggggaucuacaauguggccacaugcggacucuucggccuggucuccuuucuucugcucugugggagaucuugcagcacgaccuauaaaggaguguacgaacugcagacacuggagcucgacaugaccaaccugaauaugacaaugccucuuuccuguaccaagaacaauucucaucacuauaucaugguuggcaacgaaacagggcuggagcucacccugacgaauaccagcauuaucaaccauaaauucugcaaucuuuccgaugcgcacaagaaaaaccuguacaaucaugcucucaugucuauuaucagcacauuucaccuguccauuccgaacuucaaucaguaugaggccaugagcugugacuuuaacggaggcaagaucucugugcaguacaaucugucccacagcuaugccgucgaugcugccaaccauugcggcaccauugcuaacggggugcuccaaacauucaugcggauggccuggggaggcucuuacaucgcgcuggacuccgggaagggaaauugggauuguaucaugaccagcuaccaguaucuuauuauccagaacacgacaugggaagaccacugccaguuuucucgccccuccccuauuggcuaccuggggcuccugagccaaagaacccgggauaucuauauuucccgcagacuucugggaacauucaccuggacccucucugacagcgagggcaaugaaacacccggcggguacugucugacgcgguggaugcugaucgaggccgagcucaaaugcuuuggaaacaccgcuguugccaaguguaaugaaaaacaugaugaggaguucugcgacaugcugcgccuuuuugauuucaacaagcaggcuaucagacggcugaaaaccccugcccaggcgaauauucagcucaucaacaaggccgugaaugcucugauuaacgaccaacuuaucaugaagaaucaucugcgcgauauuaugggcauccccuauugcaacuacuccaaauauuguuaccucaaucacacagucacagggaagaccagccugccuagaugcugucuggugucuaacggauccuaccucaaugaaacgcacuucagcgacgacaucgaacagcaggccgauaacaugauuacagagcugcuucaaaaagaguauauggaccggcagggcaagaccccgcuggggcucguggaucuguuugucuucucuaccagcuuuuaccugaucuccauuuuccuucaccucguuaaaauccccacacaucgccacgugauuggaaagccuugccccaaaccucauagacugaaccacaugggcaucuguucuugcggccuguauaagcaccccggggugccggucaaguggaaacggugaggacuagucccuguucccagagcccacuuuuuuuucuuuuuuugaaauaaaauagccugucuuucagaucucaaaggcucuuuucagagccaccaaaaaaaaaaaaaaaaaaaaaaaaaaaaaaaaaaaaaaaaaaaaaaaaaaaaaaaaaaaaaaaaaaaaaaaaaaaaaaaaaaaaaaaaaaaaaaaaaaaaa

SEQ ID NO: 31834 - RNA, 1745 nt, Artificial Sequence
  mRNA product Design a-1 (hSL-A100) comprising derived and/or modified sequence from LASV(Nig08-A19;Clade III)__ADU56618__GPCmut7 (opt5)
aggagagucccgcagucggcguccagcggcucugcuuguucgugugugugucguugcaggccuuauucaagcuuaccaugggccagaucgugaccuucuuucaagaggucccccacguuauugaagaggugaugaacaucgugcugauugcccucagcauccuggcuauucuuaaggggcuguacaauaucgccacaugcggacucaucggccuggucacguuccuucugcucuccgggagaucuuguagcaugaccuauaaaggaguguacgaacugcagacacuggagcucaacaugaauacccugaacaugacaaugccucuuuccugcaccaagaauaacucucaucacuauauuaugguuggcaaugaaacagggcuggagcucacccugacgaacaccagccuucugcaucacaaauuuuguaaucucuccgacgcgcauaagaaaaaccuguacgaucacacacugaugucuaucauuagcaccuuccaccucuccaucccgaauuuuaaccaguaugaggcuaugagcugcgacuucaauggaggcaagauuacagugcaguacaaccugucucauuccuaugccaucgaugccgcuaaucacuguggcaccgucgccaacggggugcuucaaacguuuaugcggauggcuuggggaggcagcuacauugcccuggacucugggcgcggaaagugggauugcaucaugacauccuaccaguaucucaucauucagaacaccacaugggaagaccauugucaguucagcagacccucuccuaucggcuaccuggggcuucugucccaacggacccgcgauauuuauaucagcagacggcuccugggaaccuuuacauggacgcuguccgacucugagggcaaugaaacccccggcggguacugccucacacgcuggaugcugauugaggcggagcuuaaauguuucggaaacaccgccguugcuaagugcaaugaaaaacacgaugaggaauuuugugacaugcugagacucuucgauuuuaacaagcaggccauccggcgccugaaagcuccugcccagaugagcauccagcuuauuaauaaggcggugaacgcccugaucaaugaccaacucauuaugaagaaccaccugagagauaucaugggcauucccuauugcaauuacuccaaauauugcuaccugaaccauacaagcaccgggcggacgucucucccucgcuguugccuggucuccaauggaagcuaccuuaacgagacacacuucucugacgacaucgaacagcaggcugauaauaugaucaccgagaugcugcaaaaggaguaucucgacagacagggcaaaaccccgcuggggcugguggaucuuuucguguuuagcacauccuucuaccucauuucuaucuuucugcaucuggucaagauucccacccaccggcauaucguuggaaaaccuugucccaagccucaccgccucaaccacaugggcauuugcagcuguggccuguauaaacagcccggggugccggugagauggaagcggugaggacuagucccuguucccagagcccacuuuuuuuucuuuuuuugaaauaaaauagccugucuuucagaucucaaaggcucuuuucagagccaccaaaaaaaaaaaaaaaaaaaaaaaaaaaaaaaaaaaaaaaaaaaaaaaaaaaaaaaaaaaaaaaaaaaaaaaaaaaaaaaaaaaaaaaaaaaaaaaaaaaaa

SEQ ID NO: 31835 - RNA, 1748 nt, Artificial Sequence
  mRNA product Design a-1 (hSL-A100) comprising derived and/or modified sequence from LASV(G1180-SLE-2010;Clade IV)__AIT17168__GPCmut7 (opt5)
aggagagucccgcagucggcguccagcggcucugcuuguucgugugugugucguugcaggccuuauucaagcuuaccaugggccagaucgugaccuucuuucaagaggucccccacguuauugaagaggugaugaacaucgugcugauugcccucagcauccuggcuguccuuaaggggcuguacaauuucgccacaugcggacucgugggccugcuuacguuucugcuccugugugggagauccugcaccgcgucucgguauaaaggaguuuacgaacugcagacacucgagcugaacauggaaacccuuaauaugacaaugccucugagcuguaccaagaacaauucccaucacuauauuauggugggcaacgagacagggcucgagcugacccuuacgaauaccucuaucaucaaccauaaauucugcaaucugagcgacgcucacaagaaaaaccucuacgaucaugcccugauguccauuaucucuacauuucaccugagcauuccgaauuucaaccaguaugaagccauguccugugacuuuaauggaggcaagaucagcguccaguacaaccucucucacuccuaugcuggcgaugccgcuaaucauugcgggaccguggccaacggaguucugcaaacauucaugcgcauggcguggggcgggagcuacauugcccuugacucuggacacggcuccugggauuguaucaugaccagcuaccaguaucugauuauccagaacacgacaugggaggaccauugccaguuuucuagacccuccccuaucggguaccucggacugcuuagccaacggacccgcgauauuuauaucuccagacggcugcucggcacauucaccuggacccugucugacagcgaaggcaaggauacacccgggggauacugucugacgcgcuggaugcucauugaggcugagcugaaaugcuuuggcaauaccgccguggcuaaguguaacgaaaaacacgacgaggaguucugcgauaugcuuagacuguuugacuucaauaagcaggccauccagcggcucaaagcgccugcccagauguccauucaacugaucaacaaggcugucaaugcccuuaucaacgaucagcugauuaugaagaaucaccuccgcgacaucauggggauucccuauugcaacuacagcaaauauuguuaccugaaucauacaaccacaggaaagaccucucugccuaaaugcugucucguguccaacggcagcuaccugaaugaaacgcacuucucugacgauaucgaacagcaagcugacaacaugauuacagagaugcuucagaaggaguauauggaaagacaggggaaaaccccgcugggacucguggaucuguuugucuucagcaccuccuuuuaccugaucucuaucuuccuucaucucguuaagauucccacacaccggcauaucgugggcaaaagcugcccuaagccccaccgccugaaucacaugggcauuuguuccugcgggcuguauaagcagccuggagugcccgucaaauggaagagaugaggacuagucccuguucccagagcccacuuuuuuuucuuuuuuugaaauaaaauagccugucuuucagaucucaaaggcucuuuucagagccaccaaaaaaaaaaaaaaaaaaaaaaaaaaaaaaaaaaaaaaaaaaaaaaaaaaaaaaaaaaaaaaaaaaaaaaaaaaaaaaaaaaaaaaaaaaaaaaaaaaaaa

SEQ ID NO: 31836 - RNA, 1748 nt, Artificial Sequence
  mRNA product Design a-1 (hSL-A100) comprising derived and/or modified sequence from LASV(G1442-SLE-2011;Clade IV)__AIT17180__GPCmut7 (opt5)
aggagagucccgcagucggcguccagcggcucugcuuguucgugugugugucguugcaggccuuauucaagcuuaccaugggccagaucgugaccuucuuucaagaggucccccacguuauugaagaggugaugaacaucgugcugauugcccucagcauccuggcuguccuuaaggggcuguacaauguggccacaugcggacucauuggccugguuacguuccuucugcucugugggagauccugcaccacaacccuguauaaaggaguguacgaacugcagacacucgagcugaacauggaaacccuuaauaugacaaugccucugucuuguaccaagaacaauagccaucacuauauccgggucggcaacgagacggggcucgagcugacccuuacaaauaccuccaucauuaaccauaaauuuugcaaucugucugacgcgcacaagaaaaaccucuacgaucaugcucugaugagcaucauuuccacauuccaccugucuaucccgaauuuuaaccaguaugaagccaugagcugugacuucaauggaggcaagauuuccgugcaguacaaccucagccacucuuaugccggcgaugcugccaaucauugcgggaccguugcuaacggagugcugcaaacguuuaugcgcauggccuggggcggguccuacaucgcgcuugacagcggaagaggcaacugggauuguauuaugacaucuuaccaguaucugaucauccagaauaccacaugggacgaucacugccaguucucccggcccagcccuauuggguaccucggacugcuuucucaacgcaccagagacgucuauaucucccggcgccugcucggcaccuuuacauggacgcugagcgauuccgagggcaaggacacccccgggggauacugucugacaagauggaugcucauugaagccgagcugaaaugcuucggcaacaccgcuguggccaaguguaaugagaaacaugaugaagaguuuugcgacaugcuucggcuguucgauuuuaacaagcaggcuauccagcgccucaaagccccugcgcagaugucuauucaacugaucaauaaggccgugaacgcucuuaucaaugaccagcugauuaugaagaaccaccucagagacaucauggggauucccuauugcaauuacagcaaauauuguuaccugaacaauacagccaccggaaagacgucccugccuaaaugcugucucaucagcaacggcucuuaccugaaugaaacacacuucuccgaugacauugagcaggaagcugauaacaugaucaccgagaugcuucaaaaggaguauauggaacggcaggggaaaaccccgcugggacucgucgaccuguucguuuuuagcacaucuuucuaccugaucagcauuuuucuucaucucgugaagauccccacccaccgccauauugugggcaaauccugcccuaagccccacagacugaaucauaugggcaucuguucuugcgggcuguauaagcagccuggaguccccgugcgguggaaacgcugaggacuagucccuguucccagagcccacuuuuuuuucuuuuuuugaaauaaaauagccugucuuucagaucucaaaggcucuuuucagagccaccaaaaaaaaaaaaaaaaaaaaaaaaaaaaaaaaaaaaaaaaaaaaaaaaaaaaaaaaaaaaaaaaaaaaaaaaaaaaaaaaaaaaaaaaaaaaaaaaaaaaa

SEQ ID NO: 31837 - RNA, 1748 nt, Artificial Sequence
  mRNA product Design a-1 (hSL-A100) comprising derived and/or modified sequence from LASV(G3010-SLE-2013;Clade IV)__AIT17344__GPCmut7 (opt5)
aggagagucccgcagucggcguccagcggcucugcuuguucgugugugugucguugcaggccuuauucaagcuuaccaugggccagaucgugaccuucuuucaagaggucccccacguuauugaagaggugaugaacaucgugcugauugcccucagcauccuggcuguccuuaaggggcuguacaauuucgccacaugcggacucgugggccugguuacguuucuucugcucugugggagauccugcaccacaucucuguauaaaggaguguacgaacugcagacccucgagcugaacauggaaacacuuaauaugaccaugccucugagcuguacaaagaacaauucccaucacuauauuauggucggcaacgagaccgggcucgagcugacgcuuaccaauacaucuaucaucaaccauaaauucugcaaucugagcgacgcgcacaagaaaaaccucuacaaucaugcucugauguccauuaucucuaccuuucaccugagcauuccgaacuucaaucaguaugaagccauguccugugauuuuaacggaggcaagaucagcgugcaguacaaucucucucacuccuaugccggcgacgcugccagccauugcgggacaguugcuaacggagugcugcaaaccuucaugcggauggccuggggcgggucuuacauugcgcuugauuccggauacggcaagugggacuguaucaugacgagcuaucaguaccugauuauccagaacacaaccugggaggaucacugccaguuuucucgccccuccccuaucggguaucucggacugcuuagccaaagaacacgggacauuuacaucucccgcagacugcucggcaccuucaccuggacacugucugauagcgaaggcaaagacacgcccgggggauauugucugacccgguggaugcucauugaggccgagcugaagugcuuuggcaauacagcugucgccaaauguaacgaaaagcaugaugaggaguucugcgacaugcuucgccuguuugauuucaauaaacaggcuauccagagacucaagaccccugcccagauguccauucaacugaucaacaaggcggugaaugcccuuaucaacgaccagcugauuaugaaaaaucaccuccgggauaucauggggauucccuacugcaacuauagcaaguacuguuaccugaaucacacaaccacgggaaaaacaucucugccuaagugcugucucguguccaacggcagcuaucugaaugaaacccauuucucugacgacaucgaacagcaagcugauaacaugauuaccgagaugcuucagaaagaguacauggaacgccaggggaagacaccgcugggacucgucgaccuguuuguuuucagcaccuccuuuuaucugaucucuaucuuccuucaccucgugaaaauucccacacauagacacaucgugggcaagagcugcccuaagccccaucggcugaaucacaugggcauuuguuccugcgggcuguacaaacagccuggaguccccgugcgcuggaagagaugaggacuagucccuguucccagagcccacuuuuuuuucuuuuuuugaaauaaaauagccugucuuucagaucucaaaggcucuuuucagagccaccaaaaaaaaaaaaaaaaaaaaaaaaaaaaaaaaaaaaaaaaaaaaaaaaaaaaaaaaaaaaaaaaaaaaaaaaaaaaaaaaaaaaaaaaaaaaaaaaaaaaa

SEQ ID NO: 31838 - RNA, 1748 nt, Artificial Sequence
  mRNA product Design a-1 (hSL-A100) comprising derived and/or modified sequence from LASV(G502-SLE-2009;Clade IV)__AIT17126__GPCmut7 (opt5)
aggagagucccgcagucggcguccagcggcucugcuuguucgugugugugucguugcaggccuuauucaagcuuaccaugggccagaucgugaccuucuuucaagaggucccccacguuauugaagaggugaugaacaucgugcugauugcccucagcauccuggcuguccuuaaggggcuguacaauuucgccacaugcggacucgugggccugcuuacguuucugcuccugugugggagauccugcaccacaggacuguauaaaggcguuuacgaacuccagacccuggagcuuaacauggaaacacugaauaugaccaugccucucucuuguacaaagaacaauagccaucacuauauuaugguggggaacgagaccggacuggagcuuacgcugaccaauacauccaucaucaaccauaaauucugcaaucucucugacgcgcacaagaaaaaccuguacgaucaugcucugaugagcauuaucuccaccuuucaccucucuauuccgaauuucaaccaguaugaagccaugagcugugacuuuaauggcggcaagaucuccguccaguacaaccugagccacucuuaugccggggaugcugccgaccauugcggaacaguggcuaauggcguucuucaaaccuucaugcggauggccuggggaggguccuacauugcgcuggauagcggccgcgggagaugggacuguaucaugacgucuuaccaguaucucauuauccagaacacaaccugggaggaucacugccaguuuucccggcccagcccuaucggauaccugggccuucugucucaacgcacaagagacauuuauaucucccggcgccuccugggcaccuucaccuggacacugagcgauuccgaagggaaggacacgcccggaggcuacugucucaccagauggaugcugauugaggccgagcuuaaaugcuuugggaacacagcuguggccaaguguaaugaaaaacaugaugaggaguucugcgacaugcugcggcucuuugauuucaacaagcaggcuauccagcgccugaaagccccugcgcagaugucuauucaacuuaucaauaaggccgucaacgcucugaucaaugaccagcucgugaugaagaaccaccugagagacauuaugggaauccccuauugcaauuacagccgguauuguuaccugaaccacaccacaaccggccgcacgucccucccuaaaugcugucuggugagcaaugggucuuaccuuaacgaaacacauuucuccgaugacauugaacagcaagccgauaauaugaucaccgagaugcugcagaaggaguauauggaaagacagggaaaaaccccgcucggccuggucgaccuguuuguuuucagcacaucuuuuuaccuuauuagcaucuuccuccaccuggugaagauccccacccaucggcacauugugggcaaauccugcccuaagccccaucgccugaaccacauggggaucuguucuugcggacucuauaaacagccuggcguccccgugaaguggaagagaugaggacuagucccuguucccagagcccacuuuuuuuucuuuuuuugaaauaaaauagccugucuuucagaucucaaaggcucuuuucagagccaccaaaaaaaaaaaaaaaaaaaaaaaaaaaaaaaaaaaaaaaaaaaaaaaaaaaaaaaaaaaaaaaaaaaaaaaaaaaaaaaaaaaaaaaaaaaaaaaaaaaaa

SEQ ID NO: 31839 - RNA, 1748 nt, Artificial Sequence
  mRNA product Design a-1 (hSL-A100) comprising derived and/or modified sequence from LASV(G733-SLE-2010;Clade IV)__AIT17154__GPCmut7 (opt5)
aggagagucccgcagucggcguccagcggcucugcuuguucgugugugugucguugcaggccuuauucaagcuuaccaugggccagaucgugaccuucuuucaagaggucccccacguuauugaagaggugaugaacaucgugcugauugcccucagcauccuggcuguccuuaaggggcuguacaauuucgccacaugcggaauugugggccucguuuccuuucugcuucugugugggagaucuugcacgaccagccucuauaaaggaguguacgaacugcagacacuggagcucaacauggaaacccugaauaugacaaugccucuuuccuguaccaagaacaauucucaucacuauaucauggucggcaacgagacagggcuggagcucacccugacgaauaccagcaucauuaaccauaaauucugcaaucuuuccgacgcgcacaagaaaaaccuguacgaucaugcucucaugucuaucauuagcacauuucaccuguccaucccgaauuucaaccaguaugaagccaugagcugugacuuuaauggaggcaagauuucugugcaguacaaccugucccacagcuaugccggcgaugcugccaaucauugcgggaccaucgcuaacggaguucuccaaacauucaugcggauggccuggggcgggucuuacauugcgcuggacuccggacgcgauagaugggacuguaucaugaccagcuaccaguaucuuaucauucagaacacgacaugggaggaucacugccaguuuucucggcccuccccuaucggcuaccuggggcuccugagccaacgcaccagagacauuuauaucucccggcgccuucugggaacauucaccuggacccucucugauagcgaaggcaaggacacacccggcggguacugucugacgagauggaugcugauugaggccgagcucaaaugcuuuggaaauaccgcuguggccaaguguaacgaaaaacaugaugaggaguucugcgacaugcugcggcuuuuugauuucaauaagcaggcuauccagcgccugaaagccccugcgcagauguccauccaacucauuaacaaggccgucaaugcucugaucaacgaccagcuuauuaugaagaaucaccugagagacaucaugggcauucccuauugcaacuacagcaaauauuguuaccucaaucacacaaccacagggaagaccucucugccuaaaugcugucugguguccaacggaagcuaccucaaugaaacgcauuucucugaugacaucgaacagcaagccgauaacaugaucacagagaugcugcagaaggaguauauggaacggcagggcaaaaccccgcuugggcugguggaccucuuugucuucagcaccuccuuuuaccugauuucuaucuuccugcaccuuguuaagauucccacacaucgccacguggugggaaaaagcugcccuaagccccauagacucaaucacaugggcaucuguuccugcggccuguaugggcagccuggaguccccgugaaguggaaacggugaggacuagucccuguucccagagcccacuuuuuuuucuuuuuuugaaauaaaauagccugucuuucagaucucaaaggcucuuuucagagccaccaaaaaaaaaaaaaaaaaaaaaaaaaaaaaaaaaaaaaaaaaaaaaaaaaaaaaaaaaaaaaaaaaaaaaaaaaaaaaaaaaaaaaaaaaaaaaaaaaaaaa

SEQ ID NO: 31840 - RNA, 1748 nt, Artificial Sequence
  mRNA product Design a-1 (hSL-A100) comprising derived and/or modified sequence from MOPV/LASV reassortant(IGS-1;Clade IV)__AFY05576__GPCmut7 (opt5)
aggagagucccgcagucggcguccagcggcucugcuuguucgugugugugucguugcaggccuuauucaagcuuaccaugggccagaucgugaccuucuuucaagaggucccccacguuauugaagaggugaugaacaucgugcugauugcccucagcguccuggcugugcuuaaggggcuguacaauuucgccacaugcggacucguuggccuggugacguuucuucugcucugugggagauccugcaccacaucucuguauaaaggagucuacgaacugcagacccucgagcugaacauggaaacacuuaauaugaccaugccucugagcuguacaaagaacaauucccaucacuauaucauggugggcaacgagaccgggcucgagcugacgcuuaccaauacaucuauuaucaaccauaaauucugcaaucugagcgacgcgcacaagaaaaaccucuacgaucaugcucugauguccaucauuucuaccuuucaccugagcaucccgaauuucaaccaguaugaagccauguccugugacuuuaauggaggcaagauuagcguucaguacaaccucucucacuccuaugccggcgaugcugccaaucauugcgggacaguggcuaacggaguccugcaaaccuucaugcggauggccuggggcgggagcuacaucgcgcuugacucuggacgcggcaacugggauuguauuaugacguccuaccaguaucugaucauucagaauacaaccugggaggaccacugccaguuuagcagacccucuccuaucggguaccucggacugcuuucccaacggacacgcgauaucuauauuagcagacggcugcucggcaccuucaccuggacacuguccgacucugaaggcgaggauacgcccgggggauacugucugacccgcuggaugcucaucgaggccgaacugaagugcuuuggcaacacagcuguggccaaauguaaugagaagcaugacgaagaguucugcgauaugcuuagacuguuugacuucaacaaacaggcuauucagcggcucaaggccccugcgcagaugagcauccaacugauuaauaaagccgugaacgcucuuaucaaugaucagcugaucaugaagaaccaccuccgcgacauuauggggauccccuauugcaauuacuccaaguauuguuaccugaaccacaccacaaccggaagaacgagccugccuaaaugcugucucgucucuaauggcuccuaccugaacgaaacacauuucagcgacgauauugagcagcaagccgacaauaugaucaccgagaugcuucagaaggaauauauggagcggcaggggaaaaccccgcugggacucguugaucuguuuguguucucuaccagcuuuuaccugauuuccaucuuccuucaccucgugaagauccccacacaucgccacauugucggcaaaucuugcccuaagccccauagacugaaccacaugggcaucuguagcugcgggcuguauaaacagccuggagugcccguuaaguggaagcggugaggacuagucccuguucccagagcccacuuuuuuuucuuuuuuugaaauaaaauagccugucuuucagaucucaaaggcucuuuucagagccaccaaaaaaaaaaaaaaaaaaaaaaaaaaaaaaaaaaaaaaaaaaaaaaaaaaaaaaaaaaaaaaaaaaaaaaaaaaaaaaaaaaaaaaaaaaaaaaaaaaaaa

SEQ ID NO: 31841 - RNA, 1748 nt, Artificial Sequence
  mRNA product Design a-1 (hSL-A100) comprising derived and/or modified sequence from LASV(LM765-SLE-2012;Clade IV)__AIT17814__GPCmut7 (opt5)
aggagagucccgcagucggcguccagcggcucugcuuguucgugugugugucguugcaggccuuauucaagcuuaccaugggccagaucgugaccuucuuucaagaggucccccacguuauugaagaggugaugaacaucgugcugauugcccucagcauccuggcuguccuuaaggggcuguacaauuucgccacaugcggacucgugggccugguuacguuucuucugcucugugggagauccugcaccacaucucuguauaaaggaguguacgaacugcagacccucgagcugaacauggaaacacuuaauaugaccaugccucugagcuguacaaagaacaauucccaucacuauauuauggucggcaacgagaccgggcucgagcugacgcuuaccaauacaucuaucaucgaccauaaauucugcaaccugagcgaugcgcaccggaagaaucucuacgaccaugcucugauguccauuaucucuaccuuucaccugagcauuccgaacuucaaucaguaugaagccauguccugugauuuuaacggaggcaaaaucagcgugcaguacaaucucucucacuccuaugccaaggacgcugccgaucauugcggcacaguugcuaacggggugcugcaaaccuucaugcgcauggccuggggaggcagcuacauugcgcuugacucugggagaggacggugggauuguaucaugacguccuaccaguaucugauuauccagaauacaaccugggaggaccacugccaguuuagccgccccucuccuaucggcuaccucgggcugcuuucccaaagaacacgggauauuuauaucagccgcagacugcucggaaccuucaccuggacacuguccgacucugaaggcaaggauacgcccggcggguacugucugacccgguggaugcucauugaggccgagcugaaaugcuuuggaaacacagcugucgccaaguguaacgaaaaacaugacgaggaguucugcgauaugcuucgccuguuugacuucaauaagcaggcuauccagagacucaaagccccugcgcagaugagcauucaacugaucaacaaggccgugaaugcucuuaucaacgaccagcugauuaugaagaaucaccuccgggauaucaugggcauucccuauugcaacuacuccaaauauuguuaccugaaucacaccacaaccgggaagacgagccugccuaaaugcugucucgugucuaacggauccuaccugaaugaaacacauuucagcgacgauaucgaacagcaagccgacaacaugauuaccgagaugcuucagaaggaguauauggaacgccagggcaaaaccccgcuggggcucgucgaucuguuuguuuucucuaccagcuuuuaccugaucuccaucuuccuucaccucgugaagauucccacacauagacacaucgugggaaaaccuugccccaagccucaucggcugaaucacaugggcauuuguucuugcggccuguauaagcagcccggggucccggugaaauggaagcgcugaggacuagucccuguucccagagcccacuuuuuuuucuuuuuuugaaauaaaauagccugucuuucagaucucaaaggcucuuuucagagccaccaaaaaaaaaaaaaaaaaaaaaaaaaaaaaaaaaaaaaaaaaaaaaaaaaaaaaaaaaaaaaaaaaaaaaaaaaaaaaaaaaaaaaaaaaaaaaaaaaaaaa

SEQ ID NO: 31842 - RNA, 1748 nt, Artificial Sequence
  mRNA product Design a-1 (hSL-A100) comprising derived and/or modified sequence from LASV(LM776-SLE-2012;Clade IV)__AIT17824__GPCmut7 (opt5)
aggagagucccgcagucggcguccagcggcucugcuuguucgugugugugucguugcaggccuuauucaagcuuaccaugggccagaucgugaccuucuuucaagaggucccccacguuauugaagaggugaugaacaucgugcugauugcccucagcauccuggcuguccuuaaggggcuguacaauuucgccacaugcggacucgugggccugguuacguuucuucugcucugugggagauccugcaccacaucuguguauaaaggagucuacgaacugcagacccuggagcucaacauggaaacacugaauaugaccaugccucuuagcuguacaaagaacaauucccaucacuauauuauggugggcaacgagaccgggcuggagcucacgcugaccaauacaucuaucaucaaccauaaauucugcaaucuuagcgacgcgcacaagaaaaaccuguacgaucaugcucucauguccauuaucucuaccuuucaccugagcauuccgaauuucaaccaguaugaagccauguccugugacuuuaauggaggcaagaucagcguucaguacaaccugucucacuccuaugccggcgaugcugccaaucauugcgggacaguggcuaacggaguccuccaaaccuucaugcggauggccuggggcgggagcuacauugcgcuggacucuggacacggcaagugggauuguaucaugacguccuaccaguaucuuauuauccagaacacaaccugggaggaccauugccaguuuagccgccccucuccuaucggguaccugggacuccugucccaaagaacacgggauauuuauaucagccgcagacuucugggcaccuucaccuggacacucuccgacucugaaggcaaagauacgcccgggggauacugucugacccgguggaugcugauugaggccgagcucaagugcuuuggcaauacagcuguggccaaauguaacgaaaagcacgacgaggaguucugcgauaugcugcgccuuuuugacuucaauaaacaggcuauccagagacugaaggccccugcgcagaugagcauucaacucaucaacaaggccgugaaugcucugaucaacgaucagcuuauuaugaaaaaucaucugcgggacaucauggggauucccuauugcaacuacuccaaguauuguuaccucaaucacaccacaaccggaaaaacgagccugccuaagugcugucuggucucuaacggcuccuaccucaaugaaacacacuucagcgacgauaucgaacagcaagccgacaacaugauuaccgagaugcugcagaaagaguauauggaacgccaggggaagaccccgcuuggacugguugaucucuuuguguucucuaccagcuuuuaccugaucuccaucuuccugcaucuugugaaaauucccacacacagacauaucgucggcaagucuugcccuaagccccaccggcucaaucacaugggcauuuguagcugcgggcuguauaaacagccuggagugcccguucgcuggaagagaugaggacuagucccuguucccagagcccacuuuuuuuucuuuuuuugaaauaaaauagccugucuuucagaucucaaaggcucuuuucagagccaccaaaaaaaaaaaaaaaaaaaaaaaaaaaaaaaaaaaaaaaaaaaaaaaaaaaaaaaaaaaaaaaaaaaaaaaaaaaaaaaaaaaaaaaaaaaaaaaaaaaaa

SEQ ID NO: 31843 - RNA, 1748 nt, Artificial Sequence
  mRNA product Design a-1 (hSL-A100) comprising derived and/or modified sequence from LASV(Mad39;Clade IV)__ANH09722__GPCmut7 (opt5)
aggagagucccgcagucggcguccagcggcucugcuuguucgugugugugucguugcaggccuuauucaagcuuaccaugggccagaucgugaccuucuuucaagaggucccccacguuauugaagaggugaugaacaucgugcugauugcccucagcauccuggcuguccuuaaggggcuguacaauguggccacaugcggacucauuggccugguuacguuccuucugcucugugggagauccugcaccacaacccuguauaaaggaguguacgaacugcaggcgcucgagcugaacauggaaacacuuaauaugaccaugccucugucuuguacaaagaacaauagccaucacuauauccgggucggcaacgagaccgggcucgagcugacgcuuaccaauacaucccugaucaaccauaaauuuugcaaucucucugacgcucacaagaaaaaccuguacgaucaugcccugaugagcauuaucuccaccuuccaccucucuauuccgaauuuuaaccaguaugaagccaugagcugugacuucaaugauggaaagaucuccgugcaguacaaccugagccacacauaugcuggcgacaccgccaaucauugcggcacgguugcuaacggggugcuucaaacauuuaugcgcauggccuggggaggcucuuacauugcgcuggauuccgggagaggaggcugggacuguaucaugaccagcuaccaguaucucauuauccagaacacaaccugggaggaucacugccaguucucucggcccuccccuaucggguaccugggacuucugagccaacgcaccagagacauuuauaucucucggcgccuccugggcacauuuacguggacccuguccgauagcgaaggcaaggacacacccgggggauacugucucaccagauggaugcugauugaggccgagcuuaaaugcuucggcaauacagcugucgccaaguguaacgaaaaacaugaugaggaauuuugcgacaugcugcgccucuucgauuuuaauaagcaggcuauccagcggcugaaagccccugcgcagauguccauucaacuuaucaacaaggccgugaaugcucugaucaacgaccagcucauuaugaagaaucaccugagagacaucauggggauucccuauugcaacuacucuaaauauuguuaccugaaucacaccgugacgggaaagacaagccucccuaaaugcugucuggucuccaacggcagcuaccuuaaugagacccauuucucugaugacaucgaacagcaagccgauaacaugauuaccgagaugcugcagaaggaguauauggaacggcaggggaaaacaccgcucggacugguugaccuguucguguuuuccaccagcuucuaccuuaucucuaucuuucuccaccuggugaagauucccacacaucgccacgucgugggcaaaccuugccccaagccucauagacugaaucacaugggcaucuguagcugcggguucuauaagcagcccggaguuccggugcgguggaaacgcugaggacuagucccuguucccagagcccacuuuuuuuucuuuuuuugaaauaaaauagccugucuuucagaucucaaaggcucuuuucagagccaccaaaaaaaaaaaaaaaaaaaaaaaaaaaaaaaaaaaaaaaaaaaaaaaaaaaaaaaaaaaaaaaaaaaaaaaaaaaaaaaaaaaaaaaaaaaaaaaaaaaaa

SEQ ID NO: 31844 - RNA, 1748 nt, Artificial Sequence
  mRNA product Design a-1 (hSL-A100) comprising derived and/or modified sequence from LASV(Z0947-SLE-2011;Clade IV)__AIT17840__GPCmut7 (opt5)
aggagagucccgcagucggcguccagcggcucugcuuguucgugugugugucguugcaggccuuauucaagcuuaccaugggccagaucgugaccuucuuucaagaggucccccacguuauugaagaggugaugaacaucgugcugauugcccucagcauccuggcuguccuuaaggggcuguacaauuucgccacaugcggacucgugggccugguuacguuucuucugcucugugggagauccugcaccauuucucuguauaaaggaguguacgaacugcagacacucgagcugaacauggaaacccuuaauaugacaaugccucugagcuguaccaagaacaauucccaucacuauaucauggucggcaacgagacagggcucgagcugacccuuacgaauaccucuaucauuaaccauaaauucugcaaucugagcgacgcgcacaagaaaaaccucuacgaucaugcucugauguccaucauuucuacauuucaccugagcaucccgaauuucaaccaguaugaagccauguccugugacuuuaauggaggcaagauuagcgugcaguacaaccucucucacuccuaugccggcgaugcugccaaucauugcgggaccguugcuaacggagugcugcaaacauucaugcggauggccuggggcgggagcuacaucgcgcuugacucuggacgcgauagaugggacuguauuaugaccuccuaccaguaucugaucauccagaacacgacaugggaggaucacugccaguuuagccggcccucuccuauuggcuaccucgggcugcuuucccaacgcaccagagacaucuauauuagccggcgccugcucggaacauucaccuggacccuguccgauucugaaggcaaggacacacccggcggguacugucugacgagauggaugcucaucgaggccgagcugaaaugcuuuggaaauaccgcugucgccaaguguaacgaaaaacaugaugaggaguucugcgacaugcuucggcuguuugauuucaauaagcaggcuauucagcgccucaaagccccugcgcagaugagcauccaacugaucaacaaggccgugaaugcucuuauuaacgaccagcugaucaugaagaaucaccucagagacauuaugggcauccccuauugcaacuacuccaaauauuguuaccugaaucacacaaccacagggaagaccagccugccuaaaugcugucucgugucuaacggauccuaccugaaugaaacgcauuucagcgaugacauugaacagcaagccgauaacaugaucacagagaugcuucagaaggaguauauggaacggcagggcaaaaccccgcuggggcucgucgaccuguuuguuuucucuaccagcuuuuaccugaucuccauuuuccuucaccucgugaagauccccacacaucgccacauugugggaaaaccuugccccaagccucauagacugaaucacaugggcaucuguucuugcggccuguauaagcagcccggggucccggugaaauggaagcggugaggacuagucccuguucccagagcccacuuuuuuuucuuuuuuugaaauaaaauagccugucuuucagaucucaaaggcucuuuucagagccaccaaaaaaaaaaaaaaaaaaaaaaaaaaaaaaaaaaaaaaaaaaaaaaaaaaaaaaaaaaaaaaaaaaaaaaaaaaaaaaaaaaaaaaaaaaaaaaaaaaaaa

SEQ ID NO: 31845 - RNA, 1724 nt, Artificial Sequence
  mRNA product Design a-1 (A100) comprising derived and/or modified sequence from LASV(Josiah;Clade IV)__NP_694870__GPCmut7 (opt1)
aggagagucccgcagucggcguccagcggcucugcuuguucgugugugugucguugcaggccuuauucaagcuuaccaugggccagaucgugaccuucuuccaggaggucccccacgugaucgaggaggugaugaacaucguccugaucgcccucagcgugcuggccgugcugaaggggcucuacaacuucgcgaccugcggccuggucgggcuggugacguuccuccugcugugcggccgcuccugcaccaccagccucuacaaggggguguacgagcugcagacccuggagcucaacauggagacgcugaacaugaccaugccgcuguccugcaccaagaacaacagccaccacuacaucauggucggcaacgagaccggccucgagcugacgcugaccaacaccuccaucaucaaccacaaguucugcaaccucagcgacgcccacaagaagaaccuguacgaccacgcccugauguccaucaucagcaccuuccaccucuccauccccaacuucaaccaguacgaggccaugagcugcgacuucaacgggggcaagaucuccgugcaguacaaccugagccacuccuacgccggggacgcggccaaccacugcggcacgguggccaacgggguccugcagaccuucaugcggauggccuggggcggcagcuacaucgcgcucgacuccgggcgcggcaacugggacugcaucaugaccagcuaccaguaccugaucauccagaacaccacgugggaggaccacugccaguucucccggcccagccccaucggguaccugggccuccugucccagcgcacccgggacaucuacaucagccgccggcugcucggcaccuucaccuggacgcugagcgacuccgaggggaaggacaccccgggcggguacugccugacccgcuggaugcucaucgaggccgagcugaagugcuucggcaacaccgccguggccaagugcaacgagaagcacgacgaggaguucugcgacaugcugcggcuguucgacuucaacaagcaggccauccagcgccugaaggcgcccgcccagaugagcauccagcugaucaacaaggccgugaacgcccucaucaacgaccagcugaucaugaagaaccaccuccgggacaucauggggauccccuacugcaacuacuccaaguacugcuaccucaaccacacgaccaccggccgcaccagccugcccaagugcugccuggucuccaacggcagcuaccucaacgagacgcacuucuccgacgacaucgagcagcaggccgacaacaugaucaccgagaugcugcagaaggaguacauggagcggcaggggaagacgccccugggccucguggaccuguucguguucagcaccuccuucuaccugaucagcaucuuccugcaccucgucaagaucccgacccaccgccacaucguggggaaguccugccccaagccccaccggcugaaccacaugggcaucugcagcugcgggcuguacaagcagcccggcgugccggucaaguggaagcgcugaggacuagucccuguucccagagcccacuuuuuuuucuuuuuuugaaauaaaauagccugucuuucagaucuaaaaaaaaaaaaaaaaaaaaaaaaaaaaaaaaaaaaaaaaaaaaaaaaaaaaaaaaaaaaaaaaaaaaaaaaaaaaaaaaaaaaaaaaaaaaaaaaaaaa

SEQ ID NO: 31846 - RNA, 1721 nt, Artificial Sequence
  mRNA product Design a-1 (A100) comprising derived and/or modified sequence from LASV(LP;Clade I)__AAF86701__GPCmut7 (opt1)
aggagagucccgcagucggcguccagcggcucugcuuguucgugugugugucguugcaggccuuauucaagcuuaccaugggccagaucaucaccuucuuccaggaggugccccacgucaucgaggaggugaugaacaucgugcugaucgcccucagccugcuggccauccucaaggggcuguacaacaucgcgaccugcggcaucaucgggcuggucgccuuccucuuccugugcggcaaguccugcagccugacgcucaagggcggguacgagcugcagacccuggagcucaacauggagacccugaacaugaccaugccgcuguccugcacgaagaacagcucccaccacuacauccgcgugggcaacgagaccgggcucgagcugacccugaccaacacgagcaucaucaaccacaaguucugcaaccucuccgacgcccacaagaagaaccuguacgaccacgcccugaugagcaucaucuccaccuuccaccucagcauccccaacuucaaccaguacgaggccauguccugcgacuucaacggcgggaagaucagcgugcaguacaaccugucccacagcuacgcgggcgacgccgccgagcacugcgggaccgucgccaacggcgugcugcagaccuucaugcggauggcguggggcgggcgcuacaucgcccucgacuccggcaaggggaacugggacugcaucaugacgagcuaccaguaccugaucauccagaacaccaccugggaggaccacugccaguucucccggcccagccccaucggcuaccugggccuccugucccagcgcacccgggacaucuacaucagccgccggcugcucgggacguucaccuggacccugagcgacuccgagggcaacgagacccccgggggcuacugccugacgcgcuggaugcucaucgaggccgagcugaagugcuucgggaacaccgccguggccaagugcaacgagaagcacgacgaggaguucugcgacaugcugcggcuguucgacuucaacaagcaggcgauccgccggcugaaggcccccgcccagaugagcauccagcugaucaacaaggccgucaacgcccucaucaacgaccagcugaucaugaagaaccaccuccgcgacaucaugggcauccccuacugcaacuacuccaaguacugcuaccucaaccacaccagcuccggccggaccagccugcccaagugcugccugaucuccaacgggagcuaccucaacgagacgcaguucuccgacgacaucgagcagcaggcggacaacaugaucaccgagaugcugcagaaggaguacaucgagcgccagggcaagaccccgcuggggcucguggacaucuucaucuucagcaccuccuucuaccugaucagcaucuuccugcaccugaucaagaucccgacgcaccggcacaucgugggcaagcccugccccaagccccaccgccucaaccacaugggggucugcuccugcggccuguacaagcacccgggcgugcccaccaaguggaagcggugaggacuagucccuguucccagagcccacuuuuuuuucuuuuuuugaaauaaaauagccugucuuucagaucuaaaaaaaaaaaaaaaaaaaaaaaaaaaaaaaaaaaaaaaaaaaaaaaaaaaaaaaaaaaaaaaaaaaaaaaaaaaaaaaaaaaaaaaaaaaaaaaaaaaa

SEQ ID NO: 31847 - RNA, 1721 nt, Artificial Sequence
  mRNA product Design a-1 (A100) comprising derived and/or modified sequence from LASV(803213;Clade II)__AAF86703__GPCmut7 (opt1)
aggagagucccgcagucggcguccagcggcucugcuuguucgugugugugucguugcaggccuuauucaagcuuaccaugggccagaucaucaccuucuuccaggaggugccccacgucaucgaggaggugaugaacaucgugcugaucgcccucagccugcuggccauccucaaggggaucuacaacgucgcgaccugcggccuguucgggcugaucuccuuccuccugcugugcggccgcagcugcuccgugacguacaaggggguguacgagcuccagacccuggagcugaacauggccaaccucaacaugaccaugccgcugagcugcaccaagaacaacucccaccacuacaucauggucggcaacgagacgggccuggagcucacccugaccaacaccagcaucaucaaccacaaguucugcaaccuguccgacgcccacaagaagaaccucuacgaccacgcccugaugagcaucaucuccacguuccaccugagcauccccaacuucaaccaguacgaggccauguccugcgacuucaacgggggcaagaucagcgugcaguacaaccucucccacagcuucgcgguggacgccgccaaccacugcgggaccaucgccaacggcguccugcagaccuucaugcggauggcguggggcggguccuacaucgcccuggacagcggcaaggggaacugggacugcaucaugaccuccuaccaguaccucaucauccagaacacgaccugggaggaccacugccaguucagccgccccucccccaucggcuaccuggggcugcucagccagcggacccgcgacaucuacaucagccggcgccugcugggcaccuucacguggacccucuccgacagcgagggcaacgaggcccccgggggcuacugccugacccgguggaugcugaucgaggccgagcucaagugcuucgggaacaccgccguggcgaagugcaacgagaagcacgacgaggaguucugcgacaugcugcgccuguucgacuucaacaagcaggccaucaagcggcucaagacgcccgcccagauguccauccagcugaucaacaaggccgugaacgcccugaucaacgaccagcucaucaugaagaaccaccuccgcgacaucaugggcauccccuacugcaacuacagccgguacugcuaccugaaccacaccgucaccgggaagaccucccugccccgcugcugccuggugagcaacggcuccuaccugaacgagacgcacuucagcgacgacaucgagcagcaggcggacaacaugaucaccgagaugcuccagaaggaguacauggaccggcagggcaagaccccgcuggggcugguggaccucuucgucuucuccaccagcuucuaccugaucuccaucuuccugcaccuggugaagaucccgacgcaccgccacaucgugggcaagcccugccccaagccccaccggcucaaccacauggggaucugcagcugcggccuguacaagcacccggggguccccgugaaguggaagcgcugaggacuagucccuguucccagagcccacuuuuuuuucuuuuuuugaaauaaaauagccugucuuucagaucuaaaaaaaaaaaaaaaaaaaaaaaaaaaaaaaaaaaaaaaaaaaaaaaaaaaaaaaaaaaaaaaaaaaaaaaaaaaaaaaaaaaaaaaaaaaaaaaaaaaa

SEQ ID NO: 31848 - RNA, 1721 nt, Artificial Sequence
  mRNA product Design a-1 (A100) comprising derived and/or modified sequence from LASV(GA391;Clade III)__CAA36645__GPCmut7 (opt1)
aggagagucccgcagucggcguccagcggcucugcuuguucgugugugugucguugcaggccuuauucaagcuuaccaugggccagaucgugaccuucuuccaggaggucccccacgugaucgaggaggugaugaacaucguccugaucgcccucagcauccuggccauccugaaggggcucuacaacguggcgaccugcggccugaucgggcuggugacguuccuccugcuguccggccgcagcugcucccucaucuacaaggggaccuacgagcugcagacccuggagcucaacauggagacccugaacaugacgaugccgcugagcugcaccaagaacaacucccaccacuacauccgggucggcaacgagaccggccucgagcugacccugacgaacaccagcauccucaaccacaaguucugcaaccuguccgacgcccacaagcgcaaccuguacgaccacagccucauguccaucaucagcaccuuccaccuguccauccccaacuucaaccaguacgaggccaugagcugcgacuucaacgggggcaagaucaccgugcaguacaaccugucccacagcuucgccguggacgccgcggggcacugcggcacgcucgccaacgggguccugcagaccuucaugcggauggccuggggcggcuccuacaucgcccuggacagcgggcgcggcaacugggacugcaucaugaccuccuaccaguaccucaucauccagaacaccacgugggacgaccacugccaguucagccggcccucccccaucggguaccugggccugcucagccagcgcacccgggacaucuacaucagccgccggcugcugggcaccuucaccuggacgcucuccgacagcgaggggaacgagaccccgggcggguacugccugacccgcuggaugcugaucgaggcggagcucaagugcuucggcaacaccgccguggccaagugcaacgagaagcacgacgaggaguucugcgacaugcugcggcuguucgacuucaacaagcaggccauccgccggcucaagacgcccgcccagauguccauccagcugaucaacaaggcggugaacgcccugaucaacgaccagcucaucaugaagaaccaccuccgcgacaucauggggauccccuacugcaacuacagccgguacugcuaccugaaccacaccuccaccggcaagaccagccugccccgcugcugccugaucuccaacggcagcuaccugaacgagacgaaguucuccgacgacaucgagcagcaggccgacaacaugaucaccgagaugcuccagaaggaguacaucgaccggcaggggaagacgccccugggccuggucgaccuguucguguucagcaccuccuucuaccucaucagcaucuuccugcaccuggugaagaucccgacccaccgccacaucgucgggaagcccugccccaagccccaccggcucaaccacaugggcaucugcuccugcgggcuguacaagcagccgggcgugcccgugcgcuggaagcggugaggacuagucccuguucccagagcccacuuuuuuuucuuuuuuugaaauaaaauagccugucuuucagaucuaaaaaaaaaaaaaaaaaaaaaaaaaaaaaaaaaaaaaaaaaaaaaaaaaaaaaaaaaaaaaaaaaaaaaaaaaaaaaaaaaaaaaaaaaaaaaaaaaaaa

SEQ ID NO: 31849 - RNA, 1724 nt, Artificial Sequence
  mRNA product Design a-1 (A100) comprising derived and/or modified sequence from LASV(AV;Clade V)__CCA30314__GPCmut7 (opt1)
aggagagucccgcagucggcguccagcggcucugcuuguucgugugugugucguugcaggccuuauucaagcuuaccaugggccagaucgugaccuucuuccaggaggucccccacgugaucgaggaggugaugaacaucguccugaucgcccucagcauccuggccgugcugaaggggcucuacaacaucgcgaccugcggccugaucgggcugaucacguuccuccugcugugcggccgcuccugcagcuccaaccucuacaaggggguguacgagcugcagagccuggaccucaacauggagacccugaacaugaccaugccgcuguccugcaccaagaacaacagccaccacuacauccgggucggcaacgacacgggccucgagcugacccugaccaacaccuccauccucaaccacaaguucugcaaccugagcgacgcccacaagaaggaccuguacgaccacgcccucauguccaucaucagcacguuccaccuguccauccccaacuucaaccaguacgaggccaugagcugcgacuucaacgggggcaagaucuccgugcaguacaaccugagccacuccuacgccaucgacgcggccaaccacugcgggaccguggccaacggcauccuccagaccuucaugcgcauggccuggggcgggagcuacaucgcgcuggacuccggccgggggaacugggacugcaucaugaccagcuaccaguaccugaucauccagaacacgaccugggagaaccacugccaguucucccgccccagccccaucggcuaccucgggcugcugagccagcggacccgcgacaucuacaucucccggcgccuccugggcaccuucacguggacccugagcgacuccgagggcaacgccacccccgggggcuacugccucacccgguggaugcugaucgaggccgagcugaagugcuucgggaacacggccgucgccaagugcaacgagaagcacgacgaggaguucugcgacaugcuccgccuguucgacuucaacaagcaggcgaucagccggcugaagucccccgcccagaugagcauccagcucaucaacaaggccgugaacgcccugaucaacgaccagcugaucaugaagaaccaccuccgcgacaucaugggcauccccuacugcaacuacuccaaguacugcuaccugaaccacaccaucaccgggaagaccagccugcccaagugcugccucguguccaacggcagcuaccugaacgagacgcacuucuccgacgacaucgagcagcaggccgacaacaugaucaccgagaugcugcagaaggaguacauggagcggcagggcaagaccccgcucgggcuggucgaccuguucguguucagcaccuccuucuaccugaucagcaucuuccuccgccuggugaagaucccgacgcaccggcacaucgucggcaagcccugccccaagccccaccgccugaaccacauggggaucugcuccugcggccucuacaagcagccgggggugcccgugcgguggaagcgcugaggacuagucccuguucccagagcccacuuuuuuuucuuuuuuugaaauaaaauagccugucuuucagaucuaaaaaaaaaaaaaaaaaaaaaaaaaaaaaaaaaaaaaaaaaaaaaaaaaaaaaaaaaaaaaaaaaaaaaaaaaaaaaaaaaaaaaaaaaaaaaaaaaaaa

SEQ ID NO: 31850 - RNA, 1721 nt, Artificial Sequence
  mRNA product Design a-1 (A100) comprising derived and/or modified sequence from LASV(Togo/2016/7082;Clade VI)__AMR44577__GPCmut7 (opt1)
aggagagucccgcagucggcguccagcggcucugcuuguucgugugugugucguugcaggccuuauucaagcuuaccaugggccagaucaucaccuucuuccaggaggugccccacgucaucgaggaggugaugaacaucgugcugaucgcccucagccugcuggccauccucaagggggucuacaacguggcgaccugcggcaucaucgggcuggugacguuccuguuccucugcggccgcuccugcagccugaucuacaagggguccuacgagcugcagacccucgagcugaacauggagacccugaacaugaccaugccgcucagcugcacgaagaacuccagccaccacuacauccgggucggcaacgagaccggccuggagcugacccucaccaacacguccaucaucaaccacaaguucugcaaccugagcgacgcccacaagcgcaaccuguacgaccacgcccucauguccauccugagcaccuuccaccuguccauccccaacuucaaccaguacgaggccaugagcugcgacuucaacgggggcaagaucuccgugcaguacaaccucagccacgccuacgcgguggacgccgccgagcacugcgggaccgucgccaacggcgugcugcagaccuucaugcggauggcguggggcggguccuacaucgcccuggacagcggccgcgggaacugggacugcaucaugacguccuaccaguaccucaucauccagaacaccaccugggaggaccacugccaguucagccggcccucccccaucggcuaccuggggcugcucagccagcgcacccgggacaucuacaucagccgccggcugcugggcacguucaccuggacccucuccgacagcgagggcaacgagacccccgggggcuacugccugacgcgcuggaugcugaucgaggccgagcucaagugcuucgggaacaccgccguggccaagugcaacgagaagcacgacgaggaguucugcgacaugcugcggcuguucgacuucaacaagcaggcgauccagcgccucaagucccccgcccagaugagcauccagcugaucaacaaggccgucaacgcccugaucaacgaccagcucaucaugaagaaccaccuccgggacaugaugggcauccccuacugcaacuacuccaaguacugcuaccugaaccacaccagcuccgggcgcaccagccugcccaagugcugccugguguccaacggcagcuaccugaacgagacgcacuucuccgacgacaucgagcagcaggccgacaacaugaucaccgagaugcuccagaaggaguacaucgaccggcagggcaagaccccgcuggggcugguggaccucuucgucuucagcaccuccuucuaccugaucagcaucuuccugcaccugaucaagaucccgacgcaccgccacaucgugggcaagcccugccccaagccccaccggcucaaccacauggggaucugcuccugcggccuguacaagcagccgggggugcccacccgcuggaagcggugaggacuagucccuguucccagagcccacuuuuuuuucuuuuuuugaaauaaaauagccugucuuucagaucuaaaaaaaaaaaaaaaaaaaaaaaaaaaaaaaaaaaaaaaaaaaaaaaaaaaaaaaaaaaaaaaaaaaaaaaaaaaaaaaaaaaaaaaaaaaaaaaaaaaa

SEQ ID NO: 31851 - RNA, 1721 nt, Artificial Sequence
  mRNA product Design a-1 (A100) comprising derived and/or modified sequence from LASV(KAK-428;Clade n.d. (VII))__ANH09740__GPCmut7 (opt1)
aggagagucccgcagucggcguccagcggcucugcuuguucgugugugugucguugcaggccuuauucaagcuuaccaugggccagaucgugaccuucuuccaggaggucccccacgugaucgaggaggugaugaacaucguccugaucgcccucagccugcuggccauccucaaggggcuguacaacuucgcgaccugcggcgugaucgggcugaucacguuccuccugcugugcggccgcuccugcagcgccaccuacaaggggcaguacgagcuccagacccuggagcugaacauggagucccucaacaugaccaugccgcugagcugcacgaagaacaacucccaccacuacauccgggccggcaacaacaccggccuggagcucacccugaccaacacgagcaucaucucccacaaguucugcaaccugagcgacgcccacaagaagaaccucuacgaccacacccugauguccaucaucaccaccuuccaccugagcauccccaacuucaaccaguacgaggccauguccugcgacuucaacgggggcaagaucagcauccaguacaaccucucccacagcuacgcgggggacgccgcccagcacugcggcacgguggccaacgggguccugcagaccuucaugcgcauggcguggggcggcuccuaccuggcccucgacagcgggcggcgcggcugggacugcaucaucuccagcuaccaguaccugaucauccagaacaccaccugggacgaccacugccaguucucccggcccagccccaucggguaccugggcuucgugagccagaagacgcgcgacaucuacaucucccggcgccuccugggcaccuucaccuggacccugagcgacuccgaggggcacgacaugccgggcggguacugccucacgcgguggaugcugaucgaggccgaccugaagugcuucggcaacaccgccguggccaagugcaacgagaagcacgacgaggaguucugcgacauguggcgccucuucgacuucaacaagcaggcgauccagcggcugaaggcccccgcccagaugaacauccagcugaucaacaaggccgucaacgcccucaucaacgaccagcugaugaugaagaaccaccuccgcgacaucauggggauccccuacugcaacuacagcaaguucugcuaccugaacaacaccaccacgggccggaccucccugccccgcugcugccugaucagcaacggcuccuaccucaacgagacccacuucagcgacgacaucgagcagcaggcggacaacaugaucaccgagaugcugcagaaggaguacauggaccggcaggggaagacgccccugggccucguggaccuguucguguucuccaccagcuucuaccugaucaccaucuuccuccaccuggucaagaucccgacccaccgccacaucguggggaagcccugccccaagccccaccggcugaaccacaugggcaucugcuccugcgggcuguacaagcagccgggcgugcccguccgcuggaagcggugaggacuagucccuguucccagagcccacuuuuuuuucuuuuuuugaaauaaaauagccugucuuucagaucuaaaaaaaaaaaaaaaaaaaaaaaaaaaaaaaaaaaaaaaaaaaaaaaaaaaaaaaaaaaaaaaaaaaaaaaaaaaaaaaaaaaaaaaaaaaaaaaaaaaa

SEQ ID NO: 31852 - RNA, 1721 nt, Artificial Sequence; identical to SEQ ID NO: 31846
  mRNA product Design a-1 (A100) comprising derived and/or modified sequence from LASV(Pinneo-NIG-1969;Clade I)__AIT17836__GPCmut7 (opt1)

SEQ ID NO: 31853 - RNA, 1721 nt, Artificial Sequence
  mRNA product Design a-1 (A100) comprising derived and/or modified sequence from LASV(ISTH0009-NIG-2011;Clade II)__AIT17404__GPCmut7 (opt1)
aggagagucccgcagucggcguccagcggcucugcuuguucgugugugugucguugcaggccuuauucaagcuuaccaugggccagaucaucaccuucuuccaggaggugccccacgucaucgaggaggugaugaacaucgugcugaucgcccucagccugcuggccauccucaaggggaucuacaacgucgcgaccugcggccuguucgggcugguguccuuccuccugcugugcggccgcagcugcuccacgaccuacaaggggguguacgagcuccagacccuggagcuggacauggccagccucaacaugaccaugccgcuguccugcacgaagaacaacagccaccacuacaucauggucggcaacgagaccggccuggagcucacccugaccaacacguccaucaucaaccacaaguucugcaaccugagcgacgcccacaagaagaaccucuacgaccacgcccugauguccaucaucagcaccuuccaccuguccauccccaacuucaaccaguacgaggccaugagcugcgacuucaacgggggcaagaucuccgugcaguacaaccucagccacgcguacgccguggacgccgccaaccacugcgggaccaucgcgaacggcguccugcagaccuucaugcggauggccuggggcggguccuacaucgcccuggacagcggcaagggguccugggacugcaucaugacgagcuaccaguaccucaucauccagaacaccaccugggaggaccacugccaguucucccgccccagccccaucggcuaccuggggcugcucagccagcggacccgcgacaucuacaucucccggcgccugcugggcacguucaccuggacccucagcgacuccgagggcaacgagacccccgggggcuacugccugacgcgguggaugcugaucgaggccgagcucaagugcuucgggaacaccgccguggcgaagugcaacgagaagcacgacgaggaguucugcgacaugcugcgccuguucgacuucaacaagcaggccauccggcgccucaagacccccgcccagaugagcauccagcugaucaacaaggccgugaacgcccugaucaacgaccagcucaucaugaagaaccaccuccgggacaucaugggcaucccguacugcaacuacuccaaguacugcuaccugaaccacaccgucacggggaagaccagccugccccgcugcugccugguguccaacggcagcuaccugaacgagacccacuucuccgacgacaucgagcagcaggcggacaacaugaucaccgagcuccugcagaaggaguacauggaccggcagggcaagacgccccuggggcucguggaccuguucgucuucagcaccuccuucuaccugaucagcaucuuccugcaccucaucaagaucccgacccaccgccacaucaccggcaagcccugccccaagccccaccggcugaaccacauggggaucugcuccugcggccuguacaagcacccgggggugcccgugaaguggaagcgcugaggacuagucccuguucccagagcccacuuuuuuuucuuuuuuugaaauaaaauagccugucuuucagaucuaaaaaaaaaaaaaaaaaaaaaaaaaaaaaaaaaaaaaaaaaaaaaaaaaaaaaaaaaaaaaaaaaaaaaaaaaaaaaaaaaaaaaaaaaaaaaaaaaaaa

SEQ ID NO: 31854 - RNA, 1721 nt, Artificial Sequence
  mRNA product Design a-1 (A100) comprising derived and/or modified sequence from LASV(ISTH2010-NIG-2012;Clade II)__AIT17482__GPCmut7 (opt1)
aggagagucccgcagucggcguccagcggcucugcuuguucgugugugugucguugcaggccuuauucaagcuuaccaugggccagaucaucaccuucuuccaggaggugccccacgucaucgaggaggugaugaacaucgugcugaucgcccucagccugcuggccauccucaaggggaucuacaacgucgcgaccugcggccuguucgggcugguguccuuccuccugcugugcggccgcagcugcuccacgaccuacaaggggguguacgagcuccagacccuggagcuggacauggccagccucaacaugaccaugccgcuguccugcacgaagaacaacagccaccacuacaucauggucggcaacgagaccggccuggagcucacccugaccaacacguccaucaucaaccacaaguucugcaaccugagcgacgcccacaagaagaaccucuacgaccacgcccugauguccaucaucagcaccuuccaccuguccauccccaacuucaaccaguacgaggccaugagcugcgacuucaacgggggcaagaucuccgugcaguacaaccucagccacgcguacgccguggacgccgccaaccacugcgggaccaucgcgaacggcguccugcagaccuucaugcggauggccuggggcggguccuacaucgcccuggacagcggcaagggguccugggacugcaucaugacgagcuaccaguaccucaucauccagaacaucaccugggaggaccacugccaguucucccgccccagccccaucggcuaccuggggcugcucagccagcggacccgcgacaucuacaucucccggcgccugcugggcaccuucacguggacccucagcgacuccgagggcaacgagacccccgggggcuacugccugacccgguggaugcugaucgaggccgagcucaagugcuucgggaacacggccguggcgaagugcaacgagaagcacgacgaggaguucugcgacaugcugcgccuguucgacuucaacaagcaggccauccggcgccucaagacccccgcccagaugagcauccagcugaucaacaaggccgugaacgcccugaucaacgaccagcucaucaugaagaaccaccuccgggacaucaugggcauccccuacugcaacuacuccaaguacugcuaccugaaccacaccgucaccgggaagacgagccugccccgcugcugccugguguccaacggcagcuaccugaacgagacccacuucuccgacgacaucgagcagcaggcggacaacaugaucaccgagcuccugcagaaggaguacaucgaccggcagggcaagaccccgcuggggcucguggaccuguucgucuucagcacguccuucuaccugaucagcaucuuccugcaccucgugaagaucccgacccaccgccacguggucggcaagcccugccccaagccccaccggcugaaccacauggggaucugcuccugcggccuguacaagcacccgggggugcccgugaaguggaagcgcugaggacuagucccuguucccagagcccacuuuuuuuucuuuuuuugaaauaaaauagccugucuuucagaucuaaaaaaaaaaaaaaaaaaaaaaaaaaaaaaaaaaaaaaaaaaaaaaaaaaaaaaaaaaaaaaaaaaaaaaaaaaaaaaaaaaaaaaaaaaaaaaaaaaaa

SEQ ID NO: 31855 - RNA, 1721 nt, Artificial Sequence
  mRNA product Design a-1 (A100) comprising derived and/or modified sequence from LASV(Lassa virus/H.sapiens-wt/NGA/2015/ISTH_0543;Clade II)__AVO03639__GPCmut7 (opt1)
aggagagucccgcagucggcguccagcggcucugcuuguucgugugugugucguugcaggccuuauucaagcuuaccaugggccagaucaucaccuucuuccaggaggugccccacgucaucgaggaggugaugaacaucgugcugaucgcccucagccugcuggccauccucaaggggaucuacaacgucgcgaccugcggccuguucgggcugguguccuuccuccugcugugcggccgcagcugcuccacgaccuacaaggggguguacgagcuccagacccuggagcuggacauggccaaccucaacaugaccaugccgcugagcugcacgaagaacaacucccaccacuacaucauggucggcaacgagaccggccuggagcucacccugaccaacacgagcaucaucaaccacaaguucugcaaccuguccgacgcccacaagaagaaccucuacgaccacgcccugaugagcaucaucuccaccuuccaccugagcauccccaacuucaaccaguacgaggccauguccugcgacuucaacgggggcaagaucagcgugcaguacaaccucucccacaccuacgcgguggacgccgccaaccacugcgggaccaucgccaacggcguccugcagacguucaugcggauggcguggggcgggagcuacaucgcccuggacuccggcaaggggagcugggacugcaucaugaccuccuaccaguaccucgugauccagaacaccaccugggaggaccacugccaguucagccgccccucccccaucggcuaccuggggcugcucagccagcggacgcgcgacaucuacaucagccggcgccugcugggcaccuucaccuggacccucuccgacagcgagggcaacgagacgcccgggggcuacugccugacccgguggaugcugaucgaggccgagcucaagugcuucgggaacaccgccguggccaagugcaacgagaagcacgacgaggaguucugcgacaugcugcgccuguucgacuucaacaagcaggcgauccggcgccucaagacccccgcccagauguccauccagcugaucaacaaggccgucaacgcccugaucaacgaccagcucaucaugaagaaccaccuccgggacaucaugggcauccccuacugcaacuacagcaaguacugcuaccugaaccacacggugaccgggaagaccucccugccccgcugcugccuggugagcaacggcuccuaccugaacgagacccacuucagcgacgacaucgagcagcaggccgacaacaugaucacggagcuccugcagaaggaguacaucgaccggcagggcaagaccccgcuggggcucgucgaccuguucguguucuccaccagcuucuaccugaucuccaucuuccugcaccucgugaagaucccgacccaccgccacaucacgggcaagcccugccccaagccccaccggcugaaccacauggggaucugcagcugcggccuguacaagcacccggggguccccgugaaguggaagcgcugaggacuagucccuguucccagagcccacuuuuuuuucuuuuuuugaaauaaaauagccugucuuucagaucuaaaaaaaaaaaaaaaaaaaaaaaaaaaaaaaaaaaaaaaaaaaaaaaaaaaaaaaaaaaaaaaaaaaaaaaaaaaaaaaaaaaaaaaaaaaaaaaaaaaa

SEQ ID NO: 31856 - RNA, 1721 nt, Artificial Sequence
  mRNA product Design a-1 (A100) comprising derived and/or modified sequence from LASV(Lassa virus/H.sapiens-wt/NGA/2016/ISTH_0009;Clade II)__AVO03571__GPCmut7 (opt1)
aggagagucccgcagucggcguccagcggcucugcuuguucgugugugugucguugcaggccuuauucaagcuuaccaugggccagaucaucaccuucuuccaggaggugccccacgucaucgaggaggugaugaacaucgugcugaucgcccucagccugcuggccauccucaaggggaucuacaacgucgcgaccugcggccugcuggggcucguguccuuccugcugcucugcggccgcagcugcuccacgaccuacaaggggguguacgagcugcagacccuggagcucgacauggccagccugaacaugaccaugccgcuguccugcacgaagaacaacagccaccacuacaucauggucggcaacgagaccggccucgagcugacccugaccaacacguccaucaucaaccacaaguucugcaaccucagcgacgcccacaagaagaaccuguacgaccacgcccugauguccaucaucagcaccuuccaccucuccauccccaacuucaaccaguacgaggccaugagcugcgacuucaacgggggccggaucuccgugcaguacaaccugagccacuccuacgcgguggacgccgccaaccacugcgggaccaucgccaacggcguccugcagaccuucaugcgcauggcguggggcgggagcuacaucgcccucgacuccggcaaggggagcugggacugcaucaugacguccuaccaguaccugaucauccagaacaccaccugggaggaccacugccaguucagccggcccagccccaucggcuaccuggggcuccugucccagcgcacccgggacaucuacaucagccgccggcugcucggcacguucaccuggacccuguccgacagcgagggcaacgagacccccgggggcuacugccugacgcgcuggaugcucaucgaggccgagcugaagugcuucgggaacaccgccguggccaagugcaacgagaagcacgacgaggaguucugcgacaugcugcggcuguucgacuucaacaagcaggcgauccgccggcugaagacccccgcccagauguccauccagcugaucaacaaggccgugaacgcccucaucaacgaccagcugaucaugaagaaccaccuccgcgacaucaugggcaucccguacugcaacuacagcaaguacugcuaccucaaccacaccgucacggggaagaccucccugccccggugcugccuggugagcaacggcuccuaccucaacgagacccacuucagcgacgacaucgagcagcaggccgacaacaugaucaccgagcugcugcagaaggaguacaucgaccgccagggcaagacgccccucgggcugguggaccuguucgucuucuccaccagcuucuaccugaucuccaucuuccuccaccuggugaagaucccgacccaccggcacaucaccggcaagcccugccccaagccccaccgccugaaccacauggggaucugcagcugcggccucuacaaccacccgggggugcccgucaaguggaagcggugaggacuagucccuguucccagagcccacuuuuuuuucuuuuuuugaaauaaaauagccugucuuucagaucuaaaaaaaaaaaaaaaaaaaaaaaaaaaaaaaaaaaaaaaaaaaaaaaaaaaaaaaaaaaaaaaaaaaaaaaaaaaaaaaaaaaaaaaaaaaaaaaaaaaa

SEQ ID NO: 31857 - RNA, 1721 nt, Artificial Sequence
  mRNA product Design a-1 (A100) comprising derived and/or modified sequence from LASV(Lassa virus/H.sapiens-wt/NGA/2016/ISTH_0017;Clade II)__AVO03567__GPCmut7 (opt1)
aggagagucccgcagucggcguccagcggcucugcuuguucgugugugugucguugcaggccuuauucaagcuuaccaugggccagaucaucaccuucuuccaggaggugccccacgucaucgaggaggugaugaacaucgugcugaucgcccucagccugcuggccauccucaaggggaucuacaacgucgcgaccugcggccuguucgggcugguguccuuccuccugcugugcggccgcagcugcuccacgaccuacaaggggguguacgagcuccagacccuggagcuggacauggccagccucaacaugaccaugccgcuguccugcacgaagaacaacagccaccacuacaucauggucggcaacgagaccggccuggagcucacccugaccaacacguccaucaucaaccacaaguucugcaaccugagcgacgcccacaagaagaaccucuacgaccacgcccugauguccaucaucagcaccuuccaccuguccauccccaacuucaaccaguacgaggccaugagcugcgacuucaacgggggcaagaucuccgugcaguacaaccucagccacaccuacgcgaucgacgccgccaaccacugcgggaccaucgccaacggcgugcugcagacguucaugcggauggcguggggcggguccuacaucgcccuggacagcggcaagggguccugggacugcaucaugaccagcuaccaguaccucaucauccagaacaccaccugggaggaccacugccaguucucccgccccagccccaucggcuaccuggggcugcucagccagcggacgcgcgacaucuacaucucccggcgccugcugggcaccuucaccuggacccucagcgacuccgagggcaacgagacgcccgggggcuacugccugacccgguggaugcugaucgaggccgagcucaagugcuucgggaacaccgccgucgccaagugcaacgagaagcacgacgaggaguucugcgacaugcugcgccuguucgacuucaacaagcaggcgauccggcgccucaagacccccgcccagaugagcauccagcugaucaacaaggccgugaacgcccugaucaacgaccagcucaucaugaagaaccaccuccgggacaucaugggcauccccuacugcaacuacuccaaguacugcuaccugaaccacacggugaccgggaagaccagccugccccgcugcugccuggucuccaacggcagcuaccugaacgagacccacuucuccgacgacaucgagcagcaggccgacaacaugaucacggagcuccugcagaaggaguacauggaccggcagggcaagaccccgcuggggcucguggaccuguucguguucagcaccuccuucuaccugaucagcaucuuccugcaccucguccgcaucccgacccaccggcacgugaucggcaagcccugccccaagccccaccgccugaaccacauggggaucugcuccugcggccuguacaagcacccgggggugcccgucaaguggaagcggugaggacuagucccuguucccagagcccacuuuuuuuucuuuuuuugaaauaaaauagccugucuuucagaucuaaaaaaaaaaaaaaaaaaaaaaaaaaaaaaaaaaaaaaaaaaaaaaaaaaaaaaaaaaaaaaaaaaaaaaaaaaaaaaaaaaaaaaaaaaaaaaaaaaaa

SEQ ID NO: 31858 - RNA, 1721 nt, Artificial Sequence
  mRNA product Design a-1 (A100) comprising derived and/or modified sequence from LASV(Lassa virus/H.sapiens-wt/NGA/2018/ISTH_0959;Clade II)__AVV65099__GPCmut7 (opt1)
aggagagucccgcagucggcguccagcggcucugcuuguucgugugugugucguugcaggccuuauucaagcuuaccaugggccagaucaucaccuucuuccaggaggugccccacgucaucgaggaggugaugaacaucgugcugaucgcccucagccugcuggccauccucaaggggaucuacaacgucgugaccugcggccuguucgggcugguguccuuccuccugcugugcggccgcagcugcuccacgaccuacaagggggucuacgagcuccagacccuggagcuggacauggcgagccucaacaugaccaugccgcuguccugcacgaagaacaacagccaccacuacaucauggugggcaacgagaccggccuggagcucacccugaccaacacguccaucaucaaccacaaguucugcaaccugagcgacgcccacaagaagaaccucuacgaccacgcccugauguccaucaucagcaccuuccaccuguccauccccaacuucaaccaguacgaggccaugagcugcgacuucaacgggggcaagaucuccgugcaguacaaccucagccacgccuacgcgaucgacgccgccaaccacugcgggaccaucgccaacggcguccugcagaccuucaugcggauggcguggggcggguccuacaucgcccuggacagcggcaagggguccugggacugcaucaugacgagcuaccaguaccucaucauccagaacaccaccugggaggaccacugccaguucucccgccccagccccaucggcuaccuggggcugcucagccagcggacccgcgacaucuacaucucccggcgccugcugggcacguucaccuggacccucagcgacuccgagggcaacgagacccccgggggcuacugccugacgcgguggaugcugaucgaggccgagcucaagugcuucgggaacaccgccguggccaagugcaacgagaagcacgacgaggaguucugcgacaugcugcgccuguucgacuucaacaagcaggcgauccggcgccucaagacccccgcccagaugagcauccagcugaucaacaaggccgugaacgcccugaucaacgaccagcucaucaugaagaaccaccuccgggacaucaugggcaucccguacugcaacuacuccaaguacugcuaccugaaccacaccgucacggggaagaccagccugccccgcugcugccugguguccaacggcagcuaccugaacgagacccacuucuccgacgacaucgagcagcaggccgacaacaugaucaccgagcuccugcagaaggaguacaucgaccggcagggcaagacgccccuggggcucguggaccuguucgucuucagcaccuccuucuaccugaucagcaucuuccugcaccucgugaagaucccgacccaccgccacgugaucggcaagcccugccccaagccccaccggcugaaccacauggggaucugcuccugcggccuguacaagcacccggggguccccgugaaguggaagcgcugaggacuagucccuguucccagagcccacuuuuuuuucuuuuuuugaaauaaaauagccugucuuucagaucuaaaaaaaaaaaaaaaaaaaaaaaaaaaaaaaaaaaaaaaaaaaaaaaaaaaaaaaaaaaaaaaaaaaaaaaaaaaaaaaaaaaaaaaaaaaaaaaaaaaa

SEQ ID NO: 31859 - RNA, 1721 nt, Artificial Sequence
  mRNA product Design a-1 (A100) comprising derived and/or modified sequence from LASV(LASV003-NIG-2008;Clade II)__AIT17580__GPCmut7 (opt1)
aggagagucccgcagucggcguccagcggcucugcuuguucgugugugugucguugcaggccuuauucaagcuuaccaugggccagaucaucaccuucuuccaggaggugccccacgucaucgaggaggugaugaacaucgugcugaucgcccucagccugcuggccauccucaaggggaucuacaacgucgcgaccugcggccuguucgggcugguguccuuccuccugcugugcggccgcagcugcuccacgaccuacaaggggguguacgagcuccagacccuggagcuggacauggccagccucaacaugaccaugccgcuguccugcacgaagaacaacagccaccacuacaucauggucggcaacgagaccggccuggagcucacccugaccaacacguccaucaucaaccacaaguucugcaaccugagcgacgcccacaagaagaaccucuacgaccacgcccugauguccaucaucagcaccuuccaccuguccauccccaacuucaaccaguacgaggccaugagcugcgacuucaacgggggcaagaucuccgugcaguacaaccucagccacaccuacgcgguggacgccgccaaccacugcgggaccaucgccaacggcguccugcagacguucaugcggauggcguggggcggguccuacaucgcccuggacagcggcaagggguccugggacugcaucaugaccagcuaccaguaccucaucauccagaacaccaccugggaggaccacugccaguucucccgccccagccccaucggcuaccuggggcugcucagccagcggacgcgcgacaucuacaucucccggcgccugcugggcaccuucaccuggacccucagcgacuccgagagcaacgagacgccgggcggguacugccugacccgguggaugcugaucgaggccgagcucaagugcuucggcaacaccgccguggccaagugcaacgagaagcacgacgaggaguucugcgacaugcugcgccuguucgacuucaacaagcaggcgauccggcgccucaaggcccccgcccagauguccauccagcugaucaacaaggccgugaacgcccugaucaacgaccagcucaucaugaagaaccaccuccgggacaucauggggauccccuacugcaacuacagcaaguacugcuaccugaaccacaccgucacgggccgcaccucccugccccggugcugccuggugagcaacggguccuaccugaacgagacccacuucagcgacgacaucgagcagcaggcggacaacaugaucaccgagcuccugcagaaggaguacauggaccgccagggcaagacgccccugggccucguggaccuguucgucuucuccaccagcuucuaccugaucuccaucuuccugcaccucgugaagaucccgacccaccggcacgugaucgggaagcccugccccaagccccaccgccugaaccacaugggcaucugcagcugcgggcuguacaagcacccgggcguccccgugaaguggaagcggugaggacuagucccuguucccagagcccacuuuuuuuucuuuuuuugaaauaaaauagccugucuuucagaucuaaaaaaaaaaaaaaaaaaaaaaaaaaaaaaaaaaaaaaaaaaaaaaaaaaaaaaaaaaaaaaaaaaaaaaaaaaaaaaaaaaaaaaaaaaaaaaaaaaaa

SEQ ID NO: 31860 - RNA, 1721 nt, Artificial Sequence
  mRNA product Design a-1 (A100) comprising derived and/or modified sequence from LASV(LASV035-NIG-2009;Clade II)__AIT17588__GPCmut7 (opt1)
aggagagucccgcagucggcguccagcggcucugcuuguucgugugugugucguugcaggccuuauucaagcuuaccaugggccagaucaucaccuucuuccaggaggugccccacgucaucgaggaggugaugaacaucgugcugaucgcccucagccugcuggccauccucaaggggaucuacaacgucgcgaccugcggccuguucgggcugguguccuuccuccugcugugcggccgcagcugcuccacgaccuacaaggggguguacgagcuccagacccuggagcuggacauggccagccucaacaugaccaugccgcuguccugcacgaagaacaacagccaccacuacaucauggucggcaacgagaccggccuggagcucacccugaccaacacguccaucaucaaccacaaguucugcaaccugagcgacgcccacaagaagaaccucuacgaccacgcccugauguccaucaucagcaccuuccaccuguccauccccaacuucaaccaguacgaggccaugagcugcgacuucaacgggggcaagaucuccgugcaguacaaccucagccacgcguacgccguggacgccgccaaccacugcgggaccaucgcgaacggcguccugcagaccuucaugcggauggccuggggcggguccuacaucgcccuggacagcggcaagggguccugggacugcaucaugacgagcuaccaguaccucaucauccagaacaccaccugggaggaccacugccaguucucccgccccagccccaucggcuaccuggggcugcucagccagcggacccgcgacaucuacaucucccggcgccugcugggcacguucaccuggacccucagcgacuccgagggcaacgagacccccgggggcuacugccugacgcgguggaugcugaucgaggccgagcucaagugcuucgggaacaccgccguggcgaagugcaacgagaagcacgacgaggaguucugcgacaugcugcgccuguucgacuucaacaagcaggccauccggcgccucaaggcccccgcccagaugagcauccagcugaucaacaaggccgugaacgcgcugaucaacgaccagcucaucaugaagaaccaccuccgggacaucaugggcauccccuacugcaacuacuccaaguacugcuaccugaaccacaccgucaccgggaagacgagccugccccgcugcugccugguguccaacggcagcuaccugaacgagacccacuucuccgacgacaucgagcagcaggccgacaacaugaucaccgagcuccugcagaaggaguacaucgaccggcagggcaagaccccgcuggggcucguggaccuguucgucuucagcacguccuucuaccugaucagcaucuuccugcaccucgugaagaucccgacccaccgccacgugaucggcaagcccugccccaagccccaccggcugaaccacauggggaucugcuccugcggccuguacaagcacccggggguccccgugaaguggaagcgcugaggacuagucccuguucccagagcccacuuuuuuuucuuuuuuugaaauaaaauagccugucuuucagaucuaaaaaaaaaaaaaaaaaaaaaaaaaaaaaaaaaaaaaaaaaaaaaaaaaaaaaaaaaaaaaaaaaaaaaaaaaaaaaaaaaaaaaaaaaaaaaaaaaaaa

SEQ ID NO: 31861 - RNA, 1721 nt, Artificial Sequence
  mRNA product Design a-1 (A100) comprising derived and/or modified sequence from LASV(LASV1000-NIG-2009;Clade II)__AIT17782__GPCmut7 (opt1)
aggagagucccgcagucggcguccagcggcucugcuuguucgugugugugucguugcaggccuuauucaagcuuaccaugggccagaucaucaccuucuuccaggaggugccccacgucaucgaggaggugaugaacaucgugcugaucgcccucagccugcuggccauccucaaggggaucuacaacgucgcgaccugcggccuguucgggcugguguccuuccuccugcugugcggccgcagcugcuccacgaccuacaaggggguguacgagcuccagacccuggagcuggacauggccagccucaacaugaccaugccgcuguccugcacgaagaacaacagccaccacuacaucauggucggcaacgagaccggccuggagcucacccugaccaacacguccaucaucaaccacaaguucugcaaccugagcgacgcccacaagaagaaccucuacgaccacgcccugauguccaucaucagcaccuuccaccuguccauccccaacuucaaccaguacgaggccaugagcugcgacuucaacgggggcaagaucuccgugcaguacaaccucagccacaccuacgcgguggacgccgccaaccacugcgggaccaucgccaacggcguccugcagacguucaugcggauggcguggggcggguccuacaucgcccuggacagcggcaagggguccugggacugcaucaugaccagcuaccaguaccucaucauccagaacaccaccugggaggaccacugccaguucucccgccccagccccaucggcuaccuggggcugcucagccagcggacgcgcgacaucuacaucucccggcgccugcugggcaccuucaccuggacccucagcgacuccgagggcaacgagacgcccgggggcuacugccugacccgguggaugcugaucgaggccgagcucaagugcuucgggaacaccgccguggccaagugcaacgagaagcacgacgaggaguucugcgacaugcugcgccuguucgacuucaacaagcaggcgaucaagcggcucaagacccccgcccagaugagcauccagcugaucaacaaggccgugaacgcccugaucaacgaccagcucaucaugaagaaccaccuccgcgacaucaugggcauccccuacugcaacuacuccaaguacugcuaccugaaccacacggucaccgggaagaccagccugccccggugcugccugguguccaacggcagcuaccugaacgagacccacuucuccgacgacaucgagcagcaggccgacaacaugaucacggagcuccugcagaaggaguacaucgaccgccagggcaagaccccgcuggggcucguggaccuguucgucuucagcaccuccuucuaccugaucagcaucuuccugcaccucgugaagaucccgacccaccggcacguggucggcaagcccugccccaagccccaccgccugaaccacauggggaucugcuccugcggccuguacaagcacccgggggugcccgugaaguggaagcggugaggacuagucccuguucccagagcccacuuuuuuuucuuuuuuugaaauaaaauagccugucuuucagaucuaaaaaaaaaaaaaaaaaaaaaaaaaaaaaaaaaaaaaaaaaaaaaaaaaaaaaaaaaaaaaaaaaaaaaaaaaaaaaaaaaaaaaaaaaaaaaaaaaaaa

SEQ ID NO: 31862 - RNA, 1721 nt, Artificial Sequence
  mRNA product Design a-1 (A100) comprising derived and/or modified sequence from LASV(LASV221-NIG-2010;Clade II)__AIT17624__GPCmut7 (opt1)
aggagagucccgcagucggcguccagcggcucugcuuguucgugugugugucguugcaggccuuauucaagcuuaccaugggccagaucaucaccuucuuccaggaggugccccacgucaucgaggaggugaugaacaucgugcugaucgcccucagccugcuggccauccucaaggggaucuacaacgucgcgaccugcggccuguucgggcugguguccuuccuccugcugugcggccgcagcugcuccacgaccuacaaggggguguacgagcuccagacccuggagcuggacauggccagccucaacaugaccaugccgcuguccugcacgaagaacaacagccaccacuacaucauggucggcaacgagaccggccuggagcucacccugaccaacacguccaucaucaaccacaaguucugcaaccugagcgacgcccacaagaagaaccucuacgaccacgcccugauguccaucaucagcaccuuccaccuguccauccccaacuucaaccaguacgaggccaugagcugcgacuucaacgggggcaagaucuccgugcaguacaaccucagccacaccuacgcgaucgacgccgccaaccacugcgggaccaucgccaacggcgugcugcagacguucaugcggauggcguggggcggguccuacaucgcccuggacagcggcaagggguccugggacugcaucaugaccagcuaccaguaccucaucauccagaacaccaccugggaggaccacugccaguucucccgccccagccccaucggcuaccuggggcugcucagccagcggacgcgcgacaucuacaucucccggcgccugcugggcaccuucaccuggacccucagcgacuccgagggcaacgagacgcccgggggcuacugccugacccgguggaugcugaucgaggccgagcucaagugcuucgggaacaccgccgucgccaagugcaacgagaagcacgacgaggaguucugcgacaugcugcgccuguucgacuucaacaagcaggcgauccggcgccucaagacccccgcccagaugagcauccagcugaucaacaaggccgugaacgcccugaucaacgaccagcucaucaugaagaaccaccuccgggacaucaugggcauccccuacugcaacuacuccaaguacugcuaccugaaccacacggugaccgggaagaccagccugccccgcugcugccuggucuccaacggcagcuaccugaacgagacccacuucuccgacgacaucgagcagcaggccgacaacaugaucacggagaugcuccagaaggaguacauggaccggcagggcaagaccccgcuggggcugguggaccucuucguguucagcaccuccuucuaccugaucagcaucuuccugcaccuggucaagaucccgacccaccgccacgugaucggcaagcccugccccaagccccaccggcucaaccacauggggaucugcuccugcggccuguacaagcacccgggggugcccgucaaguggaagcgcugaggacuagucccuguucccagagcccacuuuuuuuucuuuuuuugaaauaaaauagccugucuuucagaucuaaaaaaaaaaaaaaaaaaaaaaaaaaaaaaaaaaaaaaaaaaaaaaaaaaaaaaaaaaaaaaaaaaaaaaaaaaaaaaaaaaaaaaaaaaaaaaaaaaaa

SEQ ID NO: 31863 - RNA, 1721 nt, Artificial Sequence
  mRNA product Design a-1 (A100) comprising derived and/or modified sequence from LASV(LASV237-NIG-2010;Clade II)__AIT17638__GPCmut7 (opt1)
aggagagucccgcagucggcguccagcggcucugcuuguucgugugugugucguugcaggccuuauucaagcuuaccaugggccagaucaucaccuucuuccaggaggugccccacgucaucgaggaggugaugaacaucgugcugaucgcccucagccugcuggccauccucaaggggaucuacaacgucgcgaccugcggccuguucgggcugguguccuuccuccugcugugcggccgcagcugcuccacgaccuacaaggggguguacgagcuccagacccuggagcuggacauggccagccucaacaugaccaugccgcuguccugcacgaagaacaacagccaccacuacaucauggucggcaacgagaccggccuggagcucacccugaccaacacguccaucaucaaccacaaguucugcaaccugagcgacgcccacaagaaggaccucuacgaccacgcccugauguccaucaucagcaccuuccaccuguccauccccaacuucaaccaguacgaggccaugagcugcgacuucaacgggggcaagaucuccgugcaguacaaccucagccacaccuacgcgguggacgccgccaaccacugcgggaccaucgccaacggcguccugcagacguucaugcggauggcguggggcggguccuacaucgcccuggacagcggcaagggguccugggacugcaucaugaccagcuaccaguaccucaucauccagaacaccaccugggaggaccacugccaguucucccgccccagccccaucggcuaccuggggcugcucagccagcggacgcgcgacaucuacaucucccggcgccugcugggcaccuucaccuggacccucagcgacuccgagggcaacgagacgcccgggggcuacugccugacccgguggaugcugaucgaggccgagcucaagugcuucgggaacaccgccguggccaagugcaacgagaagcacgacgaggaguucugcgacaugcugcgccuguucgacuucaacaagcaggcgauccggcgccucaagacccccgcccagaugagcauccagcugaucaacaaggccgugaacgcccugaucaacgaccagcucaucaugaagaaccaccuccgggacaucaugggcauccccuacugcaacuacuccaaguacugcuaccugaaccacacggucaccgggaagaccagccugccccgcugcugccugguguccaacggcagcuaccugaacgagacccacuucuccgacgacaucgagcagcaggccgacaacaugaucacggagcuccugcagaaggaguacauggaccggcagggcaagaccccgcuggggcucguggaccuguucgucuucagcaccuccuucuaccugaucagcaucuuccugcaccucaucaagaucccgacccaccgccacaucacgggcaagcccugccccaagccccaccggcugaaccacauggggaucugcuccugcggccuguacaagcacccgggggugcccgugaaguggaagcgcugaggacuagucccuguucccagagcccacuuuuuuuucuuuuuuugaaauaaaauagccugucuuucagaucuaaaaaaaaaaaaaaaaaaaaaaaaaaaaaaaaaaaaaaaaaaaaaaaaaaaaaaaaaaaaaaaaaaaaaaaaaaaaaaaaaaaaaaaaaaaaaaaaaaaa

SEQ ID NO: 31864 - RNA, 1721 nt, Artificial Sequence
  mRNA product Design a-1 (A100) comprising derived and/or modified sequence from LASV(LASV253-NIG-2011;Clade II)__AIT17670__GPCmut7 (opt1)
aggagagucccgcagucggcguccagcggcucugcuuguucgugugugugucguugcaggccuuauucaagcuuaccaugggccagaucaucaccuucuuccaggaggugccccacgucaucgaggaggugaugaacaucgugcugaucgcccucagccugcuggccauccucaaggggaucuacaacgucgcgaccugcggccuguucgggcugguguccuuccuccugcugugcggccgcagcugcuccacgaccuacaaggggguguacgagcuccagacccuggagcuggacauggccagccucaacaugaccaugccgcuguccugcacgaagaacaacagccaccacuacaucauggucggcaacgagaccggccuggagcucacccugaccaacacguccaucaucaaccacaaguucugcaaccugagcgacgcccacaagaagaaccucuacgaccacgcccugauguccaucaucagcaccuuccaccuguccauccccaacuucaaccaguacgaggccaugagcugcgacuucaacgggggcaagaucuccgugcaguacaaccucagccacaccuacgcgguggacgccgccaaccacugcgggaccaucgccaacggcguccugcagacguucaugcggauggcguggggcggguccuacaucgcccuggacagcggcaagggguccugggacugcaucaugaccagcuaccaguaccucaucauccagaacaccaccugggaggaccacugccaguucucccgccccagccccaucggcuaccuggggcugcucagccagcggacgcgcgacaucuacaucucccggcgccugcugggcaccuucaccuggacccucagcgacuccgagggcaacgagacgcccgggggcuacugccugacccgguggaugcugaucgaggccgagcucaagugcuucgggaacaccgccguggccaagugcaacgagaagcacgacgaggaguucugcgacaugcugcgccuguucgacuucaacaagcaggcgauccggcgccucaaggcccccgcccagaugagcauccagcugaucaacaaggccgugaacgcccugaucaacgaccagcucaucaugaagaaccaccuccgggacaucaugggcaucccguacugcaacuacuccaaguacugcuaccugaaccacaccgucacggggcgcaccagccugccccggugcugccugguguccaacggcagcuaccugaacgagacccacuucuccgacgacaucgagcagcaggcggacaacaugaucaccgagcuccugcagaaggaguacaucgaccgccagggcaagacgccccuggggcucguggaccuguucgucuucagcaccuccuucuaccugaucagcaucuuccugcaccucgugaagaucccgacccaccggcacaucaucggcaagcccugccccaagccccaccgccugaaccacauggggaucugcuccugcggccuguacaagcacccgggggugcccgucaaguggaagcggugaggacuagucccuguucccagagcccacuuuuuuuucuuuuuuugaaauaaaauagccugucuuucagaucuaaaaaaaaaaaaaaaaaaaaaaaaaaaaaaaaaaaaaaaaaaaaaaaaaaaaaaaaaaaaaaaaaaaaaaaaaaaaaaaaaaaaaaaaaaaaaaaaaaaa

SEQ ID NO: 31865 - RNA, 1721 nt, Artificial Sequence
  mRNA product Design a-1 (A100) comprising derived and/or modified sequence from LASV(LASV254-NIG-2011;Clade II)__AIT17674__GPCmut7 (opt1)
aggagagucccgcagucggcguccagcggcucugcuuguucgugugugugucguugcaggccuuauucaagcuuaccaugggccagaucaucaccuucuuccaggaggugccccacgucaucgaggaggugaugaacaucgugcugaucgcccucagccugcuggccauccucaaggggaucuacaacgucgcgaccugcggccuguucgggcugguguccuuccuccugcugugcggccgcagcugcuccacgaccuacaaggggguguacgagcuccagacccuggagcuggacaugaccaaccucaacaugacgaugccgcugagcugcaccaagaacaacucccaccacuacaucauggucggcaacgagaccggccuggagcucacccugacgaacaccagcaucaucaaccacaaguucugcaaccuguccgacgcccacaagaagaaccucuacaaccacgcccugaugagcaucaucuccaccuuccaccugagcauccccaacuucaaccaguacgaggccauguccugcgacuucaacgggggcaagaucagcgugcaguacaaccucucccacagcuacgccguggacgcggccaaccacugcgggaccaucgccaacggcguccugcagacguucaugcggauggccuggggcggguccuacaucgcgcuggacagcggcaaggggaacugggacugcaucaugaccuccuaccaguaccucaucauccagaacaccaccugggaggaccacugccaguucagccgccccucccccaucggcuaccuggggcugcucagccagcggacgcgcgacaucuacaucagccggcgccugcugggcaccuucaccuggacccucuccgacagcgagggcaacgagacgcccgggggcuacugccugacccgguggaugcugaucgaggccgagcucaagugcuucgggaacaccgccguggccaagugcaacgagaagcacgacgaggaguucugcgacaugcugcgccuguucgacuucaacaagcaggccauccggcgccucaagacccccgcgcaggccaacauccagcugaucaacaaggccgugaacgcccugaucaacgaccagcucaucaugaagaaccaccuccgggacaucaugggcauccccuacugcaacuacuccaaguacugcuaccugaaccacacggucaccgggaagaccagccugccccgcugcugccugguguccaacggcagcuaccugaacgagacccacuucuccgacgacaucgagcagcaggccgacaacaugaucacggagcuccugcagaaggaguacauggaccggcagggcaagaccccgcuggggcucguggaccuguucgucuucagcaccuccuucuaccugaucagcaucuuccugcaccucgugaagaucccgacccaccgccacgugaucggcaagcccugccccaagccccaccggcugaaccacauggggaucugcuccugcggccuguacaagcacccggggguccccgugaaguggaagcgcugaggacuagucccuguucccagagcccacuuuuuuuucuuuuuuugaaauaaaauagccugucuuucagaucuaaaaaaaaaaaaaaaaaaaaaaaaaaaaaaaaaaaaaaaaaaaaaaaaaaaaaaaaaaaaaaaaaaaaaaaaaaaaaaaaaaaaaaaaaaaaaaaaaaaa

SEQ ID NO: 31866 - RNA, 1721 nt, Artificial Sequence
  mRNA product Design a-1 (A100) comprising derived and/or modified sequence from LASV(Nig08-A19;Clade III)__ADU56618__GPCmut7 (opt1)
aggagagucccgcagucggcguccagcggcucugcuuguucgugugugugucguugcaggccuuauucaagcuuaccaugggccagaucgugaccuucuuccaggaggucccccacgugaucgaggaggugaugaacaucguccugaucgcccucagcauccuggccauccugaaggggcucuacaacaucgcgaccugcggccugaucgggcuggugacguuccuccugcuguccggccgcagcugcuccaugaccuacaaggggguguacgagcuccagacccuggagcugaacaugaacacccucaacaugacgaugccgcugagcugcaccaagaacaacucccaccacuacaucauggucggcaacgagaccggccuggagcucacccugacgaacaccagccugcuccaccacaaguucugcaaccuguccgacgcccacaagaagaaccuguacgaccacacccucaugagcaucaucuccaccuuccaccugagcauccccaacuucaaccaguacgaggccauguccugcgacuucaacgggggcaagaucacggugcaguacaaccugagccacuccuacgccaucgacgccgcgaaccacugcgggaccguggccaacggcguccuccagaccuucaugcggauggccuggggcgggagcuacaucgcccuggacuccggccgcgggaagugggacugcaucaugaccagcuaccaguaccugaucauccagaacacgaccugggaggaccacugccaguucucccggcccagccccaucggcuaccucgggcugcugucccagcgcacccgggacaucuacaucagccgccggcuccugggcaccuucacguggacccugagcgacuccgagggcaacgagacccccgggggcuacugccucacccgcuggaugcugaucgaggcggagcugaagugcuucgggaacacggccguggccaagugcaacgagaagcacgacgaggaguucugcgacaugcuccggcuguucgacuucaacaagcaggccauccgccggcugaaggcccccgcgcagaugagcauccagcucaucaacaaggccgugaacgcccugaucaacgaccagcugaucaugaagaaccaccuccgcgacaucaugggcauccccuacugcaacuacuccaaguacugcuaccugaaccacaccagcaccgggcggaccucccugccccgcugcugccucgucagcaacggcuccuaccugaacgagacgcacuucagcgacgacaucgagcagcaggccgacaacaugaucaccgagaugcugcagaaggaguaccucgaccggcagggcaagaccccgcuggggcugguggaccuguucguguucuccaccagcuucuaccucaucuccaucuuccugcaccuggucaagaucccgacgcaccgccacaucgugggcaagcccugccccaagccccaccggcucaaccacauggggaucugcagcugcggccuguacaagcagccgggggugcccguccgcuggaagcggugaggacuagucccuguucccagagcccacuuuuuuuucuuuuuuugaaauaaaauagccugucuuucagaucuaaaaaaaaaaaaaaaaaaaaaaaaaaaaaaaaaaaaaaaaaaaaaaaaaaaaaaaaaaaaaaaaaaaaaaaaaaaaaaaaaaaaaaaaaaaaaaaaaaaa

SEQ ID NO: 31867 - RNA, 1724 nt, Artificial Sequence
  mRNA product Design a-1 (A100) comprising derived and/or modified sequence from LASV(G1180-SLE-2010;Clade IV)__AIT17168__GPCmut7 (opt1)
aggagagucccgcagucggcguccagcggcucugcuuguucgugugugugucguugcaggccuuauucaagcuuaccaugggccagaucgugaccuucuuccaggaggucccccacgugaucgaggaggugaugaacaucguccugaucgcccucagcauccuggccgugcugaaggggcucuacaacuucgcgaccugcggccugguggggcugcucaccuuccugcugcucugcggccgcuccugcaccgccagccgguacaagggggucuacgagcugcagacccuggagcucaacauggagacccugaacaugacgaugccgcuguccugcaccaagaacaacagccaccacuacaucauggugggcaacgagaccggccucgagcugacccugacgaacaccuccaucaucaaccacaaguucugcaaccucagcgacgcccacaagaagaaccuguacgaccacgcccugauguccaucaucagcaccuuccaccucuccauccccaacuucaaccaguacgaggccaugagcugcgacuucaacgggggcaagaucuccgugcaguacaaccugagccacuccuacgcgggggacgccgccaaccacugcggcaccgucgccaacggggugcugcagacguucaugcgcauggcguggggcggcagcuacaucgcccucgacuccgggcacggcagcugggacugcaucaugaccuccuaccaguaccugaucauccagaacaccaccugggaggaccacugccaguucagccggcccucccccaucggguaccugggccuccugagccagcgcacgcgggacaucuacaucagccgccggcugcucggcaccuucaccuggacccuguccgacagcgaggggaaggacacgccgggcggguacugccugacccgcuggaugcucaucgaggccgagcugaagugcuucggcaacaccgccguggccaagugcaacgagaagcacgacgaggaguucugcgacaugcugcggcuguucgacuucaacaagcaggcgauccagcgccugaaggcccccgcccagauguccauccagcugaucaacaaggccgucaacgcccucaucaacgaccagcugaucaugaagaaccaccuccgggacaucauggggauccccuacugcaacuacagcaaguacugcuaccucaaccacaccacgaccggcaagaccucccugcccaagugcugccuggugagcaacggcuccuaccucaacgagacccacuucagcgacgacaucgagcagcaggcggacaacaugaucacggagaugcugcagaaggaguacauggagcgccaggggaagacgccccugggccucguggaccuguucgucuucuccaccagcuucuaccugaucuccaucuuccugcaccucgugaagaucccgacccaccggcacaucgugggcaagagcugccccaagccccaccgccugaaccacauggggaucugcuccugcgggcuguacaagcagcccggcgucccggugaaguggaagcggugaggacuagucccuguucccagagcccacuuuuuuuucuuuuuuugaaauaaaauagccugucuuucagaucuaaaaaaaaaaaaaaaaaaaaaaaaaaaaaaaaaaaaaaaaaaaaaaaaaaaaaaaaaaaaaaaaaaaaaaaaaaaaaaaaaaaaaaaaaaaaaaaaaaaa

SEQ ID NO: 31868 - RNA, 1724 nt, Artificial Sequence
  mRNA product Design a-1 (A100) comprising derived and/or modified sequence from LASV(G1442-SLE-2011;Clade IV)__AIT17180__GPCmut7 (opt1)
aggagagucccgcagucggcguccagcggcucugcuuguucgugugugugucguugcaggccuuauucaagcuuaccaugggccagaucgugaccuucuuccaggaggucccccacgugaucgaggaggugaugaacaucguccugaucgcccucagcauccuggccgugcugaaggggcucuacaacguggcgaccugcggccugaucgggcuggucacguuccuccugcugugcggccgcuccugcaccaccacccucuacaaggggguguacgagcugcagacgcuggagcucaacauggagacccugaacaugaccaugccgcugagcugcaccaagaacaacucccaccacuacauccgggugggcaacgagacgggccucgagcugacccugaccaacaccagcaucaucaaccacaaguucugcaaccucuccgacgcccacaagaagaaccuguacgaccacgcccugaugagcaucaucuccacguuccaccucagcauccccaacuucaaccaguacgaggccauguccugcgacuucaacgggggcaagaucagcguccaguacaaccugucccacagcuacgccggggacgcggccaaccacugcggcaccguggccaacggggugcugcagaccuucaugcgcauggccuggggcggcuccuacaucgcgcucgacagcgggcggggcaacugggacugcaucaugaccuccuaccaguaccugaucauccagaacacgaccugggacgaccacugccaguucagccgccccucccccaucggguaccugggccuccugagccagcggacccgcgacgucuacaucucccggcgccugcucggcaccuucacguggacccugagcgacagcgaggggaaggacaccccgggcggguacugccugacccgguggaugcucaucgaggccgagcugaagugcuucggcaacacggccguggccaagugcaacgagaagcacgacgaggaguucugcgacaugcugcgccucuucgacuucaacaagcaggccauccagcggcugaaggcgcccgcccagauguccauccagcugaucaacaaggccgugaacgcccucaucaacgaccagcugaucaugaagaaccaccuccgcgacaucauggggauccccuacugcaacuacagcaaguacugcuaccugaacaacaccgccaccggcaagaccucccugcccaagugcugccugaucagcaacggcuccuaccucaacgagacgcacuucagcgacgacaucgagcaggaggcggacaacaugaucaccgagaugcugcagaaggaguacauggagcggcaggggaagacgccccugggccucgucgaccuguucguguucuccaccagcuucuaccugaucuccaucuuccugcaccucgugaagaucccgacccaccgccacaucgucggcaagagcugccccaagccccaccggcugaaccacauggggaucugcuccugcgggcuguacaagcagcccggcgugccggugcgcuggaagcggugaggacuagucccuguucccagagcccacuuuuuuuucuuuuuuugaaauaaaauagccugucuuucagaucuaaaaaaaaaaaaaaaaaaaaaaaaaaaaaaaaaaaaaaaaaaaaaaaaaaaaaaaaaaaaaaaaaaaaaaaaaaaaaaaaaaaaaaaaaaaaaaaaaaaa

SEQ ID NO: 31869 - RNA, 1724 nt, Artificial Sequence
  mRNA product Design a-1 (A100) comprising derived and/or modified sequence from LASV(G3010-SLE-2013;Clade IV)__AIT17344__GPCmut7 (opt1)
aggagagucccgcagucggcguccagcggcucugcuuguucgugugugugucguugcaggccuuauucaagcuuaccaugggccagaucgugaccuucuuccaggaggucccccacgugaucgaggaggugaugaacaucguccugaucgcccucagcauccuggccgugcugaaggggcucuacaacuucgcgaccugcggccugguggggcuggucacguuccuccugcugugcggccgcuccugcaccaccagccucuacaaggggguguacgagcugcagacccuggagcucaacauggagacgcugaacaugaccaugccgcuguccugcaccaagaacaacagccaccacuacaucauggugggcaacgagaccggccucgagcugacgcugaccaacaccuccaucaucaaccacaaguucugcaaccucagcgacgcccacaagaagaaccuguacaaccacgcccugauguccaucaucagcaccuuccaccucuccauccccaacuucaaccaguacgaggccaugagcugcgacuucaacgggggcaagaucuccguccaguacaaccugagccacuccuacgccggggacgcggccagccacugcggcacgguggccaacggggugcugcagaccuucaugcggauggccuggggcggcuccuacaucgcgcucgacagcggguacggcaagugggacugcaucaugaccuccuaccaguaccugaucauccagaacaccacgugggaggaccacugccaguucagccgccccucccccaucggguaccugggccuccugagccagcggacccgcgacaucuacaucagccggcgccugcucggcaccuucaccuggacgcuguccgacagcgaggggaaggacaccccgggcggguacugccugacccgguggaugcucaucgaggccgagcugaagugcuucggcaacaccgccgucgccaagugcaacgagaagcacgacgaggaguucugcgacaugcugcgccucuucgacuucaacaagcaggccauccagcggcugaagacgcccgcgcagauguccauccagcugaucaacaaggccgugaacgcccucaucaacgaccagcugaucaugaagaaccaccuccgcgacaucauggggauccccuacugcaacuacagcaaguacugcuaccugaaccacaccaccaccggcaagacgucccugcccaagugcugccuggugagcaacggcuccuaccucaacgagacccacuucagcgacgacaucgagcagcaggccgacaacaugaucaccgagaugcugcagaaggaguacauggagcggcaggggaagacgccccugggccucgucgaccuguucguguucuccaccagcuucuaccugaucuccaucuuccugcaccucgugaagaucccgacccaccgccacaucgucggcaagagcugccccaagccccaccggcugaaccacauggggaucugcuccugcgggcuguacaagcagcccggcgugccggugcgcuggaagcggugaggacuagucccuguucccagagcccacuuuuuuuucuuuuuuugaaauaaaauagccugucuuucagaucuaaaaaaaaaaaaaaaaaaaaaaaaaaaaaaaaaaaaaaaaaaaaaaaaaaaaaaaaaaaaaaaaaaaaaaaaaaaaaaaaaaaaaaaaaaaaaaaaaaaa

SEQ ID NO: 31870 - RNA, 1724 nt, Artificial Sequence
  mRNA product Design a-1 (A100) comprising derived and/or modified sequence from LASV(G502-SLE-2009;Clade IV)__AIT17126__GPCmut7 (opt1)
aggagagucccgcagucggcguccagcggcucugcuuguucgugugugugucguugcaggccuuauucaagcuuaccaugggccagaucgugaccuucuuccaggaggucccccacgugaucgaggaggugaugaacaucguccugaucgcccucagcauccuggccgugcugaaggggcucuacaacuucgcgaccugcggccugguggggcugcucacguuccugcugcucugcggccgcuccugcaccaccgggcuguacaagggcgucuacgagcugcagacccucgagcugaacauggagacgcugaacaugaccaugccgcucagcugcaccaagaacaacucccaccacuacaucauggugggcaacgagaccgggcuggagcugacgcucaccaacaccagcaucaucaaccacaaguucugcaaccuguccgacgcccacaagaagaaccuguacgaccacgcccucaugagcaucaucuccaccuuccaccugagcauccccaacuucaaccaguacgaggccauguccugcgacuucaacggcgggaagaucagcgugcaguacaaccugucccacagcuacgccggcgacgcggccgaccacugcgggacggucgccaacggcgugcuccagaccuucaugcggauggccuggggcggguccuacaucgcgcuggacagcggccgcgggcggugggacugcaucaugaccuccuaccaguaccugaucauccagaacaccacgugggaggaccacugccaguucagccgccccucccccaucggcuaccucggccugcugagccagcggacccgcgacaucuacaucucccggcgccuccuggggaccuucaccuggacgcugagcgacagcgagggcaaggacacccccgggggcuacugccucacccgguggaugcugaucgaggccgagcugaagugcuucgggaacaccgccguggccaagugcaacgagaagcacgacgaggaguucugcgacaugcuccgccuguucgacuucaacaagcaggccauccagcggcugaaggcgcccgcccagauguccauccagcucaucaacaaggccgucaacgcccugaucaacgaccagcuggugaugaagaaccaccuccgcgacaucaugggcauccccuacugcaacuacagccgguacugcuaccugaaccacacgaccaccggccgcaccucccugcccaagugcugccucgugagcaacggguccuaccugaacgagacgcacuucagcgacgacaucgagcagcaggccgacaacaugaucaccgagaugcugcagaaggaguacauggagcggcagggcaagaccccgcucgggcuggucgaccuguucguguucuccaccagcuucuaccugaucuccaucuuccuccaccuggugaagaucccgacgcaccgccacaucgucggcaagagcugccccaagccccaccggcugaaccacauggggaucugcuccugcggccucuacaagcagcccggcgugccggugaaguggaagcgcugaggacuagucccuguucccagagcccacuuuuuuuucuuuuuuugaaauaaaauagccugucuuucagaucuaaaaaaaaaaaaaaaaaaaaaaaaaaaaaaaaaaaaaaaaaaaaaaaaaaaaaaaaaaaaaaaaaaaaaaaaaaaaaaaaaaaaaaaaaaaaaaaaaaaa

SEQ ID NO: 31871 - RNA, 1724 nt, Artificial Sequence
  mRNA product Design a-1 (A100) comprising derived and/or modified sequence from LASV(G733-SLE-2010;Clade IV)__AIT17154__GPCmut7 (opt1)
aggagagucccgcagucggcguccagcggcucugcuuguucgugugugugucguugcaggccuuauucaagcuuaccaugggccagaucgugaccuucuuccaggaggucccccacgugaucgaggaggugaugaacaucguccugaucgcccucagcauccuggccgugcugaaggggcucuacaacuucgcgaccugcggcaucguggggcuggucuccuuccugcuccugugcggccgcagcugcacgaccucccuguacaaggggguguacgagcuccagacccuggagcugaacauggagacccucaacaugacgaugccgcugagcugcaccaagaacaacucccaccacuacaucauggugggcaacgagaccggccuggagcucacccugacgaacaccagcaucaucaaccacaaguucugcaaccuguccgacgcccacaagaagaaccucuacgaccacgcccugaugagcaucaucuccaccuuccaccugagcauccccaacuucaaccaguacgaggccauguccugcgacuucaacgggggcaagaucagcguccaguacaaccucucccacagcuacgccggggacgcggccaaccacugcggcaccaucgccaacggggugcugcagacguucaugcggauggccuggggcggcuccuacaucgcgcuggacagcgggcgcgaccggugggacugcaucaugaccuccuaccaguaccucaucauccagaacaccaccugggaggaccacugccaguucagccgccccucccccaucggcuaccuggggcugcucagccagcggacgcgcgacaucuacaucagccggcgccugcugggcaccuucaccuggacccucuccgacagcgagggcaaggacacgcccgggggcuacugccugacccgguggaugcugaucgaggccgagcucaagugcuucgggaacaccgccguggccaagugcaacgagaagcacgacgaggaguucugcgacaugcugcgccuguucgacuucaacaagcaggccauccagcggcucaaggcgcccgcccagauguccauccagcugaucaacaaggccgucaacgcccugaucaacgaccagcucaucaugaagaaccaccuccgcgacaucaugggcauccccuacugcaacuacagcaaguacugcuaccugaaccacaccacgaccgggaagaccucccugcccaagugcugccuggugagcaacggcuccuaccugaacgagacccacuucagcgacgacaucgagcagcaggccgacaacaugaucacggagaugcuccagaaggaguacauggagcggcagggcaagaccccgcuggggcugguggaccucuucgucuucuccaccagcuucuaccugaucuccaucuuccugcaccuggugaagaucccgacccaccgccacguggucggcaagagcugccccaagccccaccggcucaaccacauggggaucugcuccugcggccuguacgggcagcccggcgugccggugaaguggaagcgcugaggacuagucccuguucccagagcccacuuuuuuuucuuuuuuugaaauaaaauagccugucuuucagaucuaaaaaaaaaaaaaaaaaaaaaaaaaaaaaaaaaaaaaaaaaaaaaaaaaaaaaaaaaaaaaaaaaaaaaaaaaaaaaaaaaaaaaaaaaaaaaaaaaaaa

SEQ ID NO: 31872 - RNA, 1724 nt, Artificial Sequence
  mRNA product Design a-1 (A100) comprising derived and/or modified sequence from MOPV/LASV reassortant(IGS-1;Clade IV)__AFY05576__GPCmut7 (opt1)
aggagagucccgcagucggcguccagcggcucugcuuguucgugugugugucguugcaggccuuauucaagcuuaccaugggccagaucgugaccuucuuccaggaggucccccacgugaucgaggaggugaugaacaucguccugaucgcccucagcgugcuggccgugcugaaggggcucuacaacuucgcgaccugcggccuggucgggcuggugacguuccuccugcugugcggccgcuccugcaccaccagccucuacaaggggguguacgagcugcagacccuggagcucaacauggagacgcugaacaugaccaugccgcuguccugcaccaagaacaacagccaccacuacaucauggucggcaacgagaccggccucgagcugacgcugaccaacaccuccaucaucaaccacaaguucugcaaccucagcgacgcccacaagaagaaccuguacgaccacgcccugauguccaucaucagcaccuuccaccucuccauccccaacuucaaccaguacgaggccaugagcugcgacuucaacgggggcaagaucuccgugcaguacaaccugagccacuccuacgccggggacgcggccaaccacugcggcacgguggccaacgggguccugcagaccuucaugcggauggccuggggcggcagcuacaucgcgcucgacuccgggcgcggcaacugggacugcaucaugaccagcuaccaguaccugaucauccagaacaccacgugggaggaccacugccaguucucccggcccagccccaucggguaccugggccuccugucccagcgcacccgggacaucuacaucagccgccggcugcucggcaccuucaccuggacgcugagcgacuccgagggggaggacaccccgggcggguacugccugacccgcuggaugcucaucgaggccgagcugaagugcuucggcaacaccgccguggccaagugcaacgagaagcacgacgaggaguucugcgacaugcugcggcuguucgacuucaacaagcaggccauccagcgccugaaggcgcccgcccagaugagcauccagcugaucaacaaggccgugaacgcccucaucaacgaccagcugaucaugaagaaccaccuccgggacaucauggggauccccuacugcaacuacuccaaguacugcuaccucaaccacacgaccaccggccgcaccagccugcccaagugcugccuggucuccaacggcagcuaccucaacgagacgcacuucuccgacgacaucgagcagcaggccgacaacaugaucaccgagaugcugcagaaggaguacauggagcggcaggggaagacgccccugggccucguggaccuguucguguucagcaccuccuucuaccugaucagcaucuuccugcaccucgucaagaucccgacccaccgccacaucguggggaaguccugccccaagccccaccggcugaaccacaugggcaucugcagcugcgggcuguacaagcagcccggcgugccggucaaguggaagcgcugaggacuagucccuguucccagagcccacuuuuuuuucuuuuuuugaaauaaaauagccugucuuucagaucuaaaaaaaaaaaaaaaaaaaaaaaaaaaaaaaaaaaaaaaaaaaaaaaaaaaaaaaaaaaaaaaaaaaaaaaaaaaaaaaaaaaaaaaaaaaaaaaaaaaa

SEQ ID NO: 31873 - RNA, 1724 nt, Artificial Sequence
  mRNA product Design a-1 (A100) comprising derived and/or modified sequence from LASV(LM765-SLE-2012;Clade IV)__AIT17814__GPCmut7 (opt1)
aggagagucccgcagucggcguccagcggcucugcuuguucgugugugugucguugcaggccuuauucaagcuuaccaugggccagaucgugaccuucuuccaggaggucccccacgugaucgaggaggugaugaacaucguccugaucgcccucagcauccuggccgugcugaaggggcucuacaacuucgcgaccugcggccugguggggcuggucacguuccuccugcugugcggccgcuccugcaccaccagccucuacaaggggguguacgagcugcagacccuggagcucaacauggagacgcugaacaugaccaugccgcuguccugcaccaagaacaacagccaccacuacaucauggugggcaacgagaccggccucgagcugacgcugaccaacaccuccaucaucgaccacaaguucugcaaccucagcgacgcccaccggaagaaccuguacgaccacgcccugauguccaucaucagcaccuuccaccucuccauccccaacuucaaccaguacgaggccaugagcugcgacuucaacgggggcaagaucuccguccaguacaaccugagccacuccuacgccaaggacgcggccgaccacugcgggacgguggccaacggcgugcugcagaccuucaugcgcauggccuggggcgggagcuacaucgcgcucgacuccggccgggggcgcugggacugcaucaugaccagcuaccaguaccugaucauccagaacaccacgugggaggaccacugccaguucucccggcccagccccaucggcuaccuggggcuccugucccagcgcacccgggacaucuacaucagccgccggcugcucggcaccuucaccuggacgcugagcgacuccgagggcaaggacacccccgggggcuacugccugacccgcuggaugcucaucgaggccgagcugaagugcuucgggaacaccgccgucgccaagugcaacgagaagcacgacgaggaguucugcgacaugcugcggcuguucgacuucaacaagcaggccauccagcgccugaaggcgcccgcccagaugagcauccagcugaucaacaaggccgugaacgcccucaucaacgaccagcugaucaugaagaaccaccuccgggacaucaugggcauccccuacugcaacuacuccaaguacugcuaccucaaccacacgaccaccgggaagaccagccugcccaagugcugccugguguccaacggcagcuaccucaacgagacgcacuucuccgacgacaucgagcagcaggccgacaacaugaucaccgagaugcugcagaaggaguacauggagcgccagggcaagaccccgcuggggcucgucgaccuguucguguucagcaccuccuucuaccugaucagcaucuuccugcaccucgugaagaucccgacgcaccggcacaucgucggcaagcccugccccaagccccaccgccugaaccacauggggaucugcuccugcggccuguacaagcagccgggggugcccgugaaguggaagcggugaggacuagucccuguucccagagcccacuuuuuuuucuuuuuuugaaauaaaauagccugucuuucagaucuaaaaaaaaaaaaaaaaaaaaaaaaaaaaaaaaaaaaaaaaaaaaaaaaaaaaaaaaaaaaaaaaaaaaaaaaaaaaaaaaaaaaaaaaaaaaaaaaaaaa

SEQ ID NO: 31874 - RNA, 1724 nt, Artificial Sequence
  mRNA product Design a-1 (A100) comprising derived and/or modified sequence from LASV(LM776-SLE-2012;Clade IV)__AIT17824__GPCmut7 (opt1)
aggagagucccgcagucggcguccagcggcucugcuuguucgugugugugucguugcaggccuuauucaagcuuaccaugggccagaucgugaccuucuuccaggaggucccccacgugaucgaggaggugaugaacaucguccugaucgcccucagcauccuggccgugcugaaggggcucuacaacuucgcgaccugcggccugguggggcuggucacguuccuccugcugugcggccgcuccugcaccaccagcguguacaaggggguguacgagcuccagacccuggagcugaacauggagacgcucaacaugaccaugccgcuguccugcaccaagaacaacagccaccacuacaucauggucggcaacgagaccggccuggagcucacgcugaccaacaccuccaucaucaaccacaaguucugcaaccugagcgacgcccacaagaagaaccucuacgaccacgcccugauguccaucaucagcaccuuccaccuguccauccccaacuucaaccaguacgaggccaugagcugcgacuucaacgggggcaagaucuccgugcaguacaaccucagccacuccuacgccggggacgcggccaaccacugcggcacgguggccaacgggguccugcagaccuucaugcggauggccuggggcggcagcuacaucgcgcuggacuccgggcacggcaagugggacugcaucaugaccagcuaccaguaccucaucauccagaacaccacgugggaggaccacugccaguucucccgccccagccccaucggguaccugggccugcucucccagcggacccgcgacaucuacaucagccggcgccugcugggcaccuucaccuggacgcucagcgacuccgaggggaaggacaccccgggcggguacugccugacccgguggaugcugaucgaggccgagcucaagugcuucggcaacaccgccguggccaagugcaacgagaagcacgacgaggaguucugcgacaugcugcgccuguucgacuucaacaagcaggccauccagcggcucaaggcgcccgcccagaugagcauccagcugaucaacaaggccgugaacgcccugaucaacgaccagcucaucaugaagaaccaccuccgcgacaucauggggauccccuacugcaacuacuccaaguacugcuaccugaaccacacgaccaccggcaagaccagccugcccaagugcugccuggucuccaacggcagcuaccugaacgagacgcacuucuccgacgacaucgagcagcaggccgacaacaugaucaccgagaugcuccagaaggaguacauggagcggcaggggaagacgccccugggccugguggaccucuucguguucagcaccuccuucuaccugaucagcaucuuccugcaccuggucaagaucccgacccaccgccacaucguggggaaguccugccccaagccccaccggcucaaccacaugggcaucugcagcugcgggcuguacaagcagcccggcgugccgguccgcuggaagcggugaggacuagucccuguucccagagcccacuuuuuuuucuuuuuuugaaauaaaauagccugucuuucagaucuaaaaaaaaaaaaaaaaaaaaaaaaaaaaaaaaaaaaaaaaaaaaaaaaaaaaaaaaaaaaaaaaaaaaaaaaaaaaaaaaaaaaaaaaaaaaaaaaaaaa

SEQ ID NO: 31875 - RNA, 1724 nt, Artificial Sequence
  mRNA product Design a-1 (A100) comprising derived and/or modified sequence from LASV(Mad39;Clade IV)__ANH09722__GPCmut7 (opt1)
aggagagucccgcagucggcguccagcggcucugcuuguucgugugugugucguugcaggccuuauucaagcuuaccaugggccagaucgugaccuucuuccaggaggucccccacgugaucgaggaggugaugaacaucguccugaucgcccucagcauccuggccgugcugaaggggcucuacaacguggcgaccugcggccugaucgggcuggucacguuccuccugcugugcggccgcuccugcaccaccacccucuacaaggggguguacgagcugcaggcccuggagcucaacauggagacgcugaacaugaccaugccgcugagcugcaccaagaacaacucccaccacuacauccgggugggcaacgagaccggccucgagcugacgcugaccaacaccagccucaucaaccacaaguucugcaaccuguccgacgcccacaagaagaaccuguacgaccacgcccucaugagcaucaucuccaccuuccaccugagcauccccaacuucaaccaguacgaggccauguccugcgacuucaacgacgggaagaucagcguccaguacaaccugucccacacguacgcgggcgacaccgccaaccacugcgggaccguggccaacggcgugcuccagaccuucaugcgcauggccuggggcgggagcuacaucgcgcuggacuccggccgcgggggcugggacugcaucaugacgagcuaccaguaccugaucauccagaacaccaccugggaggaccacugccaguucucccggcccagccccaucggguaccucggccugcugucccagcggacccgcgacaucuacaucagccggcgccuccugggcacguucaccuggacccuguccgacagcgaggggaaggacaccccgggcggguacugccucacgcgguggaugcugaucgaggccgagcugaagugcuucggcaacaccgccgucgccaagugcaacgagaagcacgacgaggaguucugcgacaugcuccgccuguucgacuucaacaagcaggccauccagcggcugaaggcgcccgcccagaugagcauccagcucaucaacaaggccgugaacgcccugaucaacgaccagcugaucaugaagaaccaccuccgcgacaucauggggauccccuacugcaacuacuccaaguacugcuaccugaaccacaccgugaccggcaagacgagccugcccaagugcugccucgucuccaacggcagcuaccugaacgagacccacuucuccgacgacaucgagcagcaggccgacaacaugaucaccgagaugcugcagaaggaguacauggagcggcaggggaagacgccccucggccugguggaccuguucguguucagcaccuccuucuaccugaucagcaucuuccuccaccuggucaagaucccgacccaccgccacgugguggggaagcccugccccaagccccaccggcugaaccacaugggcaucugcuccugcggguucuacaagcagccgggcguccccgugcgcuggaagcggugaggacuagucccuguucccagagcccacuuuuuuuucuuuuuuugaaauaaaauagccugucuuucagaucuaaaaaaaaaaaaaaaaaaaaaaaaaaaaaaaaaaaaaaaaaaaaaaaaaaaaaaaaaaaaaaaaaaaaaaaaaaaaaaaaaaaaaaaaaaaaaaaaaaaa

SEQ ID NO: 31876 - RNA, 1724 nt, Artificial Sequence
  mRNA product Design a-1 (A100) comprising derived and/or modified sequence from LASV(Z0947-SLE-2011;Clade IV)__AIT17840__GPCmut7 (opt1)
aggagagucccgcagucggcguccagcggcucugcuuguucgugugugugucguugcaggccuuauucaagcuuaccaugggccagaucgugaccuucuuccaggaggucccccacgugaucgaggaggugaugaacaucguccugaucgcccucagcauccuggccgugcugaaggggcucuacaacuucgcgaccugcggccugguggggcuggucacguuccuccugcugugcggccgcuccugcaccaucagccucuacaaggggguguacgagcugcagacccuggagcucaacauggagacccugaacaugacgaugccgcuguccugcaccaagaacaacagccaccacuacaucauggugggcaacgagaccggccucgagcugacccugacgaacaccuccaucaucaaccacaaguucugcaaccucagcgacgcccacaagaagaaccuguacgaccacgcccugauguccaucaucagcaccuuccaccucuccauccccaacuucaaccaguacgaggccaugagcugcgacuucaacgggggcaagaucuccguccaguacaaccugagccacuccuacgccggggacgcggccaaccacugcggcaccguggccaacggggugcugcagacguucaugcggauggccuggggcggcagcuacaucgcgcucgacuccgggcgcgaccggugggacugcaucaugaccagcuaccaguaccugaucauccagaacaccaccugggaggaccacugccaguucucccgccccagccccaucggcuaccuggggcuccugucccagcggacgcgcgacaucuacaucagccggcgccugcucggcaccuucaccuggacccugagcgacuccgagggcaaggacacgcccgggggcuacugccugacccgguggaugcucaucgaggccgagcugaagugcuucgggaacaccgccgucgccaagugcaacgagaagcacgacgaggaguucugcgacaugcugcgccucuucgacuucaacaagcaggccauccagcggcugaaggcgcccgcccagaugagcauccagcugaucaacaaggccgugaacgcccucaucaacgaccagcugaucaugaagaaccaccuccgcgacaucaugggcauccccuacugcaacuacuccaaguacugcuaccugaaccacaccacgaccgggaagaccagccugcccaagugcugccugguguccaacggcagcuaccucaacgagacccacuucuccgacgacaucgagcagcaggccgacaacaugaucacggagaugcugcagaaggaguacauggagcggcagggcaagaccccgcuggggcucgucgaccuguucguguucagcaccuccuucuaccugaucagcaucuuccugcaccucgugaagaucccgacccaccgccacaucgucggcaagcccugccccaagccccaccggcugaaccacauggggaucugcuccugcggccuguacaagcagccgggggugcccgugaaguggaagcgcugaggacuagucccuguucccagagcccacuuuuuuuucuuuuuuugaaauaaaauagccugucuuucagaucuaaaaaaaaaaaaaaaaaaaaaaaaaaaaaaaaaaaaaaaaaaaaaaaaaaaaaaaaaaaaaaaaaaaaaaaaaaaaaaaaaaaaaaaaaaaaaaaaaaaa

SEQ ID NO: 31877 - RNA, 1724 nt, Artificial Sequence
  mRNA product Design a-1 (A100) comprising derived and/or modified sequence from LASV(Josiah;Clade IV)__NP_694870__GPCmut7 (opt1)
aggagagucccgcagucggcguccagcggcucugcuuguucgugugugugucguugcaggccuuauucaagcuuaccaugggccagaucgugaccuucuuccaggaggucccccacgugaucgaggaggugaugaacaucguccugaucgcccucagcgugcuggccgugcugaaggggcucuacaacuucgcgaccugcggccuggucgggcuggugacguuccuccugcugugcggccgcuccugcaccaccagccucuacaaggggguguacgagcugcagacccuggagcucaacauggagacgcugaacaugaccaugccgcuguccugcaccaagaacaacagccaccacuacaucauggucggcaacgagaccggccucgagcugacgcugaccaacaccuccaucaucaaccacaaguucugcaaccucagcgacgcccacaagaagaaccuguacgaccacgcccugauguccaucaucagcaccuuccaccucuccauccccaacuucaaccaguacgaggccaugagcugcgacuucaacgggggcaagaucuccgugcaguacaaccugagccacuccuacgccggggacgcggccaaccacugcggcacgguggccaacgggguccugcagaccuucaugcggauggccuggggcggcagcuacaucgcgcucgacuccgggcgcggcaacugggacugcaucaugaccagcuaccaguaccugaucauccagaacaccacgugggaggaccacugccaguucucccggcccagccccaucggguaccugggccuccugucccagcgcacccgggacaucuacaucagccgccggcugcucggcaccuucaccuggacgcugagcgacuccgaggggaaggacaccccgggcggguacugccugacccgcuggaugcucaucgaggccgagcugaagugcuucggcaacaccgccguggccaagugcaacgagaagcacgacgaggaguucugcgacaugcugcggcuguucgacuucaacaagcaggccauccagcgccugaaggcgcccgcccagaugagcauccagcugaucaacaaggccgugaacgcccucaucaacgaccagcugaucaugaagaaccaccuccgggacaucauggggauccccuacugcaacuacuccaaguacugcuaccucaaccacacgaccaccggccgcaccagccugcccaagugcugccuggucuccaacggcagcuaccucaacgagacgcacuucuccgacgacaucgagcagcaggccgacaacaugaucaccgagaugcugcagaaggaguacauggagcggcaggggaagaccccgcugggccugguggaccucuucguguucagcaccuccuucuaccugaucagcaucuuccugcaccucgucaagauccccacgcaccgccacaucguggggaaguccugccccaagccccaccggcugaaccacaugggcaucugcagcugcgggcuguacaagcagccgggcgugcccgucaaguggaagcgcugaggacuagucccuguucccagagcccacuuuuuuuucuuuuuuugaaauaaaauagccugucuuucagaucuaaaaaaaaaaaaaaaaaaaaaaaaaaaaaaaaaaaaaaaaaaaaaaaaaaaaaaaaaaaaaaaaaaaaaaaaaaaaaaaaaaaaaaaaaaaaaaaaaaaa

SEQ ID NO: 31878 - RNA, 1721 nt, Artificial Sequence
  mRNA product Design a-1 (A100) comprising derived and/or modified sequence from LASV(LP;Clade I)__AAF86701__GPCmut7 (opt1)
aggagagucccgcagucggcguccagcggcucugcuuguucgugugugugucguugcaggccuuauucaagcuuaccaugggccagaucaucaccuucuuccaggaggugccccacgucaucgaggaggugaugaacaucgugcugaucgcccucagccugcuggccauccucaaggggcuguacaacaucgcgaccugcggcaucaucgggcuggucgccuuccucuuccugugcggcaaguccugcagccugacgcucaagggcggguacgagcugcagacccuggagcucaacauggagacccugaacaugaccaugccgcuguccugcacgaagaacagcucccaccacuacauccgcgugggcaacgagaccgggcucgagcugacccugaccaacacgagcaucaucaaccacaaguucugcaaccucuccgacgcccacaagaagaaccuguacgaccacgcccugaugagcaucaucuccaccuuccaccucagcauccccaacuucaaccaguacgaggccauguccugcgacuucaacggcgggaagaucagcgugcaguacaaccugucccacagcuacgcgggcgacgccgccgagcacugcgggaccgucgccaacggcgugcugcagaccuucaugcggauggcguggggcgggcgcuacaucgcccucgacuccggcaaggggaacugggacugcaucaugacgagcuaccaguaccugaucauccagaacaccaccugggaggaccacugccaguucucccggcccagccccaucggcuaccugggccuccugucccagcgcacccgggacaucuacaucagccgccggcugcucgggacguucaccuggacccugagcgacuccgagggcaacgagacccccgggggcuacugccugacgcgcuggaugcucaucgaggccgagcugaagugcuucgggaacaccgccguggccaagugcaacgagaagcacgacgaggaguucugcgacaugcugcggcuguucgacuucaacaagcaggcgauccgccggcugaaggccccggcccagaugagcauccagcugaucaacaaggccgucaacgcccucaucaacgaccagcugaucaugaagaaccaccuccgcgacaucaugggcauccccuacugcaacuacuccaaguacugcuaccucaaccacaccagcuccggccggaccagccugcccaagugcugccugaucuccaacgggagcuaccucaacgagacgcaguucuccgacgacaucgagcagcaggcggacaacaugaucaccgagaugcugcagaaggaguacaucgagcgccagggcaagaccccgcuggggcugguggacaucuucaucuucagcaccuccuucuaccucaucagcaucuuccugcaccugaucaagauccccacgcaccggcacaucgugggcaagcccugccccaagccgcaccgccucaaccacaugggggucugcuccugcggccuguacaagcaccccggcgugcccaccaaguggaagcggugaggacuagucccuguucccagagcccacuuuuuuuucuuuuuuugaaauaaaauagccugucuuucagaucuaaaaaaaaaaaaaaaaaaaaaaaaaaaaaaaaaaaaaaaaaaaaaaaaaaaaaaaaaaaaaaaaaaaaaaaaaaaaaaaaaaaaaaaaaaaaaaaaaaaa

SEQ ID NO: 31879 - RNA, 1721 nt, Artificial Sequence
  mRNA product Design a-1 (A100) comprising derived and/or modified sequence from LASV(803213;Clade II)__AAF86703__GPCmut7 (opt1)
aggagagucccgcagucggcguccagcggcucugcuuguucgugugugugucguugcaggccuuauucaagcuuaccaugggccagaucaucaccuucuuccaggaggugccccacgucaucgaggaggugaugaacaucgugcugaucgcccucagccugcuggccauccucaaggggaucuacaacgucgcgaccugcggccuguucgggcugaucuccuuccuccugcugugcggccgcagcugcuccgugacguacaaggggguguacgagcuccagacccuggagcugaacauggccaaccucaacaugaccaugccgcugagcugcaccaagaacaacucccaccacuacaucauggucggcaacgagacgggccuggagcucacccugaccaacaccagcaucaucaaccacaaguucugcaaccuguccgacgcccacaagaagaaccucuacgaccacgcccugaugagcaucaucuccacguuccaccugagcauccccaacuucaaccaguacgaggccauguccugcgacuucaacgggggcaagaucagcgugcaguacaaccucucccacagcuucgcgguggacgccgccaaccacugcgggaccaucgccaacggcguccugcagaccuucaugcggauggcguggggcggguccuacaucgcccuggacagcggcaaggggaacugggacugcaucaugaccuccuaccaguaccucaucauccagaacacgaccugggaggaccacugccaguucagccgccccucccccaucggcuaccuggggcugcucagccagcggacccgcgacaucuacaucagccggcgccugcugggcaccuucacguggacccucuccgacagcgagggcaacgaggcccccgggggcuacugccugacccgguggaugcugaucgaggccgagcucaagugcuucgggaacaccgccguggcgaagugcaacgagaagcacgacgaggaguucugcgacaugcugcgccuguucgacuucaacaagcaggccaucaagcggcucaagacgccggcccagauguccauccagcugaucaacaaggccgugaacgcccugaucaacgaccagcucaucaugaagaaccaccuccgcgacaucaugggcauccccuacugcaacuacagccgguacugcuaccugaaccacaccgucaccgggaagaccucccugccccgcugcugccuggugagcaacggcuccuaccugaacgagacgcacuucagcgacgacaucgagcagcaggcggacaacaugaucaccgagaugcuccagaaggaguacauggaccggcagggcaagaccccgcuggggcugguggaccuguucgucuucuccaccagcuucuaccucaucuccaucuuccugcaccuggugaagauccccacgcaccgccacaucgugggcaagcccugccccaagccgcaccggcucaaccacauggggaucugcagcugcggccuguacaagcaccccgggguccccgugaaguggaagcgcugaggacuagucccuguucccagagcccacuuuuuuuucuuuuuuugaaauaaaauagccugucuuucagaucuaaaaaaaaaaaaaaaaaaaaaaaaaaaaaaaaaaaaaaaaaaaaaaaaaaaaaaaaaaaaaaaaaaaaaaaaaaaaaaaaaaaaaaaaaaaaaaaaaaaa

SEQ ID NO: 31880 - RNA, 1721 nt, Artificial Sequence
  mRNA product Design a-1 (A100) comprising derived and/or modified sequence from LASV(GA391;Clade III)__CAA36645__GPCmut7 (opt1)
aggagagucccgcagucggcguccagcggcucugcuuguucgugugugugucguugcaggccuuauucaagcuuaccaugggccagaucgugaccuucuuccaggaggucccccacgugaucgaggaggugaugaacaucguccugaucgcccucagcauccuggccauccugaaggggcucuacaacguggcgaccugcggccugaucgggcuggugacguuccuccugcuguccggccgcagcugcucccucaucuacaaggggaccuacgagcugcagacccuggagcucaacauggagacccugaacaugacgaugccgcugagcugcaccaagaacaacucccaccacuacauccgggucggcaacgagaccggccucgagcugacccugacgaacaccagcauccucaaccacaaguucugcaaccuguccgacgcccacaagcgcaaccuguacgaccacagccucauguccaucaucagcaccuuccaccuguccauccccaacuucaaccaguacgaggccaugagcugcgacuucaacgggggcaagaucaccgugcaguacaaccugucccacagcuucgccguggacgccgcggggcacugcggcacgcucgccaacgggguccugcagaccuucaugcggauggccuggggcggcuccuacaucgcccuggacagcgggcgcggcaacugggacugcaucaugaccuccuaccaguaccucaucauccagaacaccacgugggacgaccacugccaguucagccggcccucccccaucggguaccugggccugcucagccagcgcacccgggacaucuacaucagccgccggcugcugggcaccuucaccuggacgcucuccgacagcgaggggaacgagaccccgggcggguacugccugacccgcuggaugcugaucgaggcggagcucaagugcuucggcaacaccgccguggccaagugcaacgagaagcacgacgaggaguucugcgacaugcugcggcuguucgacuucaacaagcaggccauccgccggcucaagacgcccgcccagauguccauccagcugaucaacaaggcggugaacgcccugaucaacgaccagcucaucaugaagaaccaccuccgcgacaucauggggauccccuacugcaacuacagccgguacugcuaccugaaccacaccuccaccggcaagaccagccugccccgcugcugccugaucuccaacggcagcuaccugaacgagacgaaguucuccgacgacaucgagcagcaggccgacaacaugaucaccgagaugcugcagaaggaguacaucgaccggcaggggaagaccccgcucggccuggucgaccuguucguguucagcaccuccuucuaccucaucagcaucuuccugcaccuggugaagauccccacgcaccgccacaucgucgggaagcccugccccaagccgcaccggcucaaccacaugggcaucugcuccugcgggcuguacaagcagcccggcgugcccgugcgcuggaagcggugaggacuagucccuguucccagagcccacuuuuuuuucuuuuuuugaaauaaaauagccugucuuucagaucuaaaaaaaaaaaaaaaaaaaaaaaaaaaaaaaaaaaaaaaaaaaaaaaaaaaaaaaaaaaaaaaaaaaaaaaaaaaaaaaaaaaaaaaaaaaaaaaaaaaa

SEQ ID NO: 31881 - RNA, 1724 nt, Artificial Sequence
  mRNA product Design a-1 (A100) comprising derived and/or modified sequence from LASV(AV;Clade V)__CCA30314__GPCmut7 (opt1)
aggagagucccgcagucggcguccagcggcucugcuuguucgugugugugucguugcaggccuuauucaagcuuaccaugggccagaucgugaccuucuuccaggaggucccccacgugaucgaggaggugaugaacaucguccugaucgcccucagcauccuggccgugcugaaggggcucuacaacaucgcgaccugcggccugaucgggcugaucacguuccuccugcugugcggccgcuccugcagcuccaaccucuacaaggggguguacgagcugcagagccuggaccucaacauggagacccugaacaugaccaugccgcuguccugcaccaagaacaacagccaccacuacauccgggucggcaacgacacgggccucgagcugacccugaccaacaccuccauccucaaccacaaguucugcaaccugagcgacgcccacaagaaggaccuguacgaccacgcccucauguccaucaucagcacguuccaccuguccauccccaacuucaaccaguacgaggccaugagcugcgacuucaacgggggcaagaucuccgugcaguacaaccugagccacuccuacgccaucgacgcggccaaccacugcgggaccguggccaacggcauccuccagaccuucaugcgcauggccuggggcgggagcuacaucgcgcuggacuccggccgggggaacugggacugcaucaugaccagcuaccaguaccugaucauccagaacacgaccugggagaaccacugccaguucucccgccccagccccaucggcuaccucgggcugcugagccagcggacccgcgacaucuacaucucccggcgccuccugggcaccuucacguggacccugagcgacuccgagggcaacgccacccccgggggcuacugccucacccgguggaugcugaucgaggccgagcugaagugcuucgggaacacggccgucgccaagugcaacgagaagcacgacgaggaguucugcgacaugcuccgccuguucgacuucaacaagcaggcgaucagccggcugaaguccccggcccagaugagcauccagcucaucaacaaggccgugaacgcccugaucaacgaccagcugaucaugaagaaccaccuccgcgacaucaugggcauccccuacugcaacuacuccaaguacugcuaccugaaccacaccaucaccgggaagaccagccugcccaagugcugccucguguccaacggcagcuaccugaacgagacgcacuucuccgacgacaucgagcagcaggccgacaacaugaucaccgagaugcugcagaaggaguacauggagcggcagggcaagaccccgcuggggcucgucgaccuguucguguucagcaccuccuucuaccugaucagcaucuuccuccgccuggugaagauccccacgcaccggcacaucgucggcaagcccugccccaagccgcaccgccugaaccacauggggaucugcuccugcggccucuacaagcagcccggggugcccgugcgguggaagcgcugaggacuagucccuguucccagagcccacuuuuuuuucuuuuuuugaaauaaaauagccugucuuucagaucuaaaaaaaaaaaaaaaaaaaaaaaaaaaaaaaaaaaaaaaaaaaaaaaaaaaaaaaaaaaaaaaaaaaaaaaaaaaaaaaaaaaaaaaaaaaaaaaaaaaa

SEQ ID NO: 31882 - RNA, 1721 nt, Artificial Sequence
  mRNA product Design a-1 (A100) comprising derived and/or modified sequence from LASV(Togo/2016/7082;Clade VI)__AMR44577__GPCmut7 (opt1)
aggagagucccgcagucggcguccagcggcucugcuuguucgugugugugucguugcaggccuuauucaagcuuaccaugggccagaucaucaccuucuuccaggaggugccccacgucaucgaggaggugaugaacaucgugcugaucgcccucagccugcuggccauccucaagggggucuacaacguggcgaccugcggcaucaucgggcuggugacguuccuguuccucugcggccgcuccugcagccugaucuacaagggguccuacgagcugcagacccucgagcugaacauggagacccugaacaugaccaugccgcucagcugcacgaagaacuccagccaccacuacauccgggucggcaacgagaccggccuggagcugacccucaccaacacguccaucaucaaccacaaguucugcaaccugagcgacgcccacaagcgcaaccuguacgaccacgcccucauguccauccugagcaccuuccaccuguccauccccaacuucaaccaguacgaggccaugagcugcgacuucaacgggggcaagaucuccgugcaguacaaccucagccacgccuacgcgguggacgccgccgagcacugcgggaccgucgccaacggcgugcugcagaccuucaugcggauggcguggggcggguccuacaucgcccuggacagcggccgcgggaacugggacugcaucaugacguccuaccaguaccucaucauccagaacaccaccugggaggaccacugccaguucagccggcccucccccaucggcuaccuggggcugcucagccagcgcacccgggacaucuacaucagccgccggcugcugggcacguucaccuggacccucuccgacagcgagggcaacgagacccccgggggcuacugccugacgcgcuggaugcugaucgaggccgagcucaagugcuucgggaacaccgccguggccaagugcaacgagaagcacgacgaggaguucugcgacaugcugcggcuguucgacuucaacaagcaggcgauccagcgccucaaguccccggcccagaugagcauccagcugaucaacaaggccgucaacgcccugaucaacgaccagcucaucaugaagaaccaccuccgggacaugaugggcauccccuacugcaacuacuccaaguacugcuaccugaaccacaccagcuccgggcgcaccagccugcccaagugcugccugguguccaacggcagcuaccugaacgagacgcacuucuccgacgacaucgagcagcaggccgacaacaugaucaccgagaugcuccagaaggaguacaucgaccggcagggcaagaccccgcuggggcugguggaccuguucgucuucagcaccuccuucuaccucaucagcaucuuccugcaccugaucaagauccccacgcaccgccacaucgugggcaagcccugccccaagccgcaccggcucaaccacauggggaucugcuccugcggccuguacaagcagcccggggugcccacccgcuggaagcggugaggacuagucccuguucccagagcccacuuuuuuuucuuuuuuugaaauaaaauagccugucuuucagaucuaaaaaaaaaaaaaaaaaaaaaaaaaaaaaaaaaaaaaaaaaaaaaaaaaaaaaaaaaaaaaaaaaaaaaaaaaaaaaaaaaaaaaaaaaaaaaaaaaaaa

SEQ ID NO: 31883 - RNA, 1721 nt, Artificial Sequence
  mRNA product Design a-1 (A100) comprising derived and/or modified sequence from LASV(KAK-428;Clade n.d. (VII))__ANH09740__GPCmut7 (opt1)
aggagagucccgcagucggcguccagcggcucugcuuguucgugugugugucguugcaggccuuauucaagcuuaccaugggccagaucgugaccuucuuccaggaggucccccacgugaucgaggaggugaugaacaucguccugaucgcccucagccugcuggccauccucaaggggcuguacaacuucgcgaccugcggcgugaucgggcugaucacguuccuccugcugugcggccgcuccugcagcgccaccuacaaggggcaguacgagcuccagacccuggagcugaacauggagucccucaacaugaccaugccgcugagcugcacgaagaacaacucccaccacuacauccgggccggcaacaacaccggccuggagcucacccugaccaacacgagcaucaucucccacaaguucugcaaccugagcgacgcccacaagaagaaccucuacgaccacacccugauguccaucaucaccaccuuccaccugagcauccccaacuucaaccaguacgaggccauguccugcgacuucaacgggggcaagaucagcauccaguacaaccucucccacagcuacgcgggggacgccgcccagcacugcggcacgguggccaacgggguccugcagaccuucaugcgcauggcguggggcggcuccuaccuggcccucgacagcgggcggcgcggcugggacugcaucaucuccagcuaccaguaccugaucauccagaacaccaccugggacgaccacugccaguucucccggcccagccccaucggguaccugggcuucgugagccagaagacgcgcgacaucuacaucucccggcgccuccugggcaccuucaccuggacccugagcgacuccgaggggcacgacaugccgggcggguacugccucacgcgguggaugcugaucgaggccgaccugaagugcuucggcaacaccgccguggccaagugcaacgagaagcacgacgaggaguucugcgacauguggcgccucuucgacuucaacaagcaggcgauccagcggcugaaggcccccgcccagaugaacauccagcugaucaacaaggccgucaacgcccucaucaacgaccagcugaugaugaagaaccaccuccgcgacaucauggggauccccuacugcaacuacagcaaguucugcuaccugaacaacaccaccacgggccggaccucccugccccgcugcugccugaucagcaacggcuccuaccucaacgagacccacuucagcgacgacaucgagcagcaggcggacaacaugaucaccgagaugcugcagaaggaguacauggaccggcaggggaagacgccgcugggccucguggaccuguucguguucuccaccagcuucuaccugaucaccaucuuccugcaccucgucaagauccccacccaccgccacaucguggggaagcccugccccaagccgcaccggcugaaccacaugggcaucugcuccugcgggcuguacaagcagcccggcgugcccguccgcuggaagcggugaggacuagucccuguucccagagcccacuuuuuuuucuuuuuuugaaauaaaauagccugucuuucagaucuaaaaaaaaaaaaaaaaaaaaaaaaaaaaaaaaaaaaaaaaaaaaaaaaaaaaaaaaaaaaaaaaaaaaaaaaaaaaaaaaaaaaaaaaaaaaaaaaaaaa

SEQ ID NO: 31884 - RNA, 1721 nt, Artificial Sequence; identical to SEQ ID NO: 31878
  mRNA product Design a-1 (A100) comprising derived and/or modified sequence from LASV(Pinneo-NIG-1969;Clade I)__AIT17836__GPCmut7 (opt1)

SEQ ID NO: 31885 - RNA, 1721 nt, Artificial Sequence
  mRNA product Design a-1 (A100) comprising derived and/or modified sequence from LASV(ISTH0009-NIG-2011;Clade II)__AIT17404__GPCmut7 (opt1)
aggagagucccgcagucggcguccagcggcucugcuuguucgugugugugucguugcaggccuuauucaagcuuaccaugggccagaucaucaccuucuuccaggaggugccccacgucaucgaggaggugaugaacaucgugcugaucgcccucagccugcuggccauccucaaggggaucuacaacgucgcgaccugcggccuguucgggcugguguccuuccuccugcugugcggccgcagcugcuccacgaccuacaaggggguguacgagcuccagacccuggagcuggacauggccagccucaacaugaccaugccgcuguccugcacgaagaacaacagccaccacuacaucauggucggcaacgagaccggccuggagcucacccugaccaacacguccaucaucaaccacaaguucugcaaccugagcgacgcccacaagaagaaccucuacgaccacgcccugauguccaucaucagcaccuuccaccuguccauccccaacuucaaccaguacgaggccaugagcugcgacuucaacgggggcaagaucuccgugcaguacaaccucagccacgcguacgccguggacgccgccaaccacugcgggaccaucgcgaacggcguccugcagaccuucaugcggauggccuggggcggguccuacaucgcccuggacagcggcaagggguccugggacugcaucaugacgagcuaccaguaccucaucauccagaacaccaccugggaggaccacugccaguucucccgccccagccccaucggcuaccuggggcugcucagccagcggacccgcgacaucuacaucucccggcgccugcugggcacguucaccuggacccucagcgacuccgagggcaacgagacccccgggggcuacugccugacgcgguggaugcugaucgaggccgagcucaagugcuucgggaacaccgccguggcgaagugcaacgagaagcacgacgaggaguucugcgacaugcugcgccuguucgacuucaacaagcaggccauccggcgccucaagaccccggcccagaugagcauccagcugaucaacaaggccgugaacgcccugaucaacgaccagcucaucaugaagaaccaccuccgggacaucaugggcauccccuacugcaacuacuccaaguacugcuaccugaaccacaccgucacggggaagaccagccugccccgcugcugccugguguccaacggcagcuaccugaacgagacccacuucuccgacgacaucgagcagcaggcggacaacaugaucaccgagcuccugcagaaggaguacauggaccggcagggcaagacgccgcuggggcugguggaccucuucgucuucagcaccuccuucuaccugaucagcaucuuccugcaccucaucaagauccccacccaccgccacaucaccggcaagcccugccccaagccgcaccggcugaaccacauggggaucugcuccugcggccuguacaagcaccccggggugcccgugaaguggaagcgcugaggacuagucccuguucccagagcccacuuuuuuuucuuuuuuugaaauaaaauagccugucuuucagaucuaaaaaaaaaaaaaaaaaaaaaaaaaaaaaaaaaaaaaaaaaaaaaaaaaaaaaaaaaaaaaaaaaaaaaaaaaaaaaaaaaaaaaaaaaaaaaaaaaaaa

SEQ ID NO: 31886 - RNA, 1721 nt, Artificial Sequence
  mRNA product Design a-1 (A100) comprising derived and/or modified sequence from LASV(ISTH2010-NIG-2012;Clade II)__AIT17482__GPCmut7 (opt1)
aggagagucccgcagucggcguccagcggcucugcuuguucgugugugugucguugcaggccuuauucaagcuuaccaugggccagaucaucaccuucuuccaggaggugccccacgucaucgaggaggugaugaacaucgugcugaucgcccucagccugcuggccauccucaaggggaucuacaacgucgcgaccugcggccuguucgggcugguguccuuccuccugcugugcggccgcagcugcuccacgaccuacaaggggguguacgagcuccagacccuggagcuggacauggccagccucaacaugaccaugccgcuguccugcacgaagaacaacagccaccacuacaucauggucggcaacgagaccggccuggagcucacccugaccaacacguccaucaucaaccacaaguucugcaaccugagcgacgcccacaagaagaaccucuacgaccacgcccugauguccaucaucagcaccuuccaccuguccauccccaacuucaaccaguacgaggccaugagcugcgacuucaacgggggcaagaucuccgugcaguacaaccucagccacgcguacgccguggacgccgccaaccacugcgggaccaucgcgaacggcguccugcagaccuucaugcggauggccuggggcggguccuacaucgcccuggacagcggcaagggguccugggacugcaucaugacgagcuaccaguaccucaucauccagaacaucaccugggaggaccacugccaguucucccgccccagccccaucggcuaccuggggcugcucagccagcggacccgcgacaucuacaucucccggcgccugcugggcaccuucacguggacccucagcgacuccgagggcaacgagacccccgggggcuacugccugacccgguggaugcugaucgaggccgagcucaagugcuucgggaacacggccguggcgaagugcaacgagaagcacgacgaggaguucugcgacaugcugcgccuguucgacuucaacaagcaggccauccggcgccucaagaccccggcccagaugagcauccagcugaucaacaaggccgugaacgcccugaucaacgaccagcucaucaugaagaaccaccuccgggacaucaugggcauccccuacugcaacuacuccaaguacugcuaccugaaccacaccgucaccgggaagacgagccugccccgcugcugccugguguccaacggcagcuaccugaacgagacccacuucuccgacgacaucgagcagcaggcggacaacaugaucaccgagcuccugcagaaggaguacaucgaccggcagggcaagaccccgcuggggcugguggaccucuucgucuucagcacguccuucuaccugaucagcaucuuccugcaccucgugaagauccccacccaccgccacguggucggcaagcccugccccaagccgcaccggcugaaccacauggggaucugcuccugcggccuguacaagcaccccggggugcccgugaaguggaagcgcugaggacuagucccuguucccagagcccacuuuuuuuucuuuuuuugaaauaaaauagccugucuuucagaucuaaaaaaaaaaaaaaaaaaaaaaaaaaaaaaaaaaaaaaaaaaaaaaaaaaaaaaaaaaaaaaaaaaaaaaaaaaaaaaaaaaaaaaaaaaaaaaaaaaaa

SEQ ID NO: 31887 - RNA, 1721 nt, Artificial Sequence
  mRNA product Design a-1 (A100) comprising derived and/or modified sequence from LASV(Lassa virus/H.sapiens-wt/NGA/2015/ISTH_0543;Clade II)__AVO03639__GPCmut7 (opt1)
aggagagucccgcagucggcguccagcggcucugcuuguucgugugugugucguugcaggccuuauucaagcuuaccaugggccagaucaucaccuucuuccaggaggugccccacgucaucgaggaggugaugaacaucgugcugaucgcccucagccugcuggccauccucaaggggaucuacaacgucgcgaccugcggccuguucgggcugguguccuuccuccugcugugcggccgcagcugcuccacgaccuacaaggggguguacgagcuccagacccuggagcuggacauggccaaccucaacaugaccaugccgcugagcugcacgaagaacaacucccaccacuacaucauggucggcaacgagaccggccuggagcucacccugaccaacacgagcaucaucaaccacaaguucugcaaccuguccgacgcccacaagaagaaccucuacgaccacgcccugaugagcaucaucuccaccuuccaccugagcauccccaacuucaaccaguacgaggccauguccugcgacuucaacgggggcaagaucagcgugcaguacaaccucucccacaccuacgcgguggacgccgccaaccacugcgggaccaucgccaacggcguccugcagacguucaugcggauggcguggggcgggagcuacaucgcccuggacuccggcaaggggagcugggacugcaucaugaccuccuaccaguaccucgugauccagaacaccaccugggaggaccacugccaguucagccgccccucccccaucggcuaccuggggcugcucagccagcggacgcgcgacaucuacaucagccggcgccugcugggcaccuucaccuggacccucuccgacagcgagggcaacgagacgcccgggggcuacugccugacccgguggaugcugaucgaggccgagcucaagugcuucgggaacaccgccguggccaagugcaacgagaagcacgacgaggaguucugcgacaugcugcgccuguucgacuucaacaagcaggcgauccggcgccucaagaccccggcccagauguccauccagcugaucaacaaggccgucaacgcccugaucaacgaccagcucaucaugaagaaccaccuccgggacaucaugggcauccccuacugcaacuacagcaaguacugcuaccugaaccacacggugaccgggaagaccucccugccccgcugcugccuggugagcaacggcuccuaccugaacgagacccacuucagcgacgacaucgagcagcaggccgacaacaugaucacggagcuccugcagaaggaguacaucgaccggcagggcaagaccccgcuggggcuggucgaccucuucguguucuccaccagcuucuaccugaucuccaucuuccugcaccucgugaagauccccacccaccgccacaucacgggcaagcccugccccaagccgcaccggcugaaccacauggggaucugcagcugcggccuguacaagcaccccgggguccccgugaaguggaagcgcugaggacuagucccuguucccagagcccacuuuuuuuucuuuuuuugaaauaaaauagccugucuuucagaucuaaaaaaaaaaaaaaaaaaaaaaaaaaaaaaaaaaaaaaaaaaaaaaaaaaaaaaaaaaaaaaaaaaaaaaaaaaaaaaaaaaaaaaaaaaaaaaaaaaaa

SEQ ID NO: 31888 - RNA, 1721 nt, Artificial Sequence
  mRNA product Design a-1 (A100) comprising derived and/or modified sequence from LASV(Lassa virus/H.sapiens-wt/NGA/2016/ISTH_0009;Clade II)__AVO03571__GPCmut7 (opt1)
aggagagucccgcagucggcguccagcggcucugcuuguucgugugugugucguugcaggccuuauucaagcuuaccaugggccagaucaucaccuucuuccaggaggugccccacgucaucgaggaggugaugaacaucgugcugaucgcccucagccugcuggccauccucaaggggaucuacaacgucgcgaccugcggccugcuggggcucguguccuuccugcugcucugcggccgcagcugcuccacgaccuacaaggggguguacgagcugcagacccuggagcucgacauggccagccugaacaugaccaugccgcuguccugcacgaagaacaacagccaccacuacaucauggucggcaacgagaccggccucgagcugacccugaccaacacguccaucaucaaccacaaguucugcaaccucagcgacgcccacaagaagaaccuguacgaccacgcccugauguccaucaucagcaccuuccaccucuccauccccaacuucaaccaguacgaggccaugagcugcgacuucaacgggggccggaucuccgugcaguacaaccugagccacuccuacgcgguggacgccgccaaccacugcgggaccaucgccaacggcguccugcagaccuucaugcgcauggcguggggcgggagcuacaucgcccucgacuccggcaaggggagcugggacugcaucaugacguccuaccaguaccugaucauccagaacaccaccugggaggaccacugccaguucagccggcccagccccaucggcuaccuggggcuccugucccagcgcacccgggacaucuacaucagccgccggcugcucggcacguucaccuggacccuguccgacagcgagggcaacgagacccccgggggcuacugccugacgcgcuggaugcucaucgaggccgagcugaagugcuucgggaacaccgccguggccaagugcaacgagaagcacgacgaggaguucugcgacaugcugcggcuguucgacuucaacaagcaggcgauccgccggcugaagaccccggcccagauguccauccagcugaucaacaaggccgugaacgcccucaucaacgaccagcugaucaugaagaaccaccuccgcgacaucaugggcauccccuacugcaacuacagcaaguacugcuaccucaaccacaccgucacggggaagaccucccugccccggugcugccuggugagcaacggcuccuaccucaacgagacccacuucagcgacgacaucgagcagcaggccgacaacaugaucaccgagcugcugcagaaggaguacaucgaccgccagggcaagacgccgcuggggcucguggaccuguucgucuucuccaccagcuucuaccugaucuccaucuuccuccaccuggugaagauccccacccaccggcacaucaccggcaagcccugccccaagccgcaccgccugaaccacauggggaucugcagcugcggccucuacaaccaccccggggugcccgucaaguggaagcggugaggacuagucccuguucccagagcccacuuuuuuuucuuuuuuugaaauaaaauagccugucuuucagaucuaaaaaaaaaaaaaaaaaaaaaaaaaaaaaaaaaaaaaaaaaaaaaaaaaaaaaaaaaaaaaaaaaaaaaaaaaaaaaaaaaaaaaaaaaaaaaaaaaaaa

SEQ ID NO: 31889 - RNA, 1721 nt, Artificial Sequence
  mRNA product Design a-1 (A100) comprising derived and/or modified sequence from LASV(Lassa virus/H.sapiens-wt/NGA/2016/ISTH_0017;Clade II)__AVO03567__GPCmut7 (opt1)
aggagagucccgcagucggcguccagcggcucugcuuguucgugugugugucguugcaggccuuauucaagcuuaccaugggccagaucaucaccuucuuccaggaggugccccacgucaucgaggaggugaugaacaucgugcugaucgcccucagccugcuggccauccucaaggggaucuacaacgucgcgaccugcggccuguucgggcugguguccuuccuccugcugugcggccgcagcugcuccacgaccuacaaggggguguacgagcuccagacccuggagcuggacauggccagccucaacaugaccaugccgcuguccugcacgaagaacaacagccaccacuacaucauggucggcaacgagaccggccuggagcucacccugaccaacacguccaucaucaaccacaaguucugcaaccugagcgacgcccacaagaagaaccucuacgaccacgcccugauguccaucaucagcaccuuccaccuguccauccccaacuucaaccaguacgaggccaugagcugcgacuucaacgggggcaagaucuccgugcaguacaaccucagccacaccuacgcgaucgacgccgccaaccacugcgggaccaucgccaacggcgugcugcagacguucaugcggauggcguggggcggguccuacaucgcccuggacagcggcaagggguccugggacugcaucaugaccagcuaccaguaccucaucauccagaacaccaccugggaggaccacugccaguucucccgccccagccccaucggcuaccuggggcugcucagccagcggacgcgcgacaucuacaucucccggcgccugcugggcaccuucaccuggacccucagcgacuccgagggcaacgagacgcccgggggcuacugccugacccgguggaugcugaucgaggccgagcucaagugcuucgggaacaccgccgucgccaagugcaacgagaagcacgacgaggaguucugcgacaugcugcgccuguucgacuucaacaagcaggcgauccggcgccucaagaccccggcccagaugagcauccagcugaucaacaaggccgugaacgcccugaucaacgaccagcucaucaugaagaaccaccuccgggacaucaugggcauccccuacugcaacuacuccaaguacugcuaccugaaccacacggugaccgggaagaccagccugccccgcugcugccuggucuccaacggcagcuaccugaacgagacccacuucuccgacgacaucgagcagcaggccgacaacaugaucacggagcuccugcagaaggaguacauggaccggcagggcaagaccccgcuggggcugguggaccucuucguguucagcaccuccuucuaccugaucagcaucuuccugcaccucguccgcauccccacccaccggcacgugaucggcaagcccugccccaagccgcaccgccugaaccacauggggaucugcuccugcggccuguacaagcaccccggggugcccgucaaguggaagcggugaggacuagucccuguucccagagcccacuuuuuuuucuuuuuuugaaauaaaauagccugucuuucagaucuaaaaaaaaaaaaaaaaaaaaaaaaaaaaaaaaaaaaaaaaaaaaaaaaaaaaaaaaaaaaaaaaaaaaaaaaaaaaaaaaaaaaaaaaaaaaaaaaaaaa

SEQ ID NO: 31890 - RNA, 1721 nt, Artificial Sequence
  mRNA product Design a-1 (A100) comprising derived and/or modified sequence from LASV(Lassa virus/H.sapiens-wt/NGA/2018/ISTH_0959;Clade II)__AVV65099__GPCmut7 (opt1)
aggagagucccgcagucggcguccagcggcucugcuuguucgugugugugucguugcaggccuuauucaagcuuaccaugggccagaucaucaccuucuuccaggaggugccccacgucaucgaggaggugaugaacaucgugcugaucgcccucagccugcuggccauccucaaggggaucuacaacgucgugaccugcggccuguucgggcugguguccuuccuccugcugugcggccgcagcugcuccacgaccuacaagggggucuacgagcuccagacccuggagcuggacauggcgagccucaacaugaccaugccgcuguccugcacgaagaacaacagccaccacuacaucauggugggcaacgagaccggccuggagcucacccugaccaacacguccaucaucaaccacaaguucugcaaccugagcgacgcccacaagaagaaccucuacgaccacgcccugauguccaucaucagcaccuuccaccuguccauccccaacuucaaccaguacgaggccaugagcugcgacuucaacgggggcaagaucuccgugcaguacaaccucagccacgccuacgcgaucgacgccgccaaccacugcgggaccaucgccaacggcguccugcagaccuucaugcggauggcguggggcggguccuacaucgcccuggacagcggcaagggguccugggacugcaucaugacgagcuaccaguaccucaucauccagaacaccaccugggaggaccacugccaguucucccgccccagccccaucggcuaccuggggcugcucagccagcggacccgcgacaucuacaucucccggcgccugcugggcacguucaccuggacccucagcgacuccgagggcaacgagacccccgggggcuacugccugacgcgguggaugcugaucgaggccgagcucaagugcuucgggaacaccgccguggccaagugcaacgagaagcacgacgaggaguucugcgacaugcugcgccuguucgacuucaacaagcaggcgauccggcgccucaagaccccggcccagaugagcauccagcugaucaacaaggccgugaacgcccugaucaacgaccagcucaucaugaagaaccaccuccgggacaucaugggcauccccuacugcaacuacuccaaguacugcuaccugaaccacaccgucacggggaagaccagccugccccgcugcugccugguguccaacggcagcuaccugaacgagacccacuucuccgacgacaucgagcagcaggccgacaacaugaucaccgagcuccugcagaaggaguacaucgaccggcagggcaagacgccgcuggggcugguggaccucuucgucuucagcaccuccuucuaccugaucagcaucuuccugcaccucgugaagauccccacccaccgccacgugaucggcaagcccugccccaagccgcaccggcugaaccacauggggaucugcuccugcggccuguacaagcaccccgggguccccgugaaguggaagcgcugaggacuagucccuguucccagagcccacuuuuuuuucuuuuuuugaaauaaaauagccugucuuucagaucuaaaaaaaaaaaaaaaaaaaaaaaaaaaaaaaaaaaaaaaaaaaaaaaaaaaaaaaaaaaaaaaaaaaaaaaaaaaaaaaaaaaaaaaaaaaaaaaaaaaa

SEQ ID NO: 31891 - RNA, 1721 nt, Artificial Sequence
  mRNA product Design a-1 (A100) comprising derived and/or modified sequence from LASV(LASV003-NIG-2008;Clade II)__AIT17580__GPCmut7 (opt1)
aggagagucccgcagucggcguccagcggcucugcuuguucgugugugugucguugcaggccuuauucaagcuuaccaugggccagaucaucaccuucuuccaggaggugccccacgucaucgaggaggugaugaacaucgugcugaucgcccucagccugcuggccauccucaaggggaucuacaacgucgcgaccugcggccuguucgggcugguguccuuccuccugcugugcggccgcagcugcuccacgaccuacaaggggguguacgagcuccagacccuggagcuggacauggccagccucaacaugaccaugccgcuguccugcacgaagaacaacagccaccacuacaucauggucggcaacgagaccggccuggagcucacccugaccaacacguccaucaucaaccacaaguucugcaaccugagcgacgcccacaagaagaaccucuacgaccacgcccugauguccaucaucagcaccuuccaccuguccauccccaacuucaaccaguacgaggccaugagcugcgacuucaacgggggcaagaucuccgugcaguacaaccucagccacaccuacgcgguggacgccgccaaccacugcgggaccaucgccaacggcguccugcagacguucaugcggauggcguggggcggguccuacaucgcccuggacagcggcaagggguccugggacugcaucaugaccagcuaccaguaccucaucauccagaacaccaccugggaggaccacugccaguucucccgccccagccccaucggcuaccuggggcugcucagccagcggacgcgcgacaucuacaucucccggcgccugcugggcaccuucaccuggacccucagcgacuccgagagcaacgagacgccgggcggguacugccugacccgguggaugcugaucgaggccgagcucaagugcuucggcaacaccgccguggccaagugcaacgagaagcacgacgaggaguucugcgacaugcugcgccuguucgacuucaacaagcaggcgauccggcgccucaaggcccccgcccagauguccauccagcugaucaacaaggccgugaacgcccugaucaacgaccagcucaucaugaagaaccaccuccgggacaucauggggauccccuacugcaacuacagcaaguacugcuaccugaaccacaccgucacgggccgcaccucccugccccggugcugccuggugagcaacggguccuaccugaacgagacccacuucagcgacgacaucgagcagcaggcggacaacaugaucaccgagcuccugcagaaggaguacauggaccgccagggcaagacgccgcugggccugguggaccucuucgucuucuccaccagcuucuaccugaucuccaucuuccugcaccucgugaagauccccacccaccggcacgugaucgggaagcccugccccaagccgcaccgccugaaccacaugggcaucugcagcugcgggcuguacaagcaccccggcguccccgugaaguggaagcggugaggacuagucccuguucccagagcccacuuuuuuuucuuuuuuugaaauaaaauagccugucuuucagaucuaaaaaaaaaaaaaaaaaaaaaaaaaaaaaaaaaaaaaaaaaaaaaaaaaaaaaaaaaaaaaaaaaaaaaaaaaaaaaaaaaaaaaaaaaaaaaaaaaaaa

SEQ ID NO: 31892 - RNA, 1721 nt, Artificial Sequence
  mRNA product Design a-1 (A100) comprising derived and/or modified sequence from LASV(LASV035-NIG-2009;Clade II)__AIT17588__GPCmut7 (opt1)
aggagagucccgcagucggcguccagcggcucugcuuguucgugugugugucguugcaggccuuauucaagcuuaccaugggccagaucaucaccuucuuccaggaggugccccacgucaucgaggaggugaugaacaucgugcugaucgcccucagccugcuggccauccucaaggggaucuacaacgucgcgaccugcggccuguucgggcugguguccuuccuccugcugugcggccgcagcugcuccacgaccuacaaggggguguacgagcuccagacccuggagcuggacauggccagccucaacaugaccaugccgcuguccugcacgaagaacaacagccaccacuacaucauggucggcaacgagaccggccuggagcucacccugaccaacacguccaucaucaaccacaaguucugcaaccugagcgacgcccacaagaagaaccucuacgaccacgcccugauguccaucaucagcaccuuccaccuguccauccccaacuucaaccaguacgaggccaugagcugcgacuucaacgggggcaagaucuccgugcaguacaaccucagccacgcguacgccguggacgccgccaaccacugcgggaccaucgcgaacggcguccugcagaccuucaugcggauggccuggggcggguccuacaucgcccuggacagcggcaagggguccugggacugcaucaugacgagcuaccaguaccucaucauccagaacaccaccugggaggaccacugccaguucucccgccccagccccaucggcuaccuggggcugcucagccagcggacccgcgacaucuacaucucccggcgccugcugggcacguucaccuggacccucagcgacuccgagggcaacgagacccccgggggcuacugccugacgcgguggaugcugaucgaggccgagcucaagugcuucgggaacaccgccguggcgaagugcaacgagaagcacgacgaggaguucugcgacaugcugcgccuguucgacuucaacaagcaggccauccggcgccucaaggccccggcccagaugagcauccagcugaucaacaaggccgugaacgcgcugaucaacgaccagcucaucaugaagaaccaccuccgggacaucaugggcauccccuacugcaacuacuccaaguacugcuaccugaaccacaccgucaccgggaagacgagccugccccgcugcugccugguguccaacggcagcuaccugaacgagacccacuucuccgacgacaucgagcagcaggccgacaacaugaucaccgagcuccugcagaaggaguacaucgaccggcagggcaagaccccgcuggggcugguggaccucuucgucuucagcacguccuucuaccugaucagcaucuuccugcaccucgugaagauccccacccaccgccacgugaucggcaagcccugccccaagccgcaccggcugaaccacauggggaucugcuccugcggccuguacaagcaccccgggguccccgugaaguggaagcgcugaggacuagucccuguucccagagcccacuuuuuuuucuuuuuuugaaauaaaauagccugucuuucagaucuaaaaaaaaaaaaaaaaaaaaaaaaaaaaaaaaaaaaaaaaaaaaaaaaaaaaaaaaaaaaaaaaaaaaaaaaaaaaaaaaaaaaaaaaaaaaaaaaaaaa

SEQ ID NO: 31893 - RNA, 1721 nt, Artificial Sequence
  mRNA product Design a-1 (A100) comprising derived and/or modified sequence from LASV(LASV1000-NIG-2009;Clade II)__AIT17782__GPCmut7 (opt1)
aggagagucccgcagucggcguccagcggcucugcuuguucgugugugugucguugcaggccuuauucaagcuuaccaugggccagaucaucaccuucuuccaggaggugccccacgucaucgaggaggugaugaacaucgugcugaucgcccucagccugcuggccauccucaaggggaucuacaacgucgcgaccugcggccuguucgggcugguguccuuccuccugcugugcggccgcagcugcuccacgaccuacaaggggguguacgagcuccagacccuggagcuggacauggccagccucaacaugaccaugccgcuguccugcacgaagaacaacagccaccacuacaucauggucggcaacgagaccggccuggagcucacccugaccaacacguccaucaucaaccacaaguucugcaaccugagcgacgcccacaagaagaaccucuacgaccacgcccugauguccaucaucagcaccuuccaccuguccauccccaacuucaaccaguacgaggccaugagcugcgacuucaacgggggcaagaucuccgugcaguacaaccucagccacaccuacgcgguggacgccgccaaccacugcgggaccaucgccaacggcguccugcagacguucaugcggauggcguggggcggguccuacaucgcccuggacagcggcaagggguccugggacugcaucaugaccagcuaccaguaccucaucauccagaacaccaccugggaggaccacugccaguucucccgccccagccccaucggcuaccuggggcugcucagccagcggacgcgcgacaucuacaucucccggcgccugcugggcaccuucaccuggacccucagcgacuccgagggcaacgagacgcccgggggcuacugccugacccgguggaugcugaucgaggccgagcucaagugcuucgggaacaccgccguggccaagugcaacgagaagcacgacgaggaguucugcgacaugcugcgccuguucgacuucaacaagcaggcgaucaagcggcucaagaccccggcccagaugagcauccagcugaucaacaaggccgugaacgcccugaucaacgaccagcucaucaugaagaaccaccuccgcgacaucaugggcauccccuacugcaacuacuccaaguacugcuaccugaaccacacggucaccgggaagaccagccugccccggugcugccugguguccaacggcagcuaccugaacgagacccacuucuccgacgacaucgagcagcaggccgacaacaugaucacggagcuccugcagaaggaguacaucgaccgccagggcaagaccccgcuggggcugguggaccucuucgucuucagcaccuccuucuaccugaucagcaucuuccugcaccucgugaagauccccacccaccggcacguggucggcaagcccugccccaagccgcaccgccugaaccacauggggaucugcuccugcggccuguacaagcaccccggggugcccgugaaguggaagcggugaggacuagucccuguucccagagcccacuuuuuuuucuuuuuuugaaauaaaauagccugucuuucagaucuaaaaaaaaaaaaaaaaaaaaaaaaaaaaaaaaaaaaaaaaaaaaaaaaaaaaaaaaaaaaaaaaaaaaaaaaaaaaaaaaaaaaaaaaaaaaaaaaaaaa

SEQ ID NO: 31894 - RNA, 1721 nt, Artificial Sequence
  mRNA product Design a-1 (A100) comprising derived and/or modified sequence from LASV(LASV221-NIG-2010;Clade II)__AIT17624__GPCmut7 (opt1)
aggagagucccgcagucggcguccagcggcucugcuuguucgugugugugucguugcaggccuuauucaagcuuaccaugggccagaucaucaccuucuuccaggaggugccccacgucaucgaggaggugaugaacaucgugcugaucgcccucagccugcuggccauccucaaggggaucuacaacgucgcgaccugcggccuguucgggcugguguccuuccuccugcugugcggccgcagcugcuccacgaccuacaaggggguguacgagcuccagacccuggagcuggacauggccagccucaacaugaccaugccgcuguccugcacgaagaacaacagccaccacuacaucauggucggcaacgagaccggccuggagcucacccugaccaacacguccaucaucaaccacaaguucugcaaccugagcgacgcccacaagaagaaccucuacgaccacgcccugauguccaucaucagcaccuuccaccuguccauccccaacuucaaccaguacgaggccaugagcugcgacuucaacgggggcaagaucuccgugcaguacaaccucagccacaccuacgcgaucgacgccgccaaccacugcgggaccaucgccaacggcgugcugcagacguucaugcggauggcguggggcggguccuacaucgcccuggacagcggcaagggguccugggacugcaucaugaccagcuaccaguaccucaucauccagaacaccaccugggaggaccacugccaguucucccgccccagccccaucggcuaccuggggcugcucagccagcggacgcgcgacaucuacaucucccggcgccugcugggcaccuucaccuggacccucagcgacuccgagggcaacgagacgcccgggggcuacugccugacccgguggaugcugaucgaggccgagcucaagugcuucgggaacaccgccgucgccaagugcaacgagaagcacgacgaggaguucugcgacaugcugcgccuguucgacuucaacaagcaggcgauccggcgccucaagaccccggcccagaugagcauccagcugaucaacaaggccgugaacgcccugaucaacgaccagcucaucaugaagaaccaccuccgggacaucaugggcauccccuacugcaacuacuccaaguacugcuaccugaaccacacggugaccgggaagaccagccugccccgcugcugccuggucuccaacggcagcuaccugaacgagacccacuucuccgacgacaucgagcagcaggccgacaacaugaucacggagaugcuccagaaggaguacauggaccggcagggcaagaccccgcuggggcugguggaccuguucguguucagcaccuccuucuaccucaucagcaucuuccugcaccuggucaagauccccacccaccgccacgugaucggcaagcccugccccaagccgcaccggcucaaccacauggggaucugcuccugcggccuguacaagcaccccggggugcccgucaaguggaagcgcugaggacuagucccuguucccagagcccacuuuuuuuucuuuuuuugaaauaaaauagccugucuuucagaucuaaaaaaaaaaaaaaaaaaaaaaaaaaaaaaaaaaaaaaaaaaaaaaaaaaaaaaaaaaaaaaaaaaaaaaaaaaaaaaaaaaaaaaaaaaaaaaaaaaaa

SEQ ID NO: 31895 - RNA, 1721 nt, Artificial Sequence
  mRNA product Design a-1 (A100) comprising derived and/or modified sequence from LASV(LASV237-NIG-2010;Clade II)__AIT17638__GPCmut7 (opt1)
aggagagucccgcagucggcguccagcggcucugcuuguucgugugugugucguugcaggccuuauucaagcuuaccaugggccagaucaucaccuucuuccaggaggugccccacgucaucgaggaggugaugaacaucgugcugaucgcccucagccugcuggccauccucaaggggaucuacaacgucgcgaccugcggccuguucgggcugguguccuuccuccugcugugcggccgcagcugcuccacgaccuacaaggggguguacgagcuccagacccuggagcuggacauggccagccucaacaugaccaugccgcuguccugcacgaagaacaacagccaccacuacaucauggucggcaacgagaccggccuggagcucacccugaccaacacguccaucaucaaccacaaguucugcaaccugagcgacgcccacaagaaggaccucuacgaccacgcccugauguccaucaucagcaccuuccaccuguccauccccaacuucaaccaguacgaggccaugagcugcgacuucaacgggggcaagaucuccgugcaguacaaccucagccacaccuacgcgguggacgccgccaaccacugcgggaccaucgccaacggcguccugcagacguucaugcggauggcguggggcggguccuacaucgcccuggacagcggcaagggguccugggacugcaucaugaccagcuaccaguaccucaucauccagaacaccaccugggaggaccacugccaguucucccgccccagccccaucggcuaccuggggcugcucagccagcggacgcgcgacaucuacaucucccggcgccugcugggcaccuucaccuggacccucagcgacuccgagggcaacgagacgcccgggggcuacugccugacccgguggaugcugaucgaggccgagcucaagugcuucgggaacaccgccguggccaagugcaacgagaagcacgacgaggaguucugcgacaugcugcgccuguucgacuucaacaagcaggcgauccggcgccucaagaccccggcccagaugagcauccagcugaucaacaaggccgugaacgcccugaucaacgaccagcucaucaugaagaaccaccuccgggacaucaugggcauccccuacugcaacuacuccaaguacugcuaccugaaccacacggucaccgggaagaccagccugccccgcugcugccugguguccaacggcagcuaccugaacgagacccacuucuccgacgacaucgagcagcaggccgacaacaugaucacggagcuccugcagaaggaguacauggaccggcagggcaagaccccgcuggggcugguggaccucuucgucuucagcaccuccuucuaccugaucagcaucuuccugcaccucaucaagauccccacccaccgccacaucacgggcaagcccugccccaagccgcaccggcugaaccacauggggaucugcuccugcggccuguacaagcaccccggggugcccgugaaguggaagcgcugaggacuagucccuguucccagagcccacuuuuuuuucuuuuuuugaaauaaaauagccugucuuucagaucuaaaaaaaaaaaaaaaaaaaaaaaaaaaaaaaaaaaaaaaaaaaaaaaaaaaaaaaaaaaaaaaaaaaaaaaaaaaaaaaaaaaaaaaaaaaaaaaaaaaa

SEQ ID NO: 31896 - RNA, 1721 nt, Artificial Sequence
  mRNA product Design a-1 (A100) comprising derived and/or modified sequence from LASV(LASV253-NIG-2011;Clade II)__AIT17670__GPCmut7 (opt1)
aggagagucccgcagucggcguccagcggcucugcuuguucgugugugugucguugcaggccuuauucaagcuuaccaugggccagaucaucaccuucuuccaggaggugccccacgucaucgaggaggugaugaacaucgugcugaucgcccucagccugcuggccauccucaaggggaucuacaacgucgcgaccugcggccuguucgggcugguguccuuccuccugcugugcggccgcagcugcuccacgaccuacaaggggguguacgagcuccagacccuggagcuggacauggccagccucaacaugaccaugccgcuguccugcacgaagaacaacagccaccacuacaucauggucggcaacgagaccggccuggagcucacccugaccaacacguccaucaucaaccacaaguucugcaaccugagcgacgcccacaagaagaaccucuacgaccacgcccugauguccaucaucagcaccuuccaccuguccauccccaacuucaaccaguacgaggccaugagcugcgacuucaacgggggcaagaucuccgugcaguacaaccucagccacaccuacgcgguggacgccgccaaccacugcgggaccaucgccaacggcguccugcagacguucaugcggauggcguggggcggguccuacaucgcccuggacagcggcaagggguccugggacugcaucaugaccagcuaccaguaccucaucauccagaacaccaccugggaggaccacugccaguucucccgccccagccccaucggcuaccuggggcugcucagccagcggacgcgcgacaucuacaucucccggcgccugcugggcaccuucaccuggacccucagcgacuccgagggcaacgagacgcccgggggcuacugccugacccgguggaugcugaucgaggccgagcucaagugcuucgggaacaccgccguggccaagugcaacgagaagcacgacgaggaguucugcgacaugcugcgccuguucgacuucaacaagcaggcgauccggcgccucaaggccccggcccagaugagcauccagcugaucaacaaggccgugaacgcccugaucaacgaccagcucaucaugaagaaccaccuccgggacaucaugggcauccccuacugcaacuacuccaaguacugcuaccugaaccacaccgucacggggcgcaccagccugccccggugcugccugguguccaacggcagcuaccugaacgagacccacuucuccgacgacaucgagcagcaggcggacaacaugaucaccgagcuccugcagaaggaguacaucgaccgccagggcaagacgccgcuggggcugguggaccucuucgucuucagcaccuccuucuaccugaucagcaucuuccugcaccucgugaagauccccacccaccggcacaucaucggcaagcccugccccaagccgcaccgccugaaccacauggggaucugcuccugcggccuguacaagcaccccggggugcccgucaaguggaagcggugaggacuagucccuguucccagagcccacuuuuuuuucuuuuuuugaaauaaaauagccugucuuucagaucuaaaaaaaaaaaaaaaaaaaaaaaaaaaaaaaaaaaaaaaaaaaaaaaaaaaaaaaaaaaaaaaaaaaaaaaaaaaaaaaaaaaaaaaaaaaaaaaaaaaa

SEQ ID NO: 31897 - RNA, 1721 nt, Artificial Sequence
  mRNA product Design a-1 (A100) comprising derived and/or modified sequence from LASV(LASV254-NIG-2011;Clade II)__AIT17674__GPCmut7 (opt1)
aggagagucccgcagucggcguccagcggcucugcuuguucgugugugugucguugcaggccuuauucaagcuuaccaugggccagaucaucaccuucuuccaggaggugccccacgucaucgaggaggugaugaacaucgugcugaucgcccucagccugcuggccauccucaaggggaucuacaacgucgcgaccugcggccuguucgggcugguguccuuccuccugcugugcggccgcagcugcuccacgaccuacaaggggguguacgagcuccagacccuggagcuggacaugaccaaccucaacaugacgaugccgcugagcugcaccaagaacaacucccaccacuacaucauggucggcaacgagaccggccuggagcucacccugacgaacaccagcaucaucaaccacaaguucugcaaccuguccgacgcccacaagaagaaccucuacaaccacgcccugaugagcaucaucuccaccuuccaccugagcauccccaacuucaaccaguacgaggccauguccugcgacuucaacgggggcaagaucagcgugcaguacaaccucucccacagcuacgccguggacgcggccaaccacugcgggaccaucgccaacggcguccugcagacguucaugcggauggccuggggcggguccuacaucgcgcuggacagcggcaaggggaacugggacugcaucaugaccuccuaccaguaccucaucauccagaacaccaccugggaggaccacugccaguucagccgccccucccccaucggcuaccuggggcugcucagccagcggacgcgcgacaucuacaucagccggcgccugcugggcaccuucaccuggacccucuccgacagcgagggcaacgagacgcccgggggcuacugccugacccgguggaugcugaucgaggccgagcucaagugcuucgggaacaccgccguggccaagugcaacgagaagcacgacgaggaguucugcgacaugcugcgccuguucgacuucaacaagcaggccauccggcgccucaagaccccggcgcaggccaacauccagcugaucaacaaggccgugaacgcccugaucaacgaccagcucaucaugaagaaccaccuccgggacaucaugggcauccccuacugcaacuacuccaaguacugcuaccugaaccacacggucaccgggaagaccagccugccccgcugcugccugguguccaacggcagcuaccugaacgagacccacuucuccgacgacaucgagcagcaggccgacaacaugaucacggagcuccugcagaaggaguacauggaccggcagggcaagaccccgcuggggcugguggaccucuucgucuucagcaccuccuucuaccugaucagcaucuuccugcaccucgugaagauccccacccaccgccacgugaucggcaagcccugccccaagccgcaccggcugaaccacauggggaucugcuccugcggccuguacaagcaccccgggguccccgugaaguggaagcgcugaggacuagucccuguucccagagcccacuuuuuuuucuuuuuuugaaauaaaauagccugucuuucagaucuaaaaaaaaaaaaaaaaaaaaaaaaaaaaaaaaaaaaaaaaaaaaaaaaaaaaaaaaaaaaaaaaaaaaaaaaaaaaaaaaaaaaaaaaaaaaaaaaaaaa

SEQ ID NO: 31898 - RNA, 1721 nt, Artificial Sequence
  mRNA product Design a-1 (A100) comprising derived and/or modified sequence from LASV(Nig08-A19;Clade III)__ADU56618__GPCmut7 (opt1)
aggagagucccgcagucggcguccagcggcucugcuuguucgugugugugucguugcaggccuuauucaagcuuaccaugggccagaucgugaccuucuuccaggaggucccccacgugaucgaggaggugaugaacaucguccugaucgcccucagcauccuggccauccugaaggggcucuacaacaucgcgaccugcggccugaucgggcuggugacguuccuccugcuguccggccgcagcugcuccaugaccuacaaggggguguacgagcuccagacccuggagcugaacaugaacacccucaacaugacgaugccgcugagcugcaccaagaacaacucccaccacuacaucauggucggcaacgagaccggccuggagcucacccugacgaacaccagccugcuccaccacaaguucugcaaccuguccgacgcccacaagaagaaccuguacgaccacacccucaugagcaucaucuccaccuuccaccugagcauccccaacuucaaccaguacgaggccauguccugcgacuucaacgggggcaagaucacggugcaguacaaccugagccacuccuacgccaucgacgccgcgaaccacugcgggaccguggccaacggcguccuccagaccuucaugcggauggccuggggcgggagcuacaucgcccuggacuccggccgcgggaagugggacugcaucaugaccagcuaccaguaccugaucauccagaacacgaccugggaggaccacugccaguucucccggcccagccccaucggcuaccucgggcugcugucccagcgcacccgggacaucuacaucagccgccggcuccugggcaccuucacguggacccugagcgacuccgagggcaacgagacccccgggggcuacugccucacccgcuggaugcugaucgaggcggagcugaagugcuucgggaacacggccguggccaagugcaacgagaagcacgacgaggaguucugcgacaugcuccggcuguucgacuucaacaagcaggccauccgccggcugaaggccccggcgcagaugagcauccagcucaucaacaaggccgugaacgcccugaucaacgaccagcugaucaugaagaaccaccuccgcgacaucaugggcauccccuacugcaacuacuccaaguacugcuaccugaaccacaccagcaccgggcggaccucccugccccgcugcugccucgucagcaacggcuccuaccugaacgagacgcacuucagcgacgacaucgagcagcaggccgacaacaugaucaccgagaugcugcagaaggaguaccuggaccggcagggcaagaccccgcucgggcugguggaccuguucguguucuccaccagcuucuaccucaucuccaucuuccugcaccuggucaagauccccacgcaccgccacaucgugggcaagcccugccccaagccgcaccggcucaaccacauggggaucugcagcugcggccuguacaagcagcccggggugcccguccgcuggaagcggugaggacuagucccuguucccagagcccacuuuuuuuucuuuuuuugaaauaaaauagccugucuuucagaucuaaaaaaaaaaaaaaaaaaaaaaaaaaaaaaaaaaaaaaaaaaaaaaaaaaaaaaaaaaaaaaaaaaaaaaaaaaaaaaaaaaaaaaaaaaaaaaaaaaaa

SEQ ID NO: 31899 - RNA, 1724 nt, Artificial Sequence
  mRNA product Design a-1 (A100) comprising derived and/or modified sequence from LASV(G1180-SLE-2010;Clade IV)__AIT17168__GPCmut7 (opt1)
aggagagucccgcagucggcguccagcggcucugcuuguucgugugugugucguugcaggccuuauucaagcuuaccaugggccagaucgugaccuucuuccaggaggucccccacgugaucgaggaggugaugaacaucguccugaucgcccucagcauccuggccgugcugaaggggcucuacaacuucgcgaccugcggccugguggggcugcucacguuccugcugcucugcggccgcuccugcaccgccagccgguacaagggggucuacgagcugcagacccuggagcucaacauggagacccugaacaugacgaugccgcuguccugcaccaagaacaacagccaccacuacaucauggugggcaacgagaccggccucgagcugacccugacgaacaccuccaucaucaaccacaaguucugcaaccucagcgacgcccacaagaagaaccuguacgaccacgcccugauguccaucaucagcaccuuccaccucuccauccccaacuucaaccaguacgaggccaugagcugcgacuucaacgggggcaagaucuccgugcaguacaaccugagccacuccuacgcgggggacgccgccaaccacugcggcaccgucgccaacggggugcugcagacguucaugcgcauggcguggggcggcagcuacaucgcccucgacuccgggcacggcagcugggacugcaucaugaccuccuaccaguaccugaucauccagaacaccaccugggaggaccacugccaguucagccggcccucccccaucggguaccugggccuccugagccagcgcacgcgggacaucuacaucagccgccggcugcucggcaccuucaccuggacccuguccgacagcgaggggaaggacacgccgggcggguacugccugacccgcuggaugcucaucgaggccgagcugaagugcuucggcaacaccgccguggccaagugcaacgagaagcacgacgaggaguucugcgacaugcugcggcuguucgacuucaacaagcaggcgauccagcgccugaaggcccccgcccagauguccauccagcugaucaacaaggccgucaacgcccucaucaacgaccagcugaucaugaagaaccaccuccgggacaucauggggauccccuacugcaacuacagcaaguacugcuaccucaaccacaccacgaccggcaagaccucccugcccaagugcugccuggugagcaacggcuccuaccucaacgagacccacuucagcgacgacaucgagcagcaggcggacaacaugaucacggagaugcugcagaaggaguacauggagcgccaggggaagaccccgcugggccugguggaccucuucgucuucuccaccagcuucuaccugaucuccaucuuccugcaccucgugaagauccccacccaccggcacaucgugggcaagagcugccccaagccccaccgccugaaccacauggggaucugcuccugcgggcuguacaagcagccgggcguccccgugaaguggaagcggugaggacuagucccuguucccagagcccacuuuuuuuucuuuuuuugaaauaaaauagccugucuuucagaucuaaaaaaaaaaaaaaaaaaaaaaaaaaaaaaaaaaaaaaaaaaaaaaaaaaaaaaaaaaaaaaaaaaaaaaaaaaaaaaaaaaaaaaaaaaaaaaaaaaaa

SEQ ID NO: 31900 - RNA, 1724 nt, Artificial Sequence
  mRNA product Design a-1 (A100) comprising derived and/or modified sequence from LASV(G1442-SLE-2011;Clade IV)__AIT17180__GPCmut7 (opt1)
aggagagucccgcagucggcguccagcggcucugcuuguucgugugugugucguugcaggccuuauucaagcuuaccaugggccagaucgugaccuucuuccaggaggucccccacgugaucgaggaggugaugaacaucguccugaucgcccucagcauccuggccgugcugaaggggcucuacaacguggcgaccugcggccugaucgggcuggucacguuccuccugcugugcggccgcuccugcaccaccacccucuacaaggggguguacgagcugcagacgcuggagcucaacauggagacccugaacaugaccaugccgcugagcugcaccaagaacaacucccaccacuacauccgggugggcaacgagacgggccucgagcugacccugaccaacaccagcaucaucaaccacaaguucugcaaccucuccgacgcccacaagaagaaccuguacgaccacgcccugaugagcaucaucuccacguuccaccucagcauccccaacuucaaccaguacgaggccauguccugcgacuucaacgggggcaagaucagcguccaguacaaccugucccacagcuacgccggggacgcggccaaccacugcggcaccguggccaacggggugcugcagaccuucaugcgcauggccuggggcggcuccuacaucgcgcucgacagcgggcggggcaacugggacugcaucaugaccuccuaccaguaccugaucauccagaacacgaccugggacgaccacugccaguucagccgccccucccccaucggguaccugggccuccugagccagcggacccgcgacgucuacaucucccggcgccugcucggcaccuucacguggacccugagcgacagcgaggggaaggacaccccgggcggguacugccugacccgguggaugcucaucgaggccgagcugaagugcuucggcaacacggccguggccaagugcaacgagaagcacgacgaggaguucugcgacaugcugcgccucuucgacuucaacaagcaggccauccagcggcugaaggcgcccgcccagauguccauccagcugaucaacaaggccgugaacgcccucaucaacgaccagcugaucaugaagaaccaccuccgcgacaucauggggauccccuacugcaacuacagcaaguacugcuaccugaacaacaccgccaccggcaagaccucccugcccaagugcugccugaucagcaacggcuccuaccucaacgagacgcacuucagcgacgacaucgagcaggaggcggacaacaugaucaccgagaugcugcagaaggaguacauggagcggcaggggaagaccccgcugggccuggucgaccucuucguguucuccaccagcuucuaccugaucuccaucuuccugcaccucgugaagauccccacgcaccgccacaucgucggcaagagcugccccaagccccaccggcugaaccacauggggaucugcuccugcgggcuguacaagcagccgggcgugcccgugcgcuggaagcggugaggacuagucccuguucccagagcccacuuuuuuuucuuuuuuugaaauaaaauagccugucuuucagaucuaaaaaaaaaaaaaaaaaaaaaaaaaaaaaaaaaaaaaaaaaaaaaaaaaaaaaaaaaaaaaaaaaaaaaaaaaaaaaaaaaaaaaaaaaaaaaaaaaaaa

SEQ ID NO: 31901 - RNA, 1724 nt, Artificial Sequence
  mRNA product Design a-1 (A100) comprising derived and/or modified sequence from LASV(G3010-SLE-2013;Clade IV)__AIT17344__GPCmut7 (opt1)
aggagagucccgcagucggcguccagcggcucugcuuguucgugugugugucguugcaggccuuauucaagcuuaccaugggccagaucgugaccuucuuccaggaggucccccacgugaucgaggaggugaugaacaucguccugaucgcccucagcauccuggccgugcugaaggggcucuacaacuucgcgaccugcggccugguggggcuggucacguuccuccugcugugcggccgcuccugcaccaccagccucuacaaggggguguacgagcugcagacccuggagcucaacauggagacgcugaacaugaccaugccgcuguccugcaccaagaacaacagccaccacuacaucauggugggcaacgagaccggccucgagcugacgcugaccaacaccuccaucaucaaccacaaguucugcaaccucagcgacgcccacaagaagaaccuguacaaccacgcccugauguccaucaucagcaccuuccaccucuccauccccaacuucaaccaguacgaggccaugagcugcgacuucaacgggggcaagaucuccguccaguacaaccugagccacuccuacgccggggacgcggccagccacugcggcacgguggccaacggggugcugcagaccuucaugcggauggccuggggcggcuccuacaucgcgcucgacagcggguacggcaagugggacugcaucaugaccuccuaccaguaccugaucauccagaacaccacgugggaggaccacugccaguucagccgccccucccccaucggguaccugggccuccugagccagcggacccgcgacaucuacaucagccggcgccugcucggcaccuucaccuggacgcuguccgacagcgaggggaaggacaccccgggcggguacugccugacccgguggaugcucaucgaggccgagcugaagugcuucggcaacaccgccgucgccaagugcaacgagaagcacgacgaggaguucugcgacaugcugcgccucuucgacuucaacaagcaggccauccagcggcugaagacgcccgcgcagauguccauccagcugaucaacaaggccgugaacgcccucaucaacgaccagcugaucaugaagaaccaccuccgcgacaucauggggauccccuacugcaacuacagcaaguacugcuaccugaaccacaccaccaccggcaagacgucccugcccaagugcugccuggugagcaacggcuccuaccucaacgagacccacuucagcgacgacaucgagcagcaggccgacaacaugaucaccgagaugcugcagaaggaguacauggagcggcaggggaagaccccgcugggccuggucgaccucuucguguucuccacgagcuucuaccugaucuccaucuuccugcaccucgugaagauccccacccaccgccacaucgucggcaagagcugccccaagccccaccggcugaaccacauggggaucugcuccugcgggcuguacaagcagccgggcgugcccgugcgcuggaagcggugaggacuagucccuguucccagagcccacuuuuuuuucuuuuuuugaaauaaaauagccugucuuucagaucuaaaaaaaaaaaaaaaaaaaaaaaaaaaaaaaaaaaaaaaaaaaaaaaaaaaaaaaaaaaaaaaaaaaaaaaaaaaaaaaaaaaaaaaaaaaaaaaaaaaa

SEQ ID NO: 31902 - RNA, 1724 nt, Artificial Sequence
  mRNA product Design a-1 (A100) comprising derived and/or modified sequence from LASV(G502-SLE-2009;Clade IV)__AIT17126__GPCmut7 (opt1)
aggagagucccgcagucggcguccagcggcucugcuuguucgugugugugucguugcaggccuuauucaagcuuaccaugggccagaucgugaccuucuuccaggaggucccccacgugaucgaggaggugaugaacaucguccugaucgcccucagcauccuggccgugcugaaggggcucuacaacuucgcgaccugcggccugguggggcugcucacguuccugcugcucugcggccgcuccugcaccaccgggcuguacaagggcgucuacgagcugcagacccucgagcugaacauggagacgcugaacaugaccaugccgcucagcugcaccaagaacaacucccaccacuacaucauggugggcaacgagaccgggcuggagcugacgcucaccaacaccagcaucaucaaccacaaguucugcaaccuguccgacgcccacaagaagaaccuguacgaccacgcccucaugagcaucaucuccaccuuccaccugagcauccccaacuucaaccaguacgaggccauguccugcgacuucaacggcgggaagaucagcgugcaguacaaccugucccacagcuacgccggcgacgcggccgaccacugcgggacggucgccaacggcgugcuccagaccuucaugcggauggccuggggcggguccuacaucgcgcuggacagcggccgcgggcggugggacugcaucaugaccuccuaccaguaccugaucauccagaacaccacgugggaggaccacugccaguucagccgccccucccccaucggcuaccucggccugcugagccagcggacccgcgacaucuacaucucccggcgccuccuggggaccuucaccuggacgcugagcgacagcgagggcaaggacacccccgggggcuacugccucacccgguggaugcugaucgaggccgagcugaagugcuucgggaacaccgccguggccaagugcaacgagaagcacgacgaggaguucugcgacaugcuccgccuguucgacuucaacaagcaggccauccagcggcugaaggcgccggcccagauguccauccagcucaucaacaaggccgucaacgcccugaucaacgaccagcuggugaugaagaaccaccuccgcgacaucaugggcauccccuacugcaacuacagccgguacugcuaccugaaccacacgaccaccggccgcaccucccugcccaagugcugccucgugagcaacggguccuaccugaacgagacgcacuucagcgacgacaucgagcagcaggccgacaacaugaucaccgagaugcugcagaaggaguacauggagcggcagggcaagaccccgcuggggcucgucgaccuguucguguucuccaccagcuucuaccugaucuccaucuuccuccaccuggugaagauccccacgcaccgccacaucgucggcaagagcugccccaagccccaccggcugaaccacauggggaucugcuccugcggccucuacaagcagccgggcgugcccgugaaguggaagcgcugaggacuagucccuguucccagagcccacuuuuuuuucuuuuuuugaaauaaaauagccugucuuucagaucuaaaaaaaaaaaaaaaaaaaaaaaaaaaaaaaaaaaaaaaaaaaaaaaaaaaaaaaaaaaaaaaaaaaaaaaaaaaaaaaaaaaaaaaaaaaaaaaaaaaa

SEQ ID NO: 31903 - RNA, 1724 nt, Artificial Sequence
  mRNA product Design a-1 (A100) comprising derived and/or modified sequence from LASV(G733-SLE-2010;Clade IV)__AIT17154__GPCmut7 (opt1)
aggagagucccgcagucggcguccagcggcucugcuuguucgugugugugucguugcaggccuuauucaagcuuaccaugggccagaucgugaccuucuuccaggaggucccccacgugaucgaggaggugaugaacaucguccugaucgcccucagcauccuggccgugcugaaggggcucuacaacuucgcgaccugcggcaucguggggcuggucuccuuccugcuccugugcggccgcagcugcacgaccucccuguacaaggggguguacgagcuccagacccuggagcugaacauggagacccucaacaugacgaugccgcugagcugcaccaagaacaacucccaccacuacaucauggugggcaacgagaccggccuggagcucacccugacgaacaccagcaucaucaaccacaaguucugcaaccuguccgacgcccacaagaagaaccucuacgaccacgcccugaugagcaucaucuccaccuuccaccugagcauccccaacuucaaccaguacgaggccauguccugcgacuucaacgggggcaagaucagcguccaguacaaccucucccacagcuacgccggggacgcggccaaccacugcggcaccaucgccaacggggugcugcagacguucaugcggauggccuggggcggcuccuacaucgcgcuggacagcgggcgcgaccggugggacugcaucaugaccuccuaccaguaccucaucauccagaacaccaccugggaggaccacugccaguucagccgccccucccccaucggcuaccuggggcugcucagccagcggacgcgcgacaucuacaucagccggcgccugcugggcaccuucaccuggacccucuccgacagcgagggcaaggacacgcccgggggcuacugccugacccgguggaugcugaucgaggccgagcucaagugcuucgggaacaccgccguggccaagugcaacgagaagcacgacgaggaguucugcgacaugcugcgccuguucgacuucaacaagcaggccauccagcggcucaaggcgccggcccagauguccauccagcugaucaacaaggccgucaacgcccugaucaacgaccagcucaucaugaagaaccaccuccgcgacaucaugggcauccccuacugcaacuacagcaaguacugcuaccugaaccacaccacgaccgggaagaccucccugcccaagugcugccuggugagcaacggcuccuaccugaacgagacccacuucagcgacgacaucgagcagcaggccgacaacaugaucacggagaugcuccagaaggaguacauggagcggcagggcaagaccccgcuggggcugguggaccuguucgucuucuccaccagcuucuaccucaucuccaucuuccugcaccuggugaagauccccacccaccgccacguggucggcaagagcugccccaagccccaccggcucaaccacauggggaucugcuccugcggccuguacgggcagccgggcgugcccgugaaguggaagcgcugaggacuagucccuguucccagagcccacuuuuuuuucuuuuuuugaaauaaaauagccugucuuucagaucuaaaaaaaaaaaaaaaaaaaaaaaaaaaaaaaaaaaaaaaaaaaaaaaaaaaaaaaaaaaaaaaaaaaaaaaaaaaaaaaaaaaaaaaaaaaaaaaaaaaa

SEQ ID NO: 31904 - RNA, 1724 nt, Artificial Sequence
  mRNA product Design a-1 (A100) comprising derived and/or modified sequence from MOPV/LASV reassortant(IGS-1;Clade IV)__AFY05576__GPCmut7 (opt1)
aggagagucccgcagucggcguccagcggcucugcuuguucgugugugugucguugcaggccuuauucaagcuuaccaugggccagaucgugaccuucuuccaggaggucccccacgugaucgaggaggugaugaacaucguccugaucgcccucagcgugcuggccgugcugaaggggcucuacaacuucgcgaccugcggccuggucgggcuggugacguuccuccugcugugcggccgcuccugcaccaccagccucuacaaggggguguacgagcugcagacccuggagcucaacauggagacgcugaacaugaccaugccgcuguccugcaccaagaacaacagccaccacuacaucauggucggcaacgagaccggccucgagcugacgcugaccaacaccuccaucaucaaccacaaguucugcaaccucagcgacgcccacaagaagaaccuguacgaccacgcccugauguccaucaucagcaccuuccaccucuccauccccaacuucaaccaguacgaggccaugagcugcgacuucaacgggggcaagaucuccgugcaguacaaccugagccacuccuacgccggggacgcggccaaccacugcggcacgguggccaacgggguccugcagaccuucaugcggauggccuggggcggcagcuacaucgcgcucgacuccgggcgcggcaacugggacugcaucaugaccagcuaccaguaccugaucauccagaacaccacgugggaggaccacugccaguucucccggcccagccccaucggguaccugggccuccugucccagcgcacccgggacaucuacaucagccgccggcugcucggcaccuucaccuggacgcugagcgacuccgagggggaggacaccccgggcggguacugccugacccgcuggaugcucaucgaggccgagcugaagugcuucggcaacaccgccguggccaagugcaacgagaagcacgacgaggaguucugcgacaugcugcggcuguucgacuucaacaagcaggccauccagcgccugaaggcgcccgcccagaugagcauccagcugaucaacaaggccgugaacgcccucaucaacgaccagcugaucaugaagaaccaccuccgggacaucauggggauccccuacugcaacuacuccaaguacugcuaccucaaccacacgaccaccggccgcaccagccugcccaagugcugccuggucuccaacggcagcuaccucaacgagacgcacuucuccgacgacaucgagcagcaggccgacaacaugaucaccgagaugcugcagaaggaguacauggagcggcaggggaagaccccgcugggccugguggaccucuucguguucagcaccuccuucuaccugaucagcaucuuccugcaccucgucaagauccccacgcaccgccacaucguggggaaguccugccccaagccccaccggcugaaccacaugggcaucugcagcugcgggcuguacaagcagccgggcgugcccgucaaguggaagcgcugaggacuagucccuguucccagagcccacuuuuuuuucuuuuuuugaaauaaaauagccugucuuucagaucuaaaaaaaaaaaaaaaaaaaaaaaaaaaaaaaaaaaaaaaaaaaaaaaaaaaaaaaaaaaaaaaaaaaaaaaaaaaaaaaaaaaaaaaaaaaaaaaaaaaa

SEQ ID NO: 31905 - RNA, 1724 nt, Artificial Sequence
  mRNA product Design a-1 (A100) comprising derived and/or modified sequence from LASV(LM765-SLE-2012;Clade IV)__AIT17814__GPCmut7 (opt1)
aggagagucccgcagucggcguccagcggcucugcuuguucgugugugugucguugcaggccuuauucaagcuuaccaugggccagaucgugaccuucuuccaggaggucccccacgugaucgaggaggugaugaacaucguccugaucgcccucagcauccuggccgugcugaaggggcucuacaacuucgcgaccugcggccugguggggcuggucacguuccuccugcugugcggccgcuccugcaccaccagccucuacaaggggguguacgagcugcagacccuggagcucaacauggagacgcugaacaugaccaugccgcuguccugcaccaagaacaacagccaccacuacaucauggugggcaacgagaccggccucgagcugacgcugaccaacaccuccaucaucgaccacaaguucugcaaccucagcgacgcccaccggaagaaccuguacgaccacgcccugauguccaucaucagcaccuuccaccucuccauccccaacuucaaccaguacgaggccaugagcugcgacuucaacgggggcaagaucuccguccaguacaaccugagccacuccuacgccaaggacgcggccgaccacugcgggacgguggccaacggcgugcugcagaccuucaugcgcauggccuggggcgggagcuacaucgcgcucgacuccggccgggggcgcugggacugcaucaugaccagcuaccaguaccugaucauccagaacaccacgugggaggaccacugccaguucucccggcccagccccaucggcuaccuggggcuccugucccagcgcacccgggacaucuacaucagccgccggcugcucggcaccuucaccuggacgcugagcgacuccgagggcaaggacacccccgggggcuacugccugacccgcuggaugcucaucgaggccgagcugaagugcuucgggaacaccgccgucgccaagugcaacgagaagcacgacgaggaguucugcgacaugcugcggcuguucgacuucaacaagcaggccauccagcgccugaaggcgccggcccagaugagcauccagcugaucaacaaggccgugaacgcccucaucaacgaccagcugaucaugaagaaccaccuccgggacaucaugggcauccccuacugcaacuacuccaaguacugcuaccucaaccacacgaccaccgggaagaccagccugcccaagugcugccugguguccaacggcagcuaccucaacgagacgcacuucuccgacgacaucgagcagcaggccgacaacaugaucaccgagaugcugcagaaggaguacauggagcgccagggcaagaccccgcuggggcuggucgaccucuucguguucagcaccuccuucuaccugaucagcaucuuccugcaccucgugaagauccccacgcaccggcacaucgucggcaagcccugccccaagccgcaccgccugaaccacauggggaucugcuccugcggccuguacaagcagcccggggugcccgugaaguggaagcggugaggacuagucccuguucccagagcccacuuuuuuuucuuuuuuugaaauaaaauagccugucuuucagaucuaaaaaaaaaaaaaaaaaaaaaaaaaaaaaaaaaaaaaaaaaaaaaaaaaaaaaaaaaaaaaaaaaaaaaaaaaaaaaaaaaaaaaaaaaaaaaaaaaaaa

SEQ ID NO: 31906 - RNA, 1724 nt, Artificial Sequence
  mRNA product Design a-1 (A100) comprising derived and/or modified sequence from LASV(LM776-SLE-2012;Clade IV)__AIT17824__GPCmut7 (opt1)
aggagagucccgcagucggcguccagcggcucugcuuguucgugugugugucguugcaggccuuauucaagcuuaccaugggccagaucgugaccuucuuccaggaggucccccacgugaucgaggaggugaugaacaucguccugaucgcccucagcauccuggccgugcugaaggggcucuacaacuucgcgaccugcggccugguggggcuggucacguuccuccugcugugcggccgcuccugcaccaccagcguguacaaggggguguacgagcuccagacccuggagcugaacauggagacgcucaacaugaccaugccgcuguccugcaccaagaacaacagccaccacuacaucauggucggcaacgagaccggccuggagcucacgcugaccaacaccuccaucaucaaccacaaguucugcaaccugagcgacgcccacaagaagaaccucuacgaccacgcccugauguccaucaucagcaccuuccaccuguccauccccaacuucaaccaguacgaggccaugagcugcgacuucaacgggggcaagaucuccgugcaguacaaccucagccacuccuacgccggggacgcggccaaccacugcggcacgguggccaacgggguccugcagaccuucaugcggauggccuggggcggcagcuacaucgcgcuggacuccgggcacggcaagugggacugcaucaugaccagcuaccaguaccucaucauccagaacaccacgugggaggaccacugccaguucucccgccccagccccaucggguaccugggccugcucucccagcggacccgcgacaucuacaucagccggcgccugcugggcaccuucaccuggacgcucagcgacuccgaggggaaggacaccccgggcggguacugccugacccgguggaugcugaucgaggccgagcucaagugcuucggcaacaccgccguggccaagugcaacgagaagcacgacgaggaguucugcgacaugcugcgccuguucgacuucaacaagcaggccauccagcggcucaaggcgcccgcccagaugagcauccagcugaucaacaaggccgugaacgcccugaucaacgaccagcucaucaugaagaaccaccuccgcgacaucauggggauccccuacugcaacuacuccaaguacugcuaccugaaccacacgaccaccggcaagaccagccugcccaagugcugccuggucuccaacggcagcuaccugaacgagacgcacuucuccgacgacaucgagcagcaggccgacaacaugaucaccgagaugcuccagaaggaguacauggagcggcaggggaagaccccgcugggccugguggaccuguucguguucagcaccuccuucuaccucaucagcaucuuccugcaccuggucaagauccccacgcaccgccacaucguggggaaguccugccccaagccccaccggcucaaccacaugggcaucugcagcugcgggcuguacaagcagccgggcgugcccguccgcuggaagcggugaggacuagucccuguucccagagcccacuuuuuuuucuuuuuuugaaauaaaauagccugucuuucagaucuaaaaaaaaaaaaaaaaaaaaaaaaaaaaaaaaaaaaaaaaaaaaaaaaaaaaaaaaaaaaaaaaaaaaaaaaaaaaaaaaaaaaaaaaaaaaaaaaaaaa

SEQ ID NO: 31907 - RNA, 1724 nt, Artificial Sequence
  mRNA product Design a-1 (A100) comprising derived and/or modified sequence from LASV(Mad39;Clade IV)__ANH09722__GPCmut7 (opt1)
aggagagucccgcagucggcguccagcggcucugcuuguucgugugugugucguugcaggccuuauucaagcuuaccaugggccagaucgugaccuucuuccaggaggucccccacgugaucgaggaggugaugaacaucguccugaucgcccucagcauccuggccgugcugaaggggcucuacaacguggcgaccugcggccugaucgggcuggucacguuccuccugcugugcggccgcuccugcaccaccacccucuacaaggggguguacgagcugcaggcccuggagcucaacauggagacgcugaacaugaccaugccgcugagcugcaccaagaacaacucccaccacuacauccgggugggcaacgagaccggccucgagcugacgcugaccaacaccagccucaucaaccacaaguucugcaaccuguccgacgcccacaagaagaaccuguacgaccacgcccucaugagcaucaucuccaccuuccaccugagcauccccaacuucaaccaguacgaggccauguccugcgacuucaacgacgggaagaucagcguccaguacaaccugucccacacguacgcgggcgacaccgccaaccacugcgggaccguggccaacggcgugcuccagaccuucaugcgcauggccuggggcgggagcuacaucgcgcuggacuccggccgcgggggcugggacugcaucaugacgagcuaccaguaccugaucauccagaacaccaccugggaggaccacugccaguucucccggcccagccccaucggguaccucggccugcugucccagcggacccgcgacaucuacaucagccggcgccuccugggcacguucaccuggacccuguccgacagcgaggggaaggacaccccgggcggguacugccucacgcgguggaugcugaucgaggccgagcugaagugcuucggcaacaccgccgucgccaagugcaacgagaagcacgacgaggaguucugcgacaugcuccgccuguucgacuucaacaagcaggccauccagcggcugaaggcgcccgcccagaugagcauccagcucaucaacaaggccgugaacgcccugaucaacgaccagcugaucaugaagaaccaccuccgcgacaucauggggauccccuacugcaacuacuccaaguacugcuaccugaaccacaccgugaccggcaagacgagccugcccaagugcugccucgucuccaacggcagcuaccugaacgagacccacuucuccgacgacaucgagcagcaggccgacaacaugaucaccgagaugcugcagaaggaguacauggagcggcaggggaagaccccgcugggccucguggaccuguucguguucagcacguccuucuaccugaucagcaucuuccuccaccuggucaagauccccacccaccgccacgugguggggaagcccugccccaagccgcaccggcugaaccacaugggcaucugcuccugcggguucuacaagcagcccggcguccccgugcgcuggaagcggugaggacuagucccuguucccagagcccacuuuuuuuucuuuuuuugaaauaaaauagccugucuuucagaucuaaaaaaaaaaaaaaaaaaaaaaaaaaaaaaaaaaaaaaaaaaaaaaaaaaaaaaaaaaaaaaaaaaaaaaaaaaaaaaaaaaaaaaaaaaaaaaaaaaaa

SEQ ID NO: 31908 - RNA, 1724 nt, Artificial Sequence
  mRNA product Design a-1 (A100) comprising derived and/or modified sequence from LASV(Z0947-SLE-2011;Clade IV)__AIT17840__GPCmut7 (opt1)
aggagagucccgcagucggcguccagcggcucugcuuguucgugugugugucguugcaggccuuauucaagcuuaccaugggccagaucgugaccuucuuccaggaggucccccacgugaucgaggaggugaugaacaucguccugaucgcccucagcauccuggccgugcugaaggggcucuacaacuucgcgaccugcggccugguggggcuggucacguuccuccugcugugcggccgcuccugcaccaucagccucuacaaggggguguacgagcugcagacccuggagcucaacauggagacccugaacaugacgaugccgcuguccugcaccaagaacaacagccaccacuacaucauggugggcaacgagaccggccucgagcugacccugacgaacaccuccaucaucaaccacaaguucugcaaccucagcgacgcccacaagaagaaccuguacgaccacgcccugauguccaucaucagcaccuuccaccucuccauccccaacuucaaccaguacgaggccaugagcugcgacuucaacgggggcaagaucuccguccaguacaaccugagccacuccuacgccggggacgcggccaaccacugcggcaccguggccaacggggugcugcagacguucaugcggauggccuggggcggcagcuacaucgcgcucgacuccgggcgcgaccggugggacugcaucaugaccagcuaccaguaccugaucauccagaacaccaccugggaggaccacugccaguucucccgccccagccccaucggcuaccuggggcuccugucccagcggacgcgcgacaucuacaucagccggcgccugcucggcaccuucaccuggacccugagcgacuccgagggcaaggacacgcccgggggcuacugccugacccgguggaugcucaucgaggccgagcugaagugcuucgggaacaccgccgucgccaagugcaacgagaagcacgacgaggaguucugcgacaugcugcgccucuucgacuucaacaagcaggccauccagcggcugaaggcgccggcccagaugagcauccagcugaucaacaaggccgugaacgcccucaucaacgaccagcugaucaugaagaaccaccuccgcgacaucaugggcauccccuacugcaacuacuccaaguacugcuaccugaaccacaccacgaccgggaagaccagccugcccaagugcugccugguguccaacggcagcuaccucaacgagacccacuucuccgacgacaucgagcagcaggccgacaacaugaucacggagaugcugcagaaggaguacauggagcggcagggcaagaccccgcuggggcuggucgaccucuucguguucagcaccuccuucuaccugaucagcaucuuccugcaccucgugaagauccccacccaccgccacaucgucggcaagcccugccccaagccgcaccggcugaaccacauggggaucugcuccugcggccuguacaagcagcccggggugcccgugaaguggaagcgcugaggacuagucccuguucccagagcccacuuuuuuuucuuuuuuugaaauaaaauagccugucuuucagaucuaaaaaaaaaaaaaaaaaaaaaaaaaaaaaaaaaaaaaaaaaaaaaaaaaaaaaaaaaaaaaaaaaaaaaaaaaaaaaaaaaaaaaaaaaaaaaaaaaaaa

SEQ ID NO: 31909 - RNA, 1724 nt, Artificial Sequence
  mRNA product Design a-1 (A100) comprising derived and/or modified sequence from LASV(Josiah;Clade IV)__NP_694870__GPCmut7 (opt4)
aggagagucccgcagucggcguccagcggcucugcuuguucgugugugugucguugcaggccuuauucaagcuuaccaugggccagaucgugaccuucuuccaggaggugccccacgugaucgaggaggugaugaacaucgugcugaucgcccugagcgugcuggccgugcugaagggccuguacaacuucgccaccugcggccuggugggccuggugaccuuccugcugcugugcggcagaagcugcaccaccagccuguacaagggcguguacgagcugcagacccuggagcugaacauggagacccugaacaugaccaugccccugagcugcaccaagaacaacagccaccacuacaucauggugggcaacgagaccggccuggagcugacccugaccaacaccagcaucaucaaccacaaguucugcaaccugagcgacgcccacaagaagaaccuguacgaccacgcccugaugagcaucaucagcaccuuccaccugagcauccccaacuucaaccaguacgaggccaugagcugcgacuucaacggcggcaagaucagcgugcaguacaaccugagccacagcuacgccggcgacgccgccaaccacugcggcaccguggccaacggcgugcugcagaccuucaugagaauggccuggggcggcagcuacaucgcccuggacagcggcagaggcaacugggacugcaucaugaccagcuaccaguaccugaucauccagaacaccaccugggaggaccacugccaguucagcagacccagccccaucggcuaccugggccugcugagccagagaaccagagacaucuacaucagcagaagacugcugggcaccuucaccuggacccugagcgacagcgagggcaaggacacccccggcggcuacugccugaccagauggaugcugaucgaggccgagcugaagugcuucggcaacaccgccguggccaagugcaacgagaagcacgacgaggaguucugcgacaugcugagacuguucgacuucaacaagcaggccauccagagacugaaggcccccgcccagaugagcauccagcugaucaacaaggccgugaacgcccugaucaacgaccagcugaucaugaagaaccaccugagagacaucaugggcauccccuacugcaacuacagcaaguacugcuaccugaaccacaccaccaccggcagaaccagccugcccaagugcugccuggugagcaacggcagcuaccugaacgagacccacuucagcgacgacaucgagcagcaggccgacaacaugaucaccgagaugcugcagaaggaguacauggagagacagggcaagaccccccugggccugguggaccuguucguguucagcaccagcuucuaccugaucagcaucuuccugcaccuggugaagauccccacccacagacacaucgugggcaagagcugccccaagccccacagacugaaccacaugggcaucugcagcugcggccuguacaagcagcccggcgugcccgugaaguggaagagaugaggacuagucccuguucccagagcccacuuuuuuuucuuuuuuugaaauaaaauagccugucuuucagaucuaaaaaaaaaaaaaaaaaaaaaaaaaaaaaaaaaaaaaaaaaaaaaaaaaaaaaaaaaaaaaaaaaaaaaaaaaaaaaaaaaaaaaaaaaaaaaaaaaaaa

SEQ ID NO: 31910 - RNA, 1721 nt, Artificial Sequence
  mRNA product Design a-1 (A100) comprising derived and/or modified sequence from LASV(LP;Clade I)__AAF86701__GPCmut7 (opt4)
aggagagucccgcagucggcguccagcggcucugcuuguucgugugugugucguugcaggccuuauucaagcuuaccaugggccagaucaucaccuucuuccaggaggugccccacgugaucgaggaggugaugaacaucgugcugaucgcccugagccugcuggccauccugaagggccuguacaacaucgccaccugcggcaucaucggccugguggccuuccuguuccugugcggcaagagcugcagccugacccugaagggcggcuacgagcugcagacccuggagcugaacauggagacccugaacaugaccaugccccugagcugcaccaagaacagcagccaccacuacaucagagugggcaacgagaccggccuggagcugacccugaccaacaccagcaucaucaaccacaaguucugcaaccugagcgacgcccacaagaagaaccuguacgaccacgcccugaugagcaucaucagcaccuuccaccugagcauccccaacuucaaccaguacgaggccaugagcugcgacuucaacggcggcaagaucagcgugcaguacaaccugagccacagcuacgccggcgacgccgccgagcacugcggcaccguggccaacggcgugcugcagaccuucaugagaauggccuggggcggcagauacaucgcccuggacagcggcaagggcaacugggacugcaucaugaccagcuaccaguaccugaucauccagaacaccaccugggaggaccacugccaguucagcagacccagccccaucggcuaccugggccugcugagccagagaaccagagacaucuacaucagcagaagacugcugggcaccuucaccuggacccugagcgacagcgagggcaacgagacccccggcggcuacugccugaccagauggaugcugaucgaggccgagcugaagugcuucggcaacaccgccguggccaagugcaacgagaagcacgacgaggaguucugcgacaugcugagacuguucgacuucaacaagcaggccaucagaagacugaaggcccccgcccagaugagcauccagcugaucaacaaggccgugaacgcccugaucaacgaccagcugaucaugaagaaccaccugagagacaucaugggcauccccuacugcaacuacagcaaguacugcuaccugaaccacaccagcagcggcagaaccagccugcccaagugcugccugaucagcaacggcagcuaccugaacgagacccaguucagcgacgacaucgagcagcaggccgacaacaugaucaccgagaugcugcagaaggaguacaucgagagacagggcaagaccccccugggccugguggacaucuucaucuucagcaccagcuucuaccugaucagcaucuuccugcaccugaucaagauccccacccacagacacaucgugggcaagcccugccccaagccccacagacugaaccacaugggcgugugcagcugcggccuguacaagcaccccggcgugcccaccaaguggaagagaugaggacuagucccuguucccagagcccacuuuuuuuucuuuuuuugaaauaaaauagccugucuuucagaucuaaaaaaaaaaaaaaaaaaaaaaaaaaaaaaaaaaaaaaaaaaaaaaaaaaaaaaaaaaaaaaaaaaaaaaaaaaaaaaaaaaaaaaaaaaaaaaaaaaaa

SEQ ID NO: 31911 - RNA, 1721 nt, Artificial Sequence
  mRNA product Design a-1 (A100) comprising derived and/or modified sequence from LASV(803213;Clade II)__AAF86703__GPCmut7 (opt4)
aggagagucccgcagucggcguccagcggcucugcuuguucgugugugugucguugcaggccuuauucaagcuuaccaugggccagaucaucaccuucuuccaggaggugccccacgugaucgaggaggugaugaacaucgugcugaucgcccugagccugcuggccauccugaagggcaucuacaacguggccaccugcggccuguucggccugaucagcuuccugcugcugugcggcagaagcugcagcgugaccuacaagggcguguacgagcugcagacccuggagcugaacauggccaaccugaacaugaccaugccccugagcugcaccaagaacaacagccaccacuacaucauggugggcaacgagaccggccuggagcugacccugaccaacaccagcaucaucaaccacaaguucugcaaccugagcgacgcccacaagaagaaccuguacgaccacgcccugaugagcaucaucagcaccuuccaccugagcauccccaacuucaaccaguacgaggccaugagcugcgacuucaacggcggcaagaucagcgugcaguacaaccugagccacagcuucgccguggacgccgccaaccacugcggcaccaucgccaacggcgugcugcagaccuucaugagaauggccuggggcggcagcuacaucgcccuggacagcggcaagggcaacugggacugcaucaugaccagcuaccaguaccugaucauccagaacaccaccugggaggaccacugccaguucagcagacccagccccaucggcuaccugggccugcugagccagagaaccagagacaucuacaucagcagaagacugcugggcaccuucaccuggacccugagcgacagcgagggcaacgaggcccccggcggcuacugccugaccagauggaugcugaucgaggccgagcugaagugcuucggcaacaccgccguggccaagugcaacgagaagcacgacgaggaguucugcgacaugcugagacuguucgacuucaacaagcaggccaucaagagacugaagacccccgcccagaugagcauccagcugaucaacaaggccgugaacgcccugaucaacgaccagcugaucaugaagaaccaccugagagacaucaugggcauccccuacugcaacuacagcagauacugcuaccugaaccacaccgugaccggcaagaccagccugcccagaugcugccuggugagcaacggcagcuaccugaacgagacccacuucagcgacgacaucgagcagcaggccgacaacaugaucaccgagaugcugcagaaggaguacauggacagacagggcaagaccccccugggccugguggaccuguucguguucagcaccagcuucuaccugaucagcaucuuccugcaccuggugaagauccccacccacagacacaucgugggcaagcccugccccaagccccacagacugaaccacaugggcaucugcagcugcggccuguacaagcaccccggcgugcccgugaaguggaagagaugaggacuagucccuguucccagagcccacuuuuuuuucuuuuuuugaaauaaaauagccugucuuucagaucuaaaaaaaaaaaaaaaaaaaaaaaaaaaaaaaaaaaaaaaaaaaaaaaaaaaaaaaaaaaaaaaaaaaaaaaaaaaaaaaaaaaaaaaaaaaaaaaaaaaa

SEQ ID NO: 31912 - RNA, 1721 nt, Artificial Sequence
  mRNA product Design a-1 (A100) comprising derived and/or modified sequence from LASV(GA391;Clade III)__CAA36645__GPCmut7 (opt4)
aggagagucccgcagucggcguccagcggcucugcuuguucgugugugugucguugcaggccuuauucaagcuuaccaugggccagaucgugaccuucuuccaggaggugccccacgugaucgaggaggugaugaacaucgugcugaucgcccugagcauccuggccauccugaagggccuguacaacguggccaccugcggccugaucggccuggugaccuuccugcugcugagcggcagaagcugcagccugaucuacaagggcaccuacgagcugcagacccuggagcugaacauggagacccugaacaugaccaugccccugagcugcaccaagaacaacagccaccacuacaucagagugggcaacgagaccggccuggagcugacccugaccaacaccagcauccugaaccacaaguucugcaaccugagcgacgcccacaagagaaaccuguacgaccacagccugaugagcaucaucagcaccuuccaccugagcauccccaacuucaaccaguacgaggccaugagcugcgacuucaacggcggcaagaucaccgugcaguacaaccugagccacagcuucgccguggacgccgccggccacugcggcacccuggccaacggcgugcugcagaccuucaugagaauggccuggggcggcagcuacaucgcccuggacagcggcagaggcaacugggacugcaucaugaccagcuaccaguaccugaucauccagaacaccaccugggacgaccacugccaguucagcagacccagccccaucggcuaccugggccugcugagccagagaaccagagacaucuacaucagcagaagacugcugggcaccuucaccuggacccugagcgacagcgagggcaacgagacccccggcggcuacugccugaccagauggaugcugaucgaggccgagcugaagugcuucggcaacaccgccguggccaagugcaacgagaagcacgacgaggaguucugcgacaugcugagacuguucgacuucaacaagcaggccaucagaagacugaagacccccgcccagaugagcauccagcugaucaacaaggccgugaacgcccugaucaacgaccagcugaucaugaagaaccaccugagagacaucaugggcauccccuacugcaacuacagcagauacugcuaccugaaccacaccagcaccggcaagaccagccugcccagaugcugccugaucagcaacggcagcuaccugaacgagaccaaguucagcgacgacaucgagcagcaggccgacaacaugaucaccgagaugcugcagaaggaguacaucgacagacagggcaagaccccccugggccugguggaccuguucguguucagcaccagcuucuaccugaucagcaucuuccugcaccuggugaagauccccacccacagacacaucgugggcaagcccugccccaagccccacagacugaaccacaugggcaucugcagcugcggccuguacaagcagcccggcgugcccgugagauggaagagaugaggacuagucccuguucccagagcccacuuuuuuuucuuuuuuugaaauaaaauagccugucuuucagaucuaaaaaaaaaaaaaaaaaaaaaaaaaaaaaaaaaaaaaaaaaaaaaaaaaaaaaaaaaaaaaaaaaaaaaaaaaaaaaaaaaaaaaaaaaaaaaaaaaaaa

SEQ ID NO: 31913 - RNA, 1724 nt, Artificial Sequence
  mRNA product Design a-1 (A100) comprising derived and/or modified sequence from LASV(AV;Clade V)__CCA30314__GPCmut7 (opt4)
aggagagucccgcagucggcguccagcggcucugcuuguucgugugugugucguugcaggccuuauucaagcuuaccaugggccagaucgugaccuucuuccaggaggugccccacgugaucgaggaggugaugaacaucgugcugaucgcccugagcauccuggccgugcugaagggccuguacaacaucgccaccugcggccugaucggccugaucaccuuccugcugcugugcggcagaagcugcagcagcaaccuguacaagggcguguacgagcugcagagccuggaccugaacauggagacccugaacaugaccaugccccugagcugcaccaagaacaacagccaccacuacaucagagugggcaacgacaccggccuggagcugacccugaccaacaccagcauccugaaccacaaguucugcaaccugagcgacgcccacaagaaggaccuguacgaccacgcccugaugagcaucaucagcaccuuccaccugagcauccccaacuucaaccaguacgaggccaugagcugcgacuucaacggcggcaagaucagcgugcaguacaaccugagccacagcuacgccaucgacgccgccaaccacugcggcaccguggccaacggcauccugcagaccuucaugagaauggccuggggcggcagcuacaucgcccuggacagcggcagaggcaacugggacugcaucaugaccagcuaccaguaccugaucauccagaacaccaccugggagaaccacugccaguucagcagacccagccccaucggcuaccugggccugcugagccagagaaccagagacaucuacaucagcagaagacugcugggcaccuucaccuggacccugagcgacagcgagggcaacgccacccccggcggcuacugccugaccagauggaugcugaucgaggccgagcugaagugcuucggcaacaccgccguggccaagugcaacgagaagcacgacgaggaguucugcgacaugcugagacuguucgacuucaacaagcaggccaucagcagacugaagagccccgcccagaugagcauccagcugaucaacaaggccgugaacgcccugaucaacgaccagcugaucaugaagaaccaccugagagacaucaugggcauccccuacugcaacuacagcaaguacugcuaccugaaccacaccaucaccggcaagaccagccugcccaagugcugccuggugagcaacggcagcuaccugaacgagacccacuucagcgacgacaucgagcagcaggccgacaacaugaucaccgagaugcugcagaaggaguacauggagagacagggcaagaccccccugggccugguggaccuguucguguucagcaccagcuucuaccugaucagcaucuuccugagacuggugaagauccccacccacagacacaucgugggcaagcccugccccaagccccacagacugaaccacaugggcaucugcagcugcggccuguacaagcagcccggcgugcccgugagauggaagagaugaggacuagucccuguucccagagcccacuuuuuuuucuuuuuuugaaauaaaauagccugucuuucagaucuaaaaaaaaaaaaaaaaaaaaaaaaaaaaaaaaaaaaaaaaaaaaaaaaaaaaaaaaaaaaaaaaaaaaaaaaaaaaaaaaaaaaaaaaaaaaaaaaaaaa

SEQ ID NO: 31914 - RNA, 1721 nt, Artificial Sequence
  mRNA product Design a-1 (A100) comprising derived and/or modified sequence from LASV(Togo/2016/7082;Clade VI)__AMR44577__GPCmut7 (opt4)
aggagagucccgcagucggcguccagcggcucugcuuguucgugugugugucguugcaggccuuauucaagcuuaccaugggccagaucaucaccuucuuccaggaggugccccacgugaucgaggaggugaugaacaucgugcugaucgcccugagccugcuggccauccugaagggcguguacaacguggccaccugcggcaucaucggccuggugaccuuccuguuccugugcggcagaagcugcagccugaucuacaagggcagcuacgagcugcagacccuggagcugaacauggagacccugaacaugaccaugccccugagcugcaccaagaacagcagccaccacuacaucagagugggcaacgagaccggccuggagcugacccugaccaacaccagcaucaucaaccacaaguucugcaaccugagcgacgcccacaagagaaaccuguacgaccacgcccugaugagcauccugagcaccuuccaccugagcauccccaacuucaaccaguacgaggccaugagcugcgacuucaacggcggcaagaucagcgugcaguacaaccugagccacgccuacgccguggacgccgccgagcacugcggcaccguggccaacggcgugcugcagaccuucaugagaauggccuggggcggcagcuacaucgcccuggacagcggcagaggcaacugggacugcaucaugaccagcuaccaguaccugaucauccagaacaccaccugggaggaccacugccaguucagcagacccagccccaucggcuaccugggccugcugagccagagaaccagagacaucuacaucagcagaagacugcugggcaccuucaccuggacccugagcgacagcgagggcaacgagacccccggcggcuacugccugaccagauggaugcugaucgaggccgagcugaagugcuucggcaacaccgccguggccaagugcaacgagaagcacgacgaggaguucugcgacaugcugagacuguucgacuucaacaagcaggccauccagagacugaagagccccgcccagaugagcauccagcugaucaacaaggccgugaacgcccugaucaacgaccagcugaucaugaagaaccaccugagagacaugaugggcauccccuacugcaacuacagcaaguacugcuaccugaaccacaccagcagcggcagaaccagccugcccaagugcugccuggugagcaacggcagcuaccugaacgagacccacuucagcgacgacaucgagcagcaggccgacaacaugaucaccgagaugcugcagaaggaguacaucgacagacagggcaagaccccccugggccugguggaccuguucguguucagcaccagcuucuaccugaucagcaucuuccugcaccugaucaagauccccacccacagacacaucgugggcaagcccugccccaagccccacagacugaaccacaugggcaucugcagcugcggccuguacaagcagcccggcgugcccaccagauggaagagaugaggacuagucccuguucccagagcccacuuuuuuuucuuuuuuugaaauaaaauagccugucuuucagaucuaaaaaaaaaaaaaaaaaaaaaaaaaaaaaaaaaaaaaaaaaaaaaaaaaaaaaaaaaaaaaaaaaaaaaaaaaaaaaaaaaaaaaaaaaaaaaaaaaaaa

SEQ ID NO: 31915 - RNA, 1721 nt, Artificial Sequence
  mRNA product Design a-1 (A100) comprising derived and/or modified sequence from LASV(KAK-428;Clade n.d. (VII))__ANH09740__GPCmut7 (opt4)
aggagagucccgcagucggcguccagcggcucugcuuguucgugugugugucguugcaggccuuauucaagcuuaccaugggccagaucgugaccuucuuccaggaggugccccacgugaucgaggaggugaugaacaucgugcugaucgcccugagccugcuggccauccugaagggccuguacaacuucgccaccugcggcgugaucggccugaucaccuuccugcugcugugcggcagaagcugcagcgccaccuacaagggccaguacgagcugcagacccuggagcugaacauggagagccugaacaugaccaugccccugagcugcaccaagaacaacagccaccacuacaucagagccggcaacaacaccggccuggagcugacccugaccaacaccagcaucaucagccacaaguucugcaaccugagcgacgcccacaagaagaaccuguacgaccacacccugaugagcaucaucaccaccuuccaccugagcauccccaacuucaaccaguacgaggccaugagcugcgacuucaacggcggcaagaucagcauccaguacaaccugagccacagcuacgccggcgacgccgcccagcacugcggcaccguggccaacggcgugcugcagaccuucaugagaauggccuggggcggcagcuaccuggcccuggacagcggcagaagaggcugggacugcaucaucagcagcuaccaguaccugaucauccagaacaccaccugggacgaccacugccaguucagcagacccagccccaucggcuaccugggcuucgugagccagaagaccagagacaucuacaucagcagaagacugcugggcaccuucaccuggacccugagcgacagcgagggccacgacaugcccggcggcuacugccugaccagauggaugcugaucgaggccgaccugaagugcuucggcaacaccgccguggccaagugcaacgagaagcacgacgaggaguucugcgacauguggagacuguucgacuucaacaagcaggccauccagagacugaaggcccccgcccagaugaacauccagcugaucaacaaggccgugaacgcccugaucaacgaccagcugaugaugaagaaccaccugagagacaucaugggcauccccuacugcaacuacagcaaguucugcuaccugaacaacaccaccaccggcagaaccagccugcccagaugcugccugaucagcaacggcagcuaccugaacgagacccacuucagcgacgacaucgagcagcaggccgacaacaugaucaccgagaugcugcagaaggaguacauggacagacagggcaagaccccccugggccugguggaccuguucguguucagcaccagcuucuaccugaucaccaucuuccugcaccuggugaagauccccacccacagacacaucgugggcaagcccugccccaagccccacagacugaaccacaugggcaucugcagcugcggccuguacaagcagcccggcgugcccgugagauggaagagaugaggacuagucccuguucccagagcccacuuuuuuuucuuuuuuugaaauaaaauagccugucuuucagaucuaaaaaaaaaaaaaaaaaaaaaaaaaaaaaaaaaaaaaaaaaaaaaaaaaaaaaaaaaaaaaaaaaaaaaaaaaaaaaaaaaaaaaaaaaaaaaaaaaaaa

SEQ ID NO: 31916 - RNA, 1721 nt, Artificial Sequence; identical to SEQ ID NO: 31910
  mRNA product Design a-1 (A100) comprising derived and/or modified sequence from LASV(Pinneo-NIG-1969;Clade I)__AIT17836__GPCmut7 (opt4)

SEQ ID NO: 31917 - RNA, 1721 nt, Artificial Sequence
  mRNA product Design a-1 (A100) comprising derived and/or modified sequence from LASV(ISTH0009-NIG-2011;Clade II)__AIT17404__GPCmut7 (opt4)
aggagagucccgcagucggcguccagcggcucugcuuguucgugugugugucguugcaggccuuauucaagcuuaccaugggccagaucaucaccuucuuccaggaggugccccacgugaucgaggaggugaugaacaucgugcugaucgcccugagccugcuggccauccugaagggcaucuacaacguggccaccugcggccuguucggccuggugagcuuccugcugcugugcggcagaagcugcagcaccaccuacaagggcguguacgagcugcagacccuggagcuggacauggccagccugaacaugaccaugccccugagcugcaccaagaacaacagccaccacuacaucauggugggcaacgagaccggccuggagcugacccugaccaacaccagcaucaucaaccacaaguucugcaaccugagcgacgcccacaagaagaaccuguacgaccacgcccugaugagcaucaucagcaccuuccaccugagcauccccaacuucaaccaguacgaggccaugagcugcgacuucaacggcggcaagaucagcgugcaguacaaccugagccacgccuacgccguggacgccgccaaccacugcggcaccaucgccaacggcgugcugcagaccuucaugagaauggccuggggcggcagcuacaucgcccuggacagcggcaagggcagcugggacugcaucaugaccagcuaccaguaccugaucauccagaacaccaccugggaggaccacugccaguucagcagacccagccccaucggcuaccugggccugcugagccagagaaccagagacaucuacaucagcagaagacugcugggcaccuucaccuggacccugagcgacagcgagggcaacgagacccccggcggcuacugccugaccagauggaugcugaucgaggccgagcugaagugcuucggcaacaccgccguggccaagugcaacgagaagcacgacgaggaguucugcgacaugcugagacuguucgacuucaacaagcaggccaucagaagacugaagacccccgcccagaugagcauccagcugaucaacaaggccgugaacgcccugaucaacgaccagcugaucaugaagaaccaccugagagacaucaugggcauccccuacugcaacuacagcaaguacugcuaccugaaccacaccgugaccggcaagaccagccugcccagaugcugccuggugagcaacggcagcuaccugaacgagacccacuucagcgacgacaucgagcagcaggccgacaacaugaucaccgagcugcugcagaaggaguacauggacagacagggcaagaccccccugggccugguggaccuguucguguucagcaccagcuucuaccugaucagcaucuuccugcaccugaucaagauccccacccacagacacaucaccggcaagcccugccccaagccccacagacugaaccacaugggcaucugcagcugcggccuguacaagcaccccggcgugcccgugaaguggaagagaugaggacuagucccuguucccagagcccacuuuuuuuucuuuuuuugaaauaaaauagccugucuuucagaucuaaaaaaaaaaaaaaaaaaaaaaaaaaaaaaaaaaaaaaaaaaaaaaaaaaaaaaaaaaaaaaaaaaaaaaaaaaaaaaaaaaaaaaaaaaaaaaaaaaaa

SEQ ID NO: 31918 - RNA, 1721 nt, Artificial Sequence
  mRNA product Design a-1 (A100) comprising derived and/or modified sequence from LASV(ISTH2010-NIG-2012;Clade II)__AIT17482__GPCmut7 (opt4)
aggagagucccgcagucggcguccagcggcucugcuuguucgugugugugucguugcaggccuuauucaagcuuaccaugggccagaucaucaccuucuuccaggaggugccccacgugaucgaggaggugaugaacaucgugcugaucgcccugagccugcuggccauccugaagggcaucuacaacguggccaccugcggccuguucggccuggugagcuuccugcugcugugcggcagaagcugcagcaccaccuacaagggcguguacgagcugcagacccuggagcuggacauggccagccugaacaugaccaugccccugagcugcaccaagaacaacagccaccacuacaucauggugggcaacgagaccggccuggagcugacccugaccaacaccagcaucaucaaccacaaguucugcaaccugagcgacgcccacaagaagaaccuguacgaccacgcccugaugagcaucaucagcaccuuccaccugagcauccccaacuucaaccaguacgaggccaugagcugcgacuucaacggcggcaagaucagcgugcaguacaaccugagccacgccuacgccguggacgccgccaaccacugcggcaccaucgccaacggcgugcugcagaccuucaugagaauggccuggggcggcagcuacaucgcccuggacagcggcaagggcagcugggacugcaucaugaccagcuaccaguaccugaucauccagaacaucaccugggaggaccacugccaguucagcagacccagccccaucggcuaccugggccugcugagccagagaaccagagacaucuacaucagcagaagacugcugggcaccuucaccuggacccugagcgacagcgagggcaacgagacccccggcggcuacugccugaccagauggaugcugaucgaggccgagcugaagugcuucggcaacaccgccguggccaagugcaacgagaagcacgacgaggaguucugcgacaugcugagacuguucgacuucaacaagcaggccaucagaagacugaagacccccgcccagaugagcauccagcugaucaacaaggccgugaacgcccugaucaacgaccagcugaucaugaagaaccaccugagagacaucaugggcauccccuacugcaacuacagcaaguacugcuaccugaaccacaccgugaccggcaagaccagccugcccagaugcugccuggugagcaacggcagcuaccugaacgagacccacuucagcgacgacaucgagcagcaggccgacaacaugaucaccgagcugcugcagaaggaguacaucgacagacagggcaagaccccccugggccugguggaccuguucguguucagcaccagcuucuaccugaucagcaucuuccugcaccuggugaagauccccacccacagacacguggugggcaagcccugccccaagccccacagacugaaccacaugggcaucugcagcugcggccuguacaagcaccccggcgugcccgugaaguggaagagaugaggacuagucccuguucccagagcccacuuuuuuuucuuuuuuugaaauaaaauagccugucuuucagaucuaaaaaaaaaaaaaaaaaaaaaaaaaaaaaaaaaaaaaaaaaaaaaaaaaaaaaaaaaaaaaaaaaaaaaaaaaaaaaaaaaaaaaaaaaaaaaaaaaaaa

SEQ ID NO: 31919 - RNA, 1721 nt, Artificial Sequence
  mRNA product Design a-1 (A100) comprising derived and/or modified sequence from LASV(Lassa virus/H.sapiens-wt/NGA/2015/ISTH_0543;Clade II)__AVO03639__GPCmut7 (opt4)
aggagagucccgcagucggcguccagcggcucugcuuguucgugugugugucguugcaggccuuauucaagcuuaccaugggccagaucaucaccuucuuccaggaggugccccacgugaucgaggaggugaugaacaucgugcugaucgcccugagccugcuggccauccugaagggcaucuacaacguggccaccugcggccuguucggccuggugagcuuccugcugcugugcggcagaagcugcagcaccaccuacaagggcguguacgagcugcagacccuggagcuggacauggccaaccugaacaugaccaugccccugagcugcaccaagaacaacagccaccacuacaucauggugggcaacgagaccggccuggagcugacccugaccaacaccagcaucaucaaccacaaguucugcaaccugagcgacgcccacaagaagaaccuguacgaccacgcccugaugagcaucaucagcaccuuccaccugagcauccccaacuucaaccaguacgaggccaugagcugcgacuucaacggcggcaagaucagcgugcaguacaaccugagccacaccuacgccguggacgccgccaaccacugcggcaccaucgccaacggcgugcugcagaccuucaugagaauggccuggggcggcagcuacaucgcccuggacagcggcaagggcagcugggacugcaucaugaccagcuaccaguaccuggugauccagaacaccaccugggaggaccacugccaguucagcagacccagccccaucggcuaccugggccugcugagccagagaaccagagacaucuacaucagcagaagacugcugggcaccuucaccuggacccugagcgacagcgagggcaacgagacccccggcggcuacugccugaccagauggaugcugaucgaggccgagcugaagugcuucggcaacaccgccguggccaagugcaacgagaagcacgacgaggaguucugcgacaugcugagacuguucgacuucaacaagcaggccaucagaagacugaagacccccgcccagaugagcauccagcugaucaacaaggccgugaacgcccugaucaacgaccagcugaucaugaagaaccaccugagagacaucaugggcauccccuacugcaacuacagcaaguacugcuaccugaaccacaccgugaccggcaagaccagccugcccagaugcugccuggugagcaacggcagcuaccugaacgagacccacuucagcgacgacaucgagcagcaggccgacaacaugaucaccgagcugcugcagaaggaguacaucgacagacagggcaagaccccccugggccugguggaccuguucguguucagcaccagcuucuaccugaucagcaucuuccugcaccuggugaagauccccacccacagacacaucaccggcaagcccugccccaagccccacagacugaaccacaugggcaucugcagcugcggccuguacaagcaccccggcgugcccgugaaguggaagagaugaggacuagucccuguucccagagcccacuuuuuuuucuuuuuuugaaauaaaauagccugucuuucagaucuaaaaaaaaaaaaaaaaaaaaaaaaaaaaaaaaaaaaaaaaaaaaaaaaaaaaaaaaaaaaaaaaaaaaaaaaaaaaaaaaaaaaaaaaaaaaaaaaaaaa

SEQ ID NO: 31920 - RNA, 1721 nt, Artificial Sequence
  mRNA product Design a-1 (A100) comprising derived and/or modified sequence from LASV(Lassa virus/H.sapiens-wt/NGA/2016/ISTH_0009;Clade II)__AVO03571__GPCmut7 (opt4)
aggagagucccgcagucggcguccagcggcucugcuuguucgugugugugucguugcaggccuuauucaagcuuaccaugggccagaucaucaccuucuuccaggaggugccccacgugaucgaggaggugaugaacaucgugcugaucgcccugagccugcuggccauccugaagggcaucuacaacguggccaccugcggccugcugggccuggugagcuuccugcugcugugcggcagaagcugcagcaccaccuacaagggcguguacgagcugcagacccuggagcuggacauggccagccugaacaugaccaugccccugagcugcaccaagaacaacagccaccacuacaucauggugggcaacgagaccggccuggagcugacccugaccaacaccagcaucaucaaccacaaguucugcaaccugagcgacgcccacaagaagaaccuguacgaccacgcccugaugagcaucaucagcaccuuccaccugagcauccccaacuucaaccaguacgaggccaugagcugcgacuucaacggcggcagaaucagcgugcaguacaaccugagccacagcuacgccguggacgccgccaaccacugcggcaccaucgccaacggcgugcugcagaccuucaugagaauggccuggggcggcagcuacaucgcccuggacagcggcaagggcagcugggacugcaucaugaccagcuaccaguaccugaucauccagaacaccaccugggaggaccacugccaguucagcagacccagccccaucggcuaccugggccugcugagccagagaaccagagacaucuacaucagcagaagacugcugggcaccuucaccuggacccugagcgacagcgagggcaacgagacccccggcggcuacugccugaccagauggaugcugaucgaggccgagcugaagugcuucggcaacaccgccguggccaagugcaacgagaagcacgacgaggaguucugcgacaugcugagacuguucgacuucaacaagcaggccaucagaagacugaagacccccgcccagaugagcauccagcugaucaacaaggccgugaacgcccugaucaacgaccagcugaucaugaagaaccaccugagagacaucaugggcauccccuacugcaacuacagcaaguacugcuaccugaaccacaccgugaccggcaagaccagccugcccagaugcugccuggugagcaacggcagcuaccugaacgagacccacuucagcgacgacaucgagcagcaggccgacaacaugaucaccgagcugcugcagaaggaguacaucgacagacagggcaagaccccccugggccugguggaccuguucguguucagcaccagcuucuaccugaucagcaucuuccugcaccuggugaagauccccacccacagacacaucaccggcaagcccugccccaagccccacagacugaaccacaugggcaucugcagcugcggccuguacaaccaccccggcgugcccgugaaguggaagagaugaggacuagucccuguucccagagcccacuuuuuuuucuuuuuuugaaauaaaauagccugucuuucagaucuaaaaaaaaaaaaaaaaaaaaaaaaaaaaaaaaaaaaaaaaaaaaaaaaaaaaaaaaaaaaaaaaaaaaaaaaaaaaaaaaaaaaaaaaaaaaaaaaaaaa

SEQ ID NO: 31921 - RNA, 1721 nt, Artificial Sequence
  mRNA product Design a-1 (A100) comprising derived and/or modified sequence from LASV(Lassa virus/H.sapiens-wt/NGA/2016/ISTH_0017;Clade II)__AVO03567__GPCmut7 (opt4)
aggagagucccgcagucggcguccagcggcucugcuuguucgugugugugucguugcaggccuuauucaagcuuaccaugggccagaucaucaccuucuuccaggaggugccccacgugaucgaggaggugaugaacaucgugcugaucgcccugagccugcuggccauccugaagggcaucuacaacguggccaccugcggccuguucggccuggugagcuuccugcugcugugcggcagaagcugcagcaccaccuacaagggcguguacgagcugcagacccuggagcuggacauggccagccugaacaugaccaugccccugagcugcaccaagaacaacagccaccacuacaucauggugggcaacgagaccggccuggagcugacccugaccaacaccagcaucaucaaccacaaguucugcaaccugagcgacgcccacaagaagaaccuguacgaccacgcccugaugagcaucaucagcaccuuccaccugagcauccccaacuucaaccaguacgaggccaugagcugcgacuucaacggcggcaagaucagcgugcaguacaaccugagccacaccuacgccaucgacgccgccaaccacugcggcaccaucgccaacggcgugcugcagaccuucaugagaauggccuggggcggcagcuacaucgcccuggacagcggcaagggcagcugggacugcaucaugaccagcuaccaguaccugaucauccagaacaccaccugggaggaccacugccaguucagcagacccagccccaucggcuaccugggccugcugagccagagaaccagagacaucuacaucagcagaagacugcugggcaccuucaccuggacccugagcgacagcgagggcaacgagacccccggcggcuacugccugaccagauggaugcugaucgaggccgagcugaagugcuucggcaacaccgccguggccaagugcaacgagaagcacgacgaggaguucugcgacaugcugagacuguucgacuucaacaagcaggccaucagaagacugaagacccccgcccagaugagcauccagcugaucaacaaggccgugaacgcccugaucaacgaccagcugaucaugaagaaccaccugagagacaucaugggcauccccuacugcaacuacagcaaguacugcuaccugaaccacaccgugaccggcaagaccagccugcccagaugcugccuggugagcaacggcagcuaccugaacgagacccacuucagcgacgacaucgagcagcaggccgacaacaugaucaccgagcugcugcagaaggaguacauggacagacagggcaagaccccccugggccugguggaccuguucguguucagcaccagcuucuaccugaucagcaucuuccugcaccuggugagaauccccacccacagacacgugaucggcaagcccugccccaagccccacagacugaaccacaugggcaucugcagcugcggccuguacaagcaccccggcgugcccgugaaguggaagagaugaggacuagucccuguucccagagcccacuuuuuuuucuuuuuuugaaauaaaauagccugucuuucagaucuaaaaaaaaaaaaaaaaaaaaaaaaaaaaaaaaaaaaaaaaaaaaaaaaaaaaaaaaaaaaaaaaaaaaaaaaaaaaaaaaaaaaaaaaaaaaaaaaaaaa

SEQ ID NO: 31922 - RNA, 1721 nt, Artificial Sequence
  mRNA product Design a-1 (A100) comprising derived and/or modified sequence from LASV(Lassa virus/H.sapiens-wt/NGA/2018/ISTH_0959;Clade II)__AVV65099__GPCmut7 (opt4)
aggagagucccgcagucggcguccagcggcucugcuuguucgugugugugucguugcaggccuuauucaagcuuaccaugggccagaucaucaccuucuuccaggaggugccccacgugaucgaggaggugaugaacaucgugcugaucgcccugagccugcuggccauccugaagggcaucuacaacguggugaccugcggccuguucggccuggugagcuuccugcugcugugcggcagaagcugcagcaccaccuacaagggcguguacgagcugcagacccuggagcuggacauggccagccugaacaugaccaugccccugagcugcaccaagaacaacagccaccacuacaucauggugggcaacgagaccggccuggagcugacccugaccaacaccagcaucaucaaccacaaguucugcaaccugagcgacgcccacaagaagaaccuguacgaccacgcccugaugagcaucaucagcaccuuccaccugagcauccccaacuucaaccaguacgaggccaugagcugcgacuucaacggcggcaagaucagcgugcaguacaaccugagccacgccuacgccaucgacgccgccaaccacugcggcaccaucgccaacggcgugcugcagaccuucaugagaauggccuggggcggcagcuacaucgcccuggacagcggcaagggcagcugggacugcaucaugaccagcuaccaguaccugaucauccagaacaccaccugggaggaccacugccaguucagcagacccagccccaucggcuaccugggccugcugagccagagaaccagagacaucuacaucagcagaagacugcugggcaccuucaccuggacccugagcgacagcgagggcaacgagacccccggcggcuacugccugaccagauggaugcugaucgaggccgagcugaagugcuucggcaacaccgccguggccaagugcaacgagaagcacgacgaggaguucugcgacaugcugagacuguucgacuucaacaagcaggccaucagaagacugaagacccccgcccagaugagcauccagcugaucaacaaggccgugaacgcccugaucaacgaccagcugaucaugaagaaccaccugagagacaucaugggcauccccuacugcaacuacagcaaguacugcuaccugaaccacaccgugaccggcaagaccagccugcccagaugcugccuggugagcaacggcagcuaccugaacgagacccacuucagcgacgacaucgagcagcaggccgacaacaugaucaccgagcugcugcagaaggaguacaucgacagacagggcaagaccccccugggccugguggaccuguucguguucagcaccagcuucuaccugaucagcaucuuccugcaccuggugaagauccccacccacagacacgugaucggcaagcccugccccaagccccacagacugaaccacaugggcaucugcagcugcggccuguacaagcaccccggcgugcccgugaaguggaagagaugaggacuagucccuguucccagagcccacuuuuuuuucuuuuuuugaaauaaaauagccugucuuucagaucuaaaaaaaaaaaaaaaaaaaaaaaaaaaaaaaaaaaaaaaaaaaaaaaaaaaaaaaaaaaaaaaaaaaaaaaaaaaaaaaaaaaaaaaaaaaaaaaaaaaa

SEQ ID NO: 31923 - RNA, 1721 nt, Artificial Sequence
  mRNA product Design a-1 (A100) comprising derived and/or modified sequence from LASV(LASV003-NIG-2008;Clade II)__AIT17580__GPCmut7 (opt4)
aggagagucccgcagucggcguccagcggcucugcuuguucgugugugugucguugcaggccuuauucaagcuuaccaugggccagaucaucaccuucuuccaggaggugccccacgugaucgaggaggugaugaacaucgugcugaucgcccugagccugcuggccauccugaagggcaucuacaacguggccaccugcggccuguucggccuggugagcuuccugcugcugugcggcagaagcugcagcaccaccuacaagggcguguacgagcugcagacccuggagcuggacauggccagccugaacaugaccaugccccugagcugcaccaagaacaacagccaccacuacaucauggugggcaacgagaccggccuggagcugacccugaccaacaccagcaucaucaaccacaaguucugcaaccugagcgacgcccacaagaagaaccuguacgaccacgcccugaugagcaucaucagcaccuuccaccugagcauccccaacuucaaccaguacgaggccaugagcugcgacuucaacggcggcaagaucagcgugcaguacaaccugagccacaccuacgccguggacgccgccaaccacugcggcaccaucgccaacggcgugcugcagaccuucaugagaauggccuggggcggcagcuacaucgcccuggacagcggcaagggcagcugggacugcaucaugaccagcuaccaguaccugaucauccagaacaccaccugggaggaccacugccaguucagcagacccagccccaucggcuaccugggccugcugagccagagaaccagagacaucuacaucagcagaagacugcugggcaccuucaccuggacccugagcgacagcgagagcaacgagacccccggcggcuacugccugaccagauggaugcugaucgaggccgagcugaagugcuucggcaacaccgccguggccaagugcaacgagaagcacgacgaggaguucugcgacaugcugagacuguucgacuucaacaagcaggccaucagaagacugaaggcccccgcccagaugagcauccagcugaucaacaaggccgugaacgcccugaucaacgaccagcugaucaugaagaaccaccugagagacaucaugggcauccccuacugcaacuacagcaaguacugcuaccugaaccacaccgugaccggcagaaccagccugcccagaugcugccuggugagcaacggcagcuaccugaacgagacccacuucagcgacgacaucgagcagcaggccgacaacaugaucaccgagcugcugcagaaggaguacauggacagacagggcaagaccccccugggccugguggaccuguucguguucagcaccagcuucuaccugaucagcaucuuccugcaccuggugaagauccccacccacagacacgugaucggcaagcccugccccaagccccacagacugaaccacaugggcaucugcagcugcggccuguacaagcaccccggcgugcccgugaaguggaagagaugaggacuagucccuguucccagagcccacuuuuuuuucuuuuuuugaaauaaaauagccugucuuucagaucuaaaaaaaaaaaaaaaaaaaaaaaaaaaaaaaaaaaaaaaaaaaaaaaaaaaaaaaaaaaaaaaaaaaaaaaaaaaaaaaaaaaaaaaaaaaaaaaaaaaa

SEQ ID NO: 31924 - RNA, 1721 nt, Artificial Sequence
  mRNA product Design a-1 (A100) comprising derived and/or modified sequence from LASV(LASV035-NIG-2009;Clade II)__AIT17588__GPCmut7 (opt4)
aggagagucccgcagucggcguccagcggcucugcuuguucgugugugugucguugcaggccuuauucaagcuuaccaugggccagaucaucaccuucuuccaggaggugccccacgugaucgaggaggugaugaacaucgugcugaucgcccugagccugcuggccauccugaagggcaucuacaacguggccaccugcggccuguucggccuggugagcuuccugcugcugugcggcagaagcugcagcaccaccuacaagggcguguacgagcugcagacccuggagcuggacauggccagccugaacaugaccaugccccugagcugcaccaagaacaacagccaccacuacaucauggugggcaacgagaccggccuggagcugacccugaccaacaccagcaucaucaaccacaaguucugcaaccugagcgacgcccacaagaagaaccuguacgaccacgcccugaugagcaucaucagcaccuuccaccugagcauccccaacuucaaccaguacgaggccaugagcugcgacuucaacggcggcaagaucagcgugcaguacaaccugagccacgccuacgccguggacgccgccaaccacugcggcaccaucgccaacggcgugcugcagaccuucaugagaauggccuggggcggcagcuacaucgcccuggacagcggcaagggcagcugggacugcaucaugaccagcuaccaguaccugaucauccagaacaccaccugggaggaccacugccaguucagcagacccagccccaucggcuaccugggccugcugagccagagaaccagagacaucuacaucagcagaagacugcugggcaccuucaccuggacccugagcgacagcgagggcaacgagacccccggcggcuacugccugaccagauggaugcugaucgaggccgagcugaagugcuucggcaacaccgccguggccaagugcaacgagaagcacgacgaggaguucugcgacaugcugagacuguucgacuucaacaagcaggccaucagaagacugaaggcccccgcccagaugagcauccagcugaucaacaaggccgugaacgcccugaucaacgaccagcugaucaugaagaaccaccugagagacaucaugggcauccccuacugcaacuacagcaaguacugcuaccugaaccacaccgugaccggcaagaccagccugcccagaugcugccuggugagcaacggcagcuaccugaacgagacccacuucagcgacgacaucgagcagcaggccgacaacaugaucaccgagcugcugcagaaggaguacaucgacagacagggcaagaccccccugggccugguggaccuguucguguucagcaccagcuucuaccugaucagcaucuuccugcaccuggugaagauccccacccacagacacgugaucggcaagcccugccccaagccccacagacugaaccacaugggcaucugcagcugcggccuguacaagcaccccggcgugcccgugaaguggaagagaugaggacuagucccuguucccagagcccacuuuuuuuucuuuuuuugaaauaaaauagccugucuuucagaucuaaaaaaaaaaaaaaaaaaaaaaaaaaaaaaaaaaaaaaaaaaaaaaaaaaaaaaaaaaaaaaaaaaaaaaaaaaaaaaaaaaaaaaaaaaaaaaaaaaaa

SEQ ID NO: 31925 - RNA, 1721 nt, Artificial Sequence
  mRNA product Design a-1 (A100) comprising derived and/or modified sequence from LASV(LASV1000-NIG-2009;Clade II)__AIT17782__GPCmut7 (opt4)
aggagagucccgcagucggcguccagcggcucugcuuguucgugugugugucguugcaggccuuauucaagcuuaccaugggccagaucaucaccuucuuccaggaggugccccacgugaucgaggaggugaugaacaucgugcugaucgcccugagccugcuggccauccugaagggcaucuacaacguggccaccugcggccuguucggccuggugagcuuccugcugcugugcggcagaagcugcagcaccaccuacaagggcguguacgagcugcagacccuggagcuggacauggccagccugaacaugaccaugccccugagcugcaccaagaacaacagccaccacuacaucauggugggcaacgagaccggccuggagcugacccugaccaacaccagcaucaucaaccacaaguucugcaaccugagcgacgcccacaagaagaaccuguacgaccacgcccugaugagcaucaucagcaccuuccaccugagcauccccaacuucaaccaguacgaggccaugagcugcgacuucaacggcggcaagaucagcgugcaguacaaccugagccacaccuacgccguggacgccgccaaccacugcggcaccaucgccaacggcgugcugcagaccuucaugagaauggccuggggcggcagcuacaucgcccuggacagcggcaagggcagcugggacugcaucaugaccagcuaccaguaccugaucauccagaacaccaccugggaggaccacugccaguucagcagacccagccccaucggcuaccugggccugcugagccagagaaccagagacaucuacaucagcagaagacugcugggcaccuucaccuggacccugagcgacagcgagggcaacgagacccccggcggcuacugccugaccagauggaugcugaucgaggccgagcugaagugcuucggcaacaccgccguggccaagugcaacgagaagcacgacgaggaguucugcgacaugcugagacuguucgacuucaacaagcaggccaucaagagacugaagacccccgcccagaugagcauccagcugaucaacaaggccgugaacgcccugaucaacgaccagcugaucaugaagaaccaccugagagacaucaugggcauccccuacugcaacuacagcaaguacugcuaccugaaccacaccgugaccggcaagaccagccugcccagaugcugccuggugagcaacggcagcuaccugaacgagacccacuucagcgacgacaucgagcagcaggccgacaacaugaucaccgagcugcugcagaaggaguacaucgacagacagggcaagaccccccugggccugguggaccuguucguguucagcaccagcuucuaccugaucagcaucuuccugcaccuggugaagauccccacccacagacacguggugggcaagcccugccccaagccccacagacugaaccacaugggcaucugcagcugcggccuguacaagcaccccggcgugcccgugaaguggaagagaugaggacuagucccuguucccagagcccacuuuuuuuucuuuuuuugaaauaaaauagccugucuuucagaucuaaaaaaaaaaaaaaaaaaaaaaaaaaaaaaaaaaaaaaaaaaaaaaaaaaaaaaaaaaaaaaaaaaaaaaaaaaaaaaaaaaaaaaaaaaaaaaaaaaaa

SEQ ID NO: 31926 - RNA, 1721 nt, Artificial Sequence
  mRNA product Design a-1 (A100) comprising derived and/or modified sequence from LASV(LASV221-NIG-2010;Clade II)__AIT17624__GPCmut7 (opt4)
aggagagucccgcagucggcguccagcggcucugcuuguucgugugugugucguugcaggccuuauucaagcuuaccaugggccagaucaucaccuucuuccaggaggugccccacgugaucgaggaggugaugaacaucgugcugaucgcccugagccugcuggccauccugaagggcaucuacaacguggccaccugcggccuguucggccuggugagcuuccugcugcugugcggcagaagcugcagcaccaccuacaagggcguguacgagcugcagacccuggagcuggacauggccagccugaacaugaccaugccccugagcugcaccaagaacaacagccaccacuacaucauggugggcaacgagaccggccuggagcugacccugaccaacaccagcaucaucaaccacaaguucugcaaccugagcgacgcccacaagaagaaccuguacgaccacgcccugaugagcaucaucagcaccuuccaccugagcauccccaacuucaaccaguacgaggccaugagcugcgacuucaacggcggcaagaucagcgugcaguacaaccugagccacaccuacgccaucgacgccgccaaccacugcggcaccaucgccaacggcgugcugcagaccuucaugagaauggccuggggcggcagcuacaucgcccuggacagcggcaagggcagcugggacugcaucaugaccagcuaccaguaccugaucauccagaacaccaccugggaggaccacugccaguucagcagacccagccccaucggcuaccugggccugcugagccagagaaccagagacaucuacaucagcagaagacugcugggcaccuucaccuggacccugagcgacagcgagggcaacgagacccccggcggcuacugccugaccagauggaugcugaucgaggccgagcugaagugcuucggcaacaccgccguggccaagugcaacgagaagcacgacgaggaguucugcgacaugcugagacuguucgacuucaacaagcaggccaucagaagacugaagacccccgcccagaugagcauccagcugaucaacaaggccgugaacgcccugaucaacgaccagcugaucaugaagaaccaccugagagacaucaugggcauccccuacugcaacuacagcaaguacugcuaccugaaccacaccgugaccggcaagaccagccugcccagaugcugccuggugagcaacggcagcuaccugaacgagacccacuucagcgacgacaucgagcagcaggccgacaacaugaucaccgagaugcugcagaaggaguacauggacagacagggcaagaccccccugggccugguggaccuguucguguucagcaccagcuucuaccugaucagcaucuuccugcaccuggugaagauccccacccacagacacgugaucggcaagcccugccccaagccccacagacugaaccacaugggcaucugcagcugcggccuguacaagcaccccggcgugcccgugaaguggaagagaugaggacuagucccuguucccagagcccacuuuuuuuucuuuuuuugaaauaaaauagccugucuuucagaucuaaaaaaaaaaaaaaaaaaaaaaaaaaaaaaaaaaaaaaaaaaaaaaaaaaaaaaaaaaaaaaaaaaaaaaaaaaaaaaaaaaaaaaaaaaaaaaaaaaaa

SEQ ID NO: 31927 - RNA, 1721 nt, Artificial Sequence
  mRNA product Design a-1 (A100) comprising derived and/or modified sequence from LASV(LASV237-NIG-2010;Clade II)__AIT17638__GPCmut7 (opt4)
aggagagucccgcagucggcguccagcggcucugcuuguucgugugugugucguugcaggccuuauucaagcuuaccaugggccagaucaucaccuucuuccaggaggugccccacgugaucgaggaggugaugaacaucgugcugaucgcccugagccugcuggccauccugaagggcaucuacaacguggccaccugcggccuguucggccuggugagcuuccugcugcugugcggcagaagcugcagcaccaccuacaagggcguguacgagcugcagacccuggagcuggacauggccagccugaacaugaccaugccccugagcugcaccaagaacaacagccaccacuacaucauggugggcaacgagaccggccuggagcugacccugaccaacaccagcaucaucaaccacaaguucugcaaccugagcgacgcccacaagaaggaccuguacgaccacgcccugaugagcaucaucagcaccuuccaccugagcauccccaacuucaaccaguacgaggccaugagcugcgacuucaacggcggcaagaucagcgugcaguacaaccugagccacaccuacgccguggacgccgccaaccacugcggcaccaucgccaacggcgugcugcagaccuucaugagaauggccuggggcggcagcuacaucgcccuggacagcggcaagggcagcugggacugcaucaugaccagcuaccaguaccugaucauccagaacaccaccugggaggaccacugccaguucagcagacccagccccaucggcuaccugggccugcugagccagagaaccagagacaucuacaucagcagaagacugcugggcaccuucaccuggacccugagcgacagcgagggcaacgagacccccggcggcuacugccugaccagauggaugcugaucgaggccgagcugaagugcuucggcaacaccgccguggccaagugcaacgagaagcacgacgaggaguucugcgacaugcugagacuguucgacuucaacaagcaggccaucagaagacugaagacccccgcccagaugagcauccagcugaucaacaaggccgugaacgcccugaucaacgaccagcugaucaugaagaaccaccugagagacaucaugggcauccccuacugcaacuacagcaaguacugcuaccugaaccacaccgugaccggcaagaccagccugcccagaugcugccuggugagcaacggcagcuaccugaacgagacccacuucagcgacgacaucgagcagcaggccgacaacaugaucaccgagcugcugcagaaggaguacauggacagacagggcaagaccccccugggccugguggaccuguucguguucagcaccagcuucuaccugaucagcaucuuccugcaccugaucaagauccccacccacagacacaucaccggcaagcccugccccaagccccacagacugaaccacaugggcaucugcagcugcggccuguacaagcaccccggcgugcccgugaaguggaagagaugaggacuagucccuguucccagagcccacuuuuuuuucuuuuuuugaaauaaaauagccugucuuucagaucuaaaaaaaaaaaaaaaaaaaaaaaaaaaaaaaaaaaaaaaaaaaaaaaaaaaaaaaaaaaaaaaaaaaaaaaaaaaaaaaaaaaaaaaaaaaaaaaaaaaa

SEQ ID NO: 31928 - RNA, 1721 nt, Artificial Sequence
  mRNA product Design a-1 (A100) comprising derived and/or modified sequence from LASV(LASV253-NIG-2011;Clade II)__AIT17670__GPCmut7 (opt4)
aggagagucccgcagucggcguccagcggcucugcuuguucgugugugugucguugcaggccuuauucaagcuuaccaugggccagaucaucaccuucuuccaggaggugccccacgugaucgaggaggugaugaacaucgugcugaucgcccugagccugcuggccauccugaagggcaucuacaacguggccaccugcggccuguucggccuggugagcuuccugcugcugugcggcagaagcugcagcaccaccuacaagggcguguacgagcugcagacccuggagcuggacauggccagccugaacaugaccaugccccugagcugcaccaagaacaacagccaccacuacaucauggugggcaacgagaccggccuggagcugacccugaccaacaccagcaucaucaaccacaaguucugcaaccugagcgacgcccacaagaagaaccuguacgaccacgcccugaugagcaucaucagcaccuuccaccugagcauccccaacuucaaccaguacgaggccaugagcugcgacuucaacggcggcaagaucagcgugcaguacaaccugagccacaccuacgccguggacgccgccaaccacugcggcaccaucgccaacggcgugcugcagaccuucaugagaauggccuggggcggcagcuacaucgcccuggacagcggcaagggcagcugggacugcaucaugaccagcuaccaguaccugaucauccagaacaccaccugggaggaccacugccaguucagcagacccagccccaucggcuaccugggccugcugagccagagaaccagagacaucuacaucagcagaagacugcugggcaccuucaccuggacccugagcgacagcgagggcaacgagacccccggcggcuacugccugaccagauggaugcugaucgaggccgagcugaagugcuucggcaacaccgccguggccaagugcaacgagaagcacgacgaggaguucugcgacaugcugagacuguucgacuucaacaagcaggccaucagaagacugaaggcccccgcccagaugagcauccagcugaucaacaaggccgugaacgcccugaucaacgaccagcugaucaugaagaaccaccugagagacaucaugggcauccccuacugcaacuacagcaaguacugcuaccugaaccacaccgugaccggcagaaccagccugcccagaugcugccuggugagcaacggcagcuaccugaacgagacccacuucagcgacgacaucgagcagcaggccgacaacaugaucaccgagcugcugcagaaggaguacaucgacagacagggcaagaccccccugggccugguggaccuguucguguucagcaccagcuucuaccugaucagcaucuuccugcaccuggugaagauccccacccacagacacaucaucggcaagcccugccccaagccccacagacugaaccacaugggcaucugcagcugcggccuguacaagcaccccggcgugcccgugaaguggaagagaugaggacuagucccuguucccagagcccacuuuuuuuucuuuuuuugaaauaaaauagccugucuuucagaucuaaaaaaaaaaaaaaaaaaaaaaaaaaaaaaaaaaaaaaaaaaaaaaaaaaaaaaaaaaaaaaaaaaaaaaaaaaaaaaaaaaaaaaaaaaaaaaaaaaaa

SEQ ID NO: 31929 - RNA, 1721 nt, Artificial Sequence
  mRNA product Design a-1 (A100) comprising derived and/or modified sequence from LASV(LASV254-NIG-2011;Clade II)__AIT17674__GPCmut7 (opt4)
aggagagucccgcagucggcguccagcggcucugcuuguucgugugugugucguugcaggccuuauucaagcuuaccaugggccagaucaucaccuucuuccaggaggugccccacgugaucgaggaggugaugaacaucgugcugaucgcccugagccugcuggccauccugaagggcaucuacaacguggccaccugcggccuguucggccuggugagcuuccugcugcugugcggcagaagcugcagcaccaccuacaagggcguguacgagcugcagacccuggagcuggacaugaccaaccugaacaugaccaugccccugagcugcaccaagaacaacagccaccacuacaucauggugggcaacgagaccggccuggagcugacccugaccaacaccagcaucaucaaccacaaguucugcaaccugagcgacgcccacaagaagaaccuguacaaccacgcccugaugagcaucaucagcaccuuccaccugagcauccccaacuucaaccaguacgaggccaugagcugcgacuucaacggcggcaagaucagcgugcaguacaaccugagccacagcuacgccguggacgccgccaaccacugcggcaccaucgccaacggcgugcugcagaccuucaugagaauggccuggggcggcagcuacaucgcccuggacagcggcaagggcaacugggacugcaucaugaccagcuaccaguaccugaucauccagaacaccaccugggaggaccacugccaguucagcagacccagccccaucggcuaccugggccugcugagccagagaaccagagacaucuacaucagcagaagacugcugggcaccuucaccuggacccugagcgacagcgagggcaacgagacccccggcggcuacugccugaccagauggaugcugaucgaggccgagcugaagugcuucggcaacaccgccguggccaagugcaacgagaagcacgacgaggaguucugcgacaugcugagacuguucgacuucaacaagcaggccaucagaagacugaagacccccgcccaggccaacauccagcugaucaacaaggccgugaacgcccugaucaacgaccagcugaucaugaagaaccaccugagagacaucaugggcauccccuacugcaacuacagcaaguacugcuaccugaaccacaccgugaccggcaagaccagccugcccagaugcugccuggugagcaacggcagcuaccugaacgagacccacuucagcgacgacaucgagcagcaggccgacaacaugaucaccgagcugcugcagaaggaguacauggacagacagggcaagaccccccugggccugguggaccuguucguguucagcaccagcuucuaccugaucagcaucuuccugcaccuggugaagauccccacccacagacacgugaucggcaagcccugccccaagccccacagacugaaccacaugggcaucugcagcugcggccuguacaagcaccccggcgugcccgugaaguggaagagaugaggacuagucccuguucccagagcccacuuuuuuuucuuuuuuugaaauaaaauagccugucuuucagaucuaaaaaaaaaaaaaaaaaaaaaaaaaaaaaaaaaaaaaaaaaaaaaaaaaaaaaaaaaaaaaaaaaaaaaaaaaaaaaaaaaaaaaaaaaaaaaaaaaaaa

SEQ ID NO: 31930 - RNA, 1721 nt, Artificial Sequence
  mRNA product Design a-1 (A100) comprising derived and/or modified sequence from LASV(Nig08-A19;Clade III)__ADU56618__GPCmut7 (opt4)
aggagagucccgcagucggcguccagcggcucugcuuguucgugugugugucguugcaggccuuauucaagcuuaccaugggccagaucgugaccuucuuccaggaggugccccacgugaucgaggaggugaugaacaucgugcugaucgcccugagcauccuggccauccugaagggccuguacaacaucgccaccugcggccugaucggccuggugaccuuccugcugcugagcggcagaagcugcagcaugaccuacaagggcguguacgagcugcagacccuggagcugaacaugaacacccugaacaugaccaugccccugagcugcaccaagaacaacagccaccacuacaucauggugggcaacgagaccggccuggagcugacccugaccaacaccagccugcugcaccacaaguucugcaaccugagcgacgcccacaagaagaaccuguacgaccacacccugaugagcaucaucagcaccuuccaccugagcauccccaacuucaaccaguacgaggccaugagcugcgacuucaacggcggcaagaucaccgugcaguacaaccugagccacagcuacgccaucgacgccgccaaccacugcggcaccguggccaacggcgugcugcagaccuucaugagaauggccuggggcggcagcuacaucgcccuggacagcggcagaggcaagugggacugcaucaugaccagcuaccaguaccugaucauccagaacaccaccugggaggaccacugccaguucagcagacccagccccaucggcuaccugggccugcugagccagagaaccagagacaucuacaucagcagaagacugcugggcaccuucaccuggacccugagcgacagcgagggcaacgagacccccggcggcuacugccugaccagauggaugcugaucgaggccgagcugaagugcuucggcaacaccgccguggccaagugcaacgagaagcacgacgaggaguucugcgacaugcugagacuguucgacuucaacaagcaggccaucagaagacugaaggcccccgcccagaugagcauccagcugaucaacaaggccgugaacgcccugaucaacgaccagcugaucaugaagaaccaccugagagacaucaugggcauccccuacugcaacuacagcaaguacugcuaccugaaccacaccagcaccggcagaaccagccugcccagaugcugccuggugagcaacggcagcuaccugaacgagacccacuucagcgacgacaucgagcagcaggccgacaacaugaucaccgagaugcugcagaaggaguaccuggacagacagggcaagaccccccugggccugguggaccuguucguguucagcaccagcuucuaccugaucagcaucuuccugcaccuggugaagauccccacccacagacacaucgugggcaagcccugccccaagccccacagacugaaccacaugggcaucugcagcugcggccuguacaagcagcccggcgugcccgugagauggaagagaugaggacuagucccuguucccagagcccacuuuuuuuucuuuuuuugaaauaaaauagccugucuuucagaucuaaaaaaaaaaaaaaaaaaaaaaaaaaaaaaaaaaaaaaaaaaaaaaaaaaaaaaaaaaaaaaaaaaaaaaaaaaaaaaaaaaaaaaaaaaaaaaaaaaaa

SEQ ID NO: 31931 - RNA, 1724 nt, Artificial Sequence
  mRNA product Design a-1 (A100) comprising derived and/or modified sequence from LASV(G1180-SLE-2010;Clade IV)__AIT17168__GPCmut7 (opt4)
aggagagucccgcagucggcguccagcggcucugcuuguucgugugugugucguugcaggccuuauucaagcuuaccaugggccagaucgugaccuucuuccaggaggugccccacgugaucgaggaggugaugaacaucgugcugaucgcccugagcauccuggccgugcugaagggccuguacaacuucgccaccugcggccuggugggccugcugaccuuccugcugcugugcggcagaagcugcaccgccagcagauacaagggcguguacgagcugcagacccuggagcugaacauggagacccugaacaugaccaugccccugagcugcaccaagaacaacagccaccacuacaucauggugggcaacgagaccggccuggagcugacccugaccaacaccagcaucaucaaccacaaguucugcaaccugagcgacgcccacaagaagaaccuguacgaccacgcccugaugagcaucaucagcaccuuccaccugagcauccccaacuucaaccaguacgaggccaugagcugcgacuucaacggcggcaagaucagcgugcaguacaaccugagccacagcuacgccggcgacgccgccaaccacugcggcaccguggccaacggcgugcugcagaccuucaugagaauggccuggggcggcagcuacaucgcccuggacagcggccacggcagcugggacugcaucaugaccagcuaccaguaccugaucauccagaacaccaccugggaggaccacugccaguucagcagacccagccccaucggcuaccugggccugcugagccagagaaccagagacaucuacaucagcagaagacugcugggcaccuucaccuggacccugagcgacagcgagggcaaggacacccccggcggcuacugccugaccagauggaugcugaucgaggccgagcugaagugcuucggcaacaccgccguggccaagugcaacgagaagcacgacgaggaguucugcgacaugcugagacuguucgacuucaacaagcaggccauccagagacugaaggcccccgcccagaugagcauccagcugaucaacaaggccgugaacgcccugaucaacgaccagcugaucaugaagaaccaccugagagacaucaugggcauccccuacugcaacuacagcaaguacugcuaccugaaccacaccaccaccggcaagaccagccugcccaagugcugccuggugagcaacggcagcuaccugaacgagacccacuucagcgacgacaucgagcagcaggccgacaacaugaucaccgagaugcugcagaaggaguacauggagagacagggcaagaccccccugggccugguggaccuguucguguucagcaccagcuucuaccugaucagcaucuuccugcaccuggugaagauccccacccacagacacaucgugggcaagagcugccccaagccccacagacugaaccacaugggcaucugcagcugcggccuguacaagcagcccggcgugcccgugaaguggaagagaugaggacuagucccuguucccagagcccacuuuuuuuucuuuuuuugaaauaaaauagccugucuuucagaucuaaaaaaaaaaaaaaaaaaaaaaaaaaaaaaaaaaaaaaaaaaaaaaaaaaaaaaaaaaaaaaaaaaaaaaaaaaaaaaaaaaaaaaaaaaaaaaaaaaaa

SEQ ID NO: 31932 - RNA, 1724 nt, Artificial Sequence
  mRNA product Design a-1 (A100) comprising derived and/or modified sequence from LASV(G1442-SLE-2011;Clade IV)__AIT17180__GPCmut7 (opt4)
aggagagucccgcagucggcguccagcggcucugcuuguucgugugugugucguugcaggccuuauucaagcuuaccaugggccagaucgugaccuucuuccaggaggugccccacgugaucgaggaggugaugaacaucgugcugaucgcccugagcauccuggccgugcugaagggccuguacaacguggccaccugcggccugaucggccuggugaccuuccugcugcugugcggcagaagcugcaccaccacccuguacaagggcguguacgagcugcagacccuggagcugaacauggagacccugaacaugaccaugccccugagcugcaccaagaacaacagccaccacuacaucagagugggcaacgagaccggccuggagcugacccugaccaacaccagcaucaucaaccacaaguucugcaaccugagcgacgcccacaagaagaaccuguacgaccacgcccugaugagcaucaucagcaccuuccaccugagcauccccaacuucaaccaguacgaggccaugagcugcgacuucaacggcggcaagaucagcgugcaguacaaccugagccacagcuacgccggcgacgccgccaaccacugcggcaccguggccaacggcgugcugcagaccuucaugagaauggccuggggcggcagcuacaucgcccuggacagcggcagaggcaacugggacugcaucaugaccagcuaccaguaccugaucauccagaacaccaccugggacgaccacugccaguucagcagacccagccccaucggcuaccugggccugcugagccagagaaccagagacguguacaucagcagaagacugcugggcaccuucaccuggacccugagcgacagcgagggcaaggacacccccggcggcuacugccugaccagauggaugcugaucgaggccgagcugaagugcuucggcaacaccgccguggccaagugcaacgagaagcacgacgaggaguucugcgacaugcugagacuguucgacuucaacaagcaggccauccagagacugaaggcccccgcccagaugagcauccagcugaucaacaaggccgugaacgcccugaucaacgaccagcugaucaugaagaaccaccugagagacaucaugggcauccccuacugcaacuacagcaaguacugcuaccugaacaacaccgccaccggcaagaccagccugcccaagugcugccugaucagcaacggcagcuaccugaacgagacccacuucagcgacgacaucgagcaggaggccgacaacaugaucaccgagaugcugcagaaggaguacauggagagacagggcaagaccccccugggccugguggaccuguucguguucagcaccagcuucuaccugaucagcaucuuccugcaccuggugaagauccccacccacagacacaucgugggcaagagcugccccaagccccacagacugaaccacaugggcaucugcagcugcggccuguacaagcagcccggcgugcccgugagauggaagagaugaggacuagucccuguucccagagcccacuuuuuuuucuuuuuuugaaauaaaauagccugucuuucagaucuaaaaaaaaaaaaaaaaaaaaaaaaaaaaaaaaaaaaaaaaaaaaaaaaaaaaaaaaaaaaaaaaaaaaaaaaaaaaaaaaaaaaaaaaaaaaaaaaaaaa

SEQ ID NO: 31933 - RNA, 1724 nt, Artificial Sequence
  mRNA product Design a-1 (A100) comprising derived and/or modified sequence from LASV(G3010-SLE-2013;Clade IV)__AIT17344__GPCmut7 (opt4)
aggagagucccgcagucggcguccagcggcucugcuuguucgugugugugucguugcaggccuuauucaagcuuaccaugggccagaucgugaccuucuuccaggaggugccccacgugaucgaggaggugaugaacaucgugcugaucgcccugagcauccuggccgugcugaagggccuguacaacuucgccaccugcggccuggugggccuggugaccuuccugcugcugugcggcagaagcugcaccaccagccuguacaagggcguguacgagcugcagacccuggagcugaacauggagacccugaacaugaccaugccccugagcugcaccaagaacaacagccaccacuacaucauggugggcaacgagaccggccuggagcugacccugaccaacaccagcaucaucaaccacaaguucugcaaccugagcgacgcccacaagaagaaccuguacaaccacgcccugaugagcaucaucagcaccuuccaccugagcauccccaacuucaaccaguacgaggccaugagcugcgacuucaacggcggcaagaucagcgugcaguacaaccugagccacagcuacgccggcgacgccgccagccacugcggcaccguggccaacggcgugcugcagaccuucaugagaauggccuggggcggcagcuacaucgcccuggacagcggcuacggcaagugggacugcaucaugaccagcuaccaguaccugaucauccagaacaccaccugggaggaccacugccaguucagcagacccagccccaucggcuaccugggccugcugagccagagaaccagagacaucuacaucagcagaagacugcugggcaccuucaccuggacccugagcgacagcgagggcaaggacacccccggcggcuacugccugaccagauggaugcugaucgaggccgagcugaagugcuucggcaacaccgccguggccaagugcaacgagaagcacgacgaggaguucugcgacaugcugagacuguucgacuucaacaagcaggccauccagagacugaagacccccgcccagaugagcauccagcugaucaacaaggccgugaacgcccugaucaacgaccagcugaucaugaagaaccaccugagagacaucaugggcauccccuacugcaacuacagcaaguacugcuaccugaaccacaccaccaccggcaagaccagccugcccaagugcugccuggugagcaacggcagcuaccugaacgagacccacuucagcgacgacaucgagcagcaggccgacaacaugaucaccgagaugcugcagaaggaguacauggagagacagggcaagaccccccugggccugguggaccuguucguguucagcaccagcuucuaccugaucagcaucuuccugcaccuggugaagauccccacccacagacacaucgugggcaagagcugccccaagccccacagacugaaccacaugggcaucugcagcugcggccuguacaagcagcccggcgugcccgugagauggaagagaugaggacuagucccuguucccagagcccacuuuuuuuucuuuuuuugaaauaaaauagccugucuuucagaucuaaaaaaaaaaaaaaaaaaaaaaaaaaaaaaaaaaaaaaaaaaaaaaaaaaaaaaaaaaaaaaaaaaaaaaaaaaaaaaaaaaaaaaaaaaaaaaaaaaaa

SEQ ID NO: 31934 - RNA, 1724 nt, Artificial Sequence
  mRNA product Design a-1 (A100) comprising derived and/or modified sequence from LASV(G502-SLE-2009;Clade IV)__AIT17126__GPCmut7 (opt4)
aggagagucccgcagucggcguccagcggcucugcuuguucgugugugugucguugcaggccuuauucaagcuuaccaugggccagaucgugaccuucuuccaggaggugccccacgugaucgaggaggugaugaacaucgugcugaucgcccugagcauccuggccgugcugaagggccuguacaacuucgccaccugcggccuggugggccugcugaccuuccugcugcugugcggcagaagcugcaccaccggccuguacaagggcguguacgagcugcagacccuggagcugaacauggagacccugaacaugaccaugccccugagcugcaccaagaacaacagccaccacuacaucauggugggcaacgagaccggccuggagcugacccugaccaacaccagcaucaucaaccacaaguucugcaaccugagcgacgcccacaagaagaaccuguacgaccacgcccugaugagcaucaucagcaccuuccaccugagcauccccaacuucaaccaguacgaggccaugagcugcgacuucaacggcggcaagaucagcgugcaguacaaccugagccacagcuacgccggcgacgccgccgaccacugcggcaccguggccaacggcgugcugcagaccuucaugagaauggccuggggcggcagcuacaucgcccuggacagcggcagaggcagaugggacugcaucaugaccagcuaccaguaccugaucauccagaacaccaccugggaggaccacugccaguucagcagacccagccccaucggcuaccugggccugcugagccagagaaccagagacaucuacaucagcagaagacugcugggcaccuucaccuggacccugagcgacagcgagggcaaggacacccccggcggcuacugccugaccagauggaugcugaucgaggccgagcugaagugcuucggcaacaccgccguggccaagugcaacgagaagcacgacgaggaguucugcgacaugcugagacuguucgacuucaacaagcaggccauccagagacugaaggcccccgcccagaugagcauccagcugaucaacaaggccgugaacgcccugaucaacgaccagcuggugaugaagaaccaccugagagacaucaugggcauccccuacugcaacuacagcagauacugcuaccugaaccacaccaccaccggcagaaccagccugcccaagugcugccuggugagcaacggcagcuaccugaacgagacccacuucagcgacgacaucgagcagcaggccgacaacaugaucaccgagaugcugcagaaggaguacauggagagacagggcaagaccccccugggccugguggaccuguucguguucagcaccagcuucuaccugaucagcaucuuccugcaccuggugaagauccccacccacagacacaucgugggcaagagcugccccaagccccacagacugaaccacaugggcaucugcagcugcggccuguacaagcagcccggcgugcccgugaaguggaagagaugaggacuagucccuguucccagagcccacuuuuuuuucuuuuuuugaaauaaaauagccugucuuucagaucuaaaaaaaaaaaaaaaaaaaaaaaaaaaaaaaaaaaaaaaaaaaaaaaaaaaaaaaaaaaaaaaaaaaaaaaaaaaaaaaaaaaaaaaaaaaaaaaaaaaa

SEQ ID NO: 31935 - RNA, 1724 nt, Artificial Sequence
  mRNA product Design a-1 (A100) comprising derived and/or modified sequence from LASV(G733-SLE-2010;Clade IV)__AIT17154__GPCmut7 (opt4)
aggagagucccgcagucggcguccagcggcucugcuuguucgugugugugucguugcaggccuuauucaagcuuaccaugggccagaucgugaccuucuuccaggaggugccccacgugaucgaggaggugaugaacaucgugcugaucgcccugagcauccuggccgugcugaagggccuguacaacuucgccaccugcggcaucgugggccuggugagcuuccugcugcugugcggcagaagcugcaccaccagccuguacaagggcguguacgagcugcagacccuggagcugaacauggagacccugaacaugaccaugccccugagcugcaccaagaacaacagccaccacuacaucauggugggcaacgagaccggccuggagcugacccugaccaacaccagcaucaucaaccacaaguucugcaaccugagcgacgcccacaagaagaaccuguacgaccacgcccugaugagcaucaucagcaccuuccaccugagcauccccaacuucaaccaguacgaggccaugagcugcgacuucaacggcggcaagaucagcgugcaguacaaccugagccacagcuacgccggcgacgccgccaaccacugcggcaccaucgccaacggcgugcugcagaccuucaugagaauggccuggggcggcagcuacaucgcccuggacagcggcagagacagaugggacugcaucaugaccagcuaccaguaccugaucauccagaacaccaccugggaggaccacugccaguucagcagacccagccccaucggcuaccugggccugcugagccagagaaccagagacaucuacaucagcagaagacugcugggcaccuucaccuggacccugagcgacagcgagggcaaggacacccccggcggcuacugccugaccagauggaugcugaucgaggccgagcugaagugcuucggcaacaccgccguggccaagugcaacgagaagcacgacgaggaguucugcgacaugcugagacuguucgacuucaacaagcaggccauccagagacugaaggcccccgcccagaugagcauccagcugaucaacaaggccgugaacgcccugaucaacgaccagcugaucaugaagaaccaccugagagacaucaugggcauccccuacugcaacuacagcaaguacugcuaccugaaccacaccaccaccggcaagaccagccugcccaagugcugccuggugagcaacggcagcuaccugaacgagacccacuucagcgacgacaucgagcagcaggccgacaacaugaucaccgagaugcugcagaaggaguacauggagagacagggcaagaccccccugggccugguggaccuguucguguucagcaccagcuucuaccugaucagcaucuuccugcaccuggugaagauccccacccacagacacguggugggcaagagcugccccaagccccacagacugaaccacaugggcaucugcagcugcggccuguacggccagcccggcgugcccgugaaguggaagagaugaggacuagucccuguucccagagcccacuuuuuuuucuuuuuuugaaauaaaauagccugucuuucagaucuaaaaaaaaaaaaaaaaaaaaaaaaaaaaaaaaaaaaaaaaaaaaaaaaaaaaaaaaaaaaaaaaaaaaaaaaaaaaaaaaaaaaaaaaaaaaaaaaaaaa

SEQ ID NO: 31936 - RNA, 1724 nt, Artificial Sequence
  mRNA product Design a-1 (A100) comprising derived and/or modified sequence from MOPV/LASV reassortant(IGS-1;Clade IV)__AFY05576__GPCmut7 (opt4)
aggagagucccgcagucggcguccagcggcucugcuuguucgugugugugucguugcaggccuuauucaagcuuaccaugggccagaucgugaccuucuuccaggaggugccccacgugaucgaggaggugaugaacaucgugcugaucgcccugagcgugcuggccgugcugaagggccuguacaacuucgccaccugcggccuggugggccuggugaccuuccugcugcugugcggcagaagcugcaccaccagccuguacaagggcguguacgagcugcagacccuggagcugaacauggagacccugaacaugaccaugccccugagcugcaccaagaacaacagccaccacuacaucauggugggcaacgagaccggccuggagcugacccugaccaacaccagcaucaucaaccacaaguucugcaaccugagcgacgcccacaagaagaaccuguacgaccacgcccugaugagcaucaucagcaccuuccaccugagcauccccaacuucaaccaguacgaggccaugagcugcgacuucaacggcggcaagaucagcgugcaguacaaccugagccacagcuacgccggcgacgccgccaaccacugcggcaccguggccaacggcgugcugcagaccuucaugagaauggccuggggcggcagcuacaucgcccuggacagcggcagaggcaacugggacugcaucaugaccagcuaccaguaccugaucauccagaacaccaccugggaggaccacugccaguucagcagacccagccccaucggcuaccugggccugcugagccagagaaccagagacaucuacaucagcagaagacugcugggcaccuucaccuggacccugagcgacagcgagggcgaggacacccccggcggcuacugccugaccagauggaugcugaucgaggccgagcugaagugcuucggcaacaccgccguggccaagugcaacgagaagcacgacgaggaguucugcgacaugcugagacuguucgacuucaacaagcaggccauccagagacugaaggcccccgcccagaugagcauccagcugaucaacaaggccgugaacgcccugaucaacgaccagcugaucaugaagaaccaccugagagacaucaugggcauccccuacugcaacuacagcaaguacugcuaccugaaccacaccaccaccggcagaaccagccugcccaagugcugccuggugagcaacggcagcuaccugaacgagacccacuucagcgacgacaucgagcagcaggccgacaacaugaucaccgagaugcugcagaaggaguacauggagagacagggcaagaccccccugggccugguggaccuguucguguucagcaccagcuucuaccugaucagcaucuuccugcaccuggugaagauccccacccacagacacaucgugggcaagagcugccccaagccccacagacugaaccacaugggcaucugcagcugcggccuguacaagcagcccggcgugcccgugaaguggaagagaugaggacuagucccuguucccagagcccacuuuuuuuucuuuuuuugaaauaaaauagccugucuuucagaucuaaaaaaaaaaaaaaaaaaaaaaaaaaaaaaaaaaaaaaaaaaaaaaaaaaaaaaaaaaaaaaaaaaaaaaaaaaaaaaaaaaaaaaaaaaaaaaaaaaaa

SEQ ID NO: 31937 - RNA, 1724 nt, Artificial Sequence
  mRNA product Design a-1 (A100) comprising derived and/or modified sequence from LASV(LM765-SLE-2012;Clade IV)__AIT17814__GPCmut7 (opt4)
aggagagucccgcagucggcguccagcggcucugcuuguucgugugugugucguugcaggccuuauucaagcuuaccaugggccagaucgugaccuucuuccaggaggugccccacgugaucgaggaggugaugaacaucgugcugaucgcccugagcauccuggccgugcugaagggccuguacaacuucgccaccugcggccuggugggccuggugaccuuccugcugcugugcggcagaagcugcaccaccagccuguacaagggcguguacgagcugcagacccuggagcugaacauggagacccugaacaugaccaugccccugagcugcaccaagaacaacagccaccacuacaucauggugggcaacgagaccggccuggagcugacccugaccaacaccagcaucaucgaccacaaguucugcaaccugagcgacgcccacagaaagaaccuguacgaccacgcccugaugagcaucaucagcaccuuccaccugagcauccccaacuucaaccaguacgaggccaugagcugcgacuucaacggcggcaagaucagcgugcaguacaaccugagccacagcuacgccaaggacgccgccgaccacugcggcaccguggccaacggcgugcugcagaccuucaugagaauggccuggggcggcagcuacaucgcccuggacagcggcagaggcagaugggacugcaucaugaccagcuaccaguaccugaucauccagaacaccaccugggaggaccacugccaguucagcagacccagccccaucggcuaccugggccugcugagccagagaaccagagacaucuacaucagcagaagacugcugggcaccuucaccuggacccugagcgacagcgagggcaaggacacccccggcggcuacugccugaccagauggaugcugaucgaggccgagcugaagugcuucggcaacaccgccguggccaagugcaacgagaagcacgacgaggaguucugcgacaugcugagacuguucgacuucaacaagcaggccauccagagacugaaggcccccgcccagaugagcauccagcugaucaacaaggccgugaacgcccugaucaacgaccagcugaucaugaagaaccaccugagagacaucaugggcauccccuacugcaacuacagcaaguacugcuaccugaaccacaccaccaccggcaagaccagccugcccaagugcugccuggugagcaacggcagcuaccugaacgagacccacuucagcgacgacaucgagcagcaggccgacaacaugaucaccgagaugcugcagaaggaguacauggagagacagggcaagaccccccugggccugguggaccuguucguguucagcaccagcuucuaccugaucagcaucuuccugcaccuggugaagauccccacccacagacacaucgugggcaagcccugccccaagccccacagacugaaccacaugggcaucugcagcugcggccuguacaagcagcccggcgugcccgugaaguggaagagaugaggacuagucccuguucccagagcccacuuuuuuuucuuuuuuugaaauaaaauagccugucuuucagaucuaaaaaaaaaaaaaaaaaaaaaaaaaaaaaaaaaaaaaaaaaaaaaaaaaaaaaaaaaaaaaaaaaaaaaaaaaaaaaaaaaaaaaaaaaaaaaaaaaaaa

SEQ ID NO: 31938 - RNA, 1724 nt, Artificial Sequence
  mRNA product Design a-1 (A100) comprising derived and/or modified sequence from LASV(LM776-SLE-2012;Clade IV)__AIT17824__GPCmut7 (opt4)
aggagagucccgcagucggcguccagcggcucugcuuguucgugugugugucguugcaggccuuauucaagcuuaccaugggccagaucgugaccuucuuccaggaggugccccacgugaucgaggaggugaugaacaucgugcugaucgcccugagcauccuggccgugcugaagggccuguacaacuucgccaccugcggccuggugggccuggugaccuuccugcugcugugcggcagaagcugcaccaccagcguguacaagggcguguacgagcugcagacccuggagcugaacauggagacccugaacaugaccaugccccugagcugcaccaagaacaacagccaccacuacaucauggugggcaacgagaccggccuggagcugacccugaccaacaccagcaucaucaaccacaaguucugcaaccugagcgacgcccacaagaagaaccuguacgaccacgcccugaugagcaucaucagcaccuuccaccugagcauccccaacuucaaccaguacgaggccaugagcugcgacuucaacggcggcaagaucagcgugcaguacaaccugagccacagcuacgccggcgacgccgccaaccacugcggcaccguggccaacggcgugcugcagaccuucaugagaauggccuggggcggcagcuacaucgcccuggacagcggccacggcaagugggacugcaucaugaccagcuaccaguaccugaucauccagaacaccaccugggaggaccacugccaguucagcagacccagccccaucggcuaccugggccugcugagccagagaaccagagacaucuacaucagcagaagacugcugggcaccuucaccuggacccugagcgacagcgagggcaaggacacccccggcggcuacugccugaccagauggaugcugaucgaggccgagcugaagugcuucggcaacaccgccguggccaagugcaacgagaagcacgacgaggaguucugcgacaugcugagacuguucgacuucaacaagcaggccauccagagacugaaggcccccgcccagaugagcauccagcugaucaacaaggccgugaacgcccugaucaacgaccagcugaucaugaagaaccaccugagagacaucaugggcauccccuacugcaacuacagcaaguacugcuaccugaaccacaccaccaccggcaagaccagccugcccaagugcugccuggugagcaacggcagcuaccugaacgagacccacuucagcgacgacaucgagcagcaggccgacaacaugaucaccgagaugcugcagaaggaguacauggagagacagggcaagaccccccugggccugguggaccuguucguguucagcaccagcuucuaccugaucagcaucuuccugcaccuggugaagauccccacccacagacacaucgugggcaagagcugccccaagccccacagacugaaccacaugggcaucugcagcugcggccuguacaagcagcccggcgugcccgugagauggaagagaugaggacuagucccuguucccagagcccacuuuuuuuucuuuuuuugaaauaaaauagccugucuuucagaucuaaaaaaaaaaaaaaaaaaaaaaaaaaaaaaaaaaaaaaaaaaaaaaaaaaaaaaaaaaaaaaaaaaaaaaaaaaaaaaaaaaaaaaaaaaaaaaaaaaaa

SEQ ID NO: 31939 - RNA, 1724 nt, Artificial Sequence
  mRNA product Design a-1 (A100) comprising derived and/or modified sequence from LASV(Mad39;Clade IV)__ANH09722__GPCmut7 (opt4)
aggagagucccgcagucggcguccagcggcucugcuuguucgugugugugucguugcaggccuuauucaagcuuaccaugggccagaucgugaccuucuuccaggaggugccccacgugaucgaggaggugaugaacaucgugcugaucgcccugagcauccuggccgugcugaagggccuguacaacguggccaccugcggccugaucggccuggugaccuuccugcugcugugcggcagaagcugcaccaccacccuguacaagggcguguacgagcugcaggcccuggagcugaacauggagacccugaacaugaccaugccccugagcugcaccaagaacaacagccaccacuacaucagagugggcaacgagaccggccuggagcugacccugaccaacaccagccugaucaaccacaaguucugcaaccugagcgacgcccacaagaagaaccuguacgaccacgcccugaugagcaucaucagcaccuuccaccugagcauccccaacuucaaccaguacgaggccaugagcugcgacuucaacgacggcaagaucagcgugcaguacaaccugagccacaccuacgccggcgacaccgccaaccacugcggcaccguggccaacggcgugcugcagaccuucaugagaauggccuggggcggcagcuacaucgcccuggacagcggcagaggcggcugggacugcaucaugaccagcuaccaguaccugaucauccagaacaccaccugggaggaccacugccaguucagcagacccagccccaucggcuaccugggccugcugagccagagaaccagagacaucuacaucagcagaagacugcugggcaccuucaccuggacccugagcgacagcgagggcaaggacacccccggcggcuacugccugaccagauggaugcugaucgaggccgagcugaagugcuucggcaacaccgccguggccaagugcaacgagaagcacgacgaggaguucugcgacaugcugagacuguucgacuucaacaagcaggccauccagagacugaaggcccccgcccagaugagcauccagcugaucaacaaggccgugaacgcccugaucaacgaccagcugaucaugaagaaccaccugagagacaucaugggcauccccuacugcaacuacagcaaguacugcuaccugaaccacaccgugaccggcaagaccagccugcccaagugcugccuggugagcaacggcagcuaccugaacgagacccacuucagcgacgacaucgagcagcaggccgacaacaugaucaccgagaugcugcagaaggaguacauggagagacagggcaagaccccccugggccugguggaccuguucguguucagcaccagcuucuaccugaucagcaucuuccugcaccuggugaagauccccacccacagacacguggugggcaagcccugccccaagccccacagacugaaccacaugggcaucugcagcugcggcuucuacaagcagcccggcgugcccgugagauggaagagaugaggacuagucccuguucccagagcccacuuuuuuuucuuuuuuugaaauaaaauagccugucuuucagaucuaaaaaaaaaaaaaaaaaaaaaaaaaaaaaaaaaaaaaaaaaaaaaaaaaaaaaaaaaaaaaaaaaaaaaaaaaaaaaaaaaaaaaaaaaaaaaaaaaaaa

SEQ ID NO: 31940 - RNA, 1724 nt, Artificial Sequence
  mRNA product Design a-1 (A100) comprising derived and/or modified sequence from LASV(Z0947-SLE-2011;Clade IV)__AIT17840__GPCmut7 (opt4)
aggagagucccgcagucggcguccagcggcucugcuuguucgugugugugucguugcaggccuuauucaagcuuaccaugggccagaucgugaccuucuuccaggaggugccccacgugaucgaggaggugaugaacaucgugcugaucgcccugagcauccuggccgugcugaagggccuguacaacuucgccaccugcggccuggugggccuggugaccuuccugcugcugugcggcagaagcugcaccaucagccuguacaagggcguguacgagcugcagacccuggagcugaacauggagacccugaacaugaccaugccccugagcugcaccaagaacaacagccaccacuacaucauggugggcaacgagaccggccuggagcugacccugaccaacaccagcaucaucaaccacaaguucugcaaccugagcgacgcccacaagaagaaccuguacgaccacgcccugaugagcaucaucagcaccuuccaccugagcauccccaacuucaaccaguacgaggccaugagcugcgacuucaacggcggcaagaucagcgugcaguacaaccugagccacagcuacgccggcgacgccgccaaccacugcggcaccguggccaacggcgugcugcagaccuucaugagaauggccuggggcggcagcuacaucgcccuggacagcggcagagacagaugggacugcaucaugaccagcuaccaguaccugaucauccagaacaccaccugggaggaccacugccaguucagcagacccagccccaucggcuaccugggccugcugagccagagaaccagagacaucuacaucagcagaagacugcugggcaccuucaccuggacccugagcgacagcgagggcaaggacacccccggcggcuacugccugaccagauggaugcugaucgaggccgagcugaagugcuucggcaacaccgccguggccaagugcaacgagaagcacgacgaggaguucugcgacaugcugagacuguucgacuucaacaagcaggccauccagagacugaaggcccccgcccagaugagcauccagcugaucaacaaggccgugaacgcccugaucaacgaccagcugaucaugaagaaccaccugagagacaucaugggcauccccuacugcaacuacagcaaguacugcuaccugaaccacaccaccaccggcaagaccagccugcccaagugcugccuggugagcaacggcagcuaccugaacgagacccacuucagcgacgacaucgagcagcaggccgacaacaugaucaccgagaugcugcagaaggaguacauggagagacagggcaagaccccccugggccugguggaccuguucguguucagcaccagcuucuaccugaucagcaucuuccugcaccuggugaagauccccacccacagacacaucgugggcaagcccugccccaagccccacagacugaaccacaugggcaucugcagcugcggccuguacaagcagcccggcgugcccgugaaguggaagagaugaggacuagucccuguucccagagcccacuuuuuuuucuuuuuuugaaauaaaauagccugucuuucagaucuaaaaaaaaaaaaaaaaaaaaaaaaaaaaaaaaaaaaaaaaaaaaaaaaaaaaaaaaaaaaaaaaaaaaaaaaaaaaaaaaaaaaaaaaaaaaaaaaaaaa

SEQ ID NO: 31941 - RNA, 1724 nt, Artificial Sequence
  mRNA product Design a-1 (A100) comprising derived and/or modified sequence from LASV(Josiah;Clade IV)__NP_694870__GPCmut7 (opt5)
aggagagucccgcagucggcguccagcggcucugcuuguucgugugugugucguugcaggccuuauucaagcuuaccaugggccagaucgugaccuucuuucaagaggucccccacguuauugaagaggugaugaacaucgugcugauugcccucagcguccuggcugugcuuaaggggcuguacaauuucgccacaugcggacucguuggccuggugacguuucuucugcucugugggagauccugcaccacaucucuguauaaaggagucuacgaacugcagacccucgagcugaacauggaaacacuuaauaugaccaugccucugagcuguacaaagaacaauucccaucacuauaucauggugggcaacgagaccgggcucgagcugacgcuuaccaauacaucuauuaucaaccauaaauucugcaaucugagcgacgcgcacaagaaaaaccucuacgaucaugcucugauguccaucauuucuaccuuucaccugagcaucccgaauuucaaccaguaugaagccauguccugugacuuuaauggaggcaagauuagcguucaguacaaccucucucacuccuaugccggcgaugcugccaaucauugcgggacaguggcuaacggaguccugcaaaccuucaugcggauggccuggggcgggagcuacaucgcgcuugacucuggacgcggcaacugggauuguauuaugacguccuaccaguaucugaucauucagaauacaaccugggaggaccacugccaguuuagcagacccucuccuaucggguaccucggacugcuuucccaacggacacgcgauaucuauauuagcagacggcugcucggcaccuucaccuggacacuguccgacucugaaggcaaggauacgcccgggggauacugucugacccgcuggaugcucaucgaggccgagcugaaaugcuuuggcaacacagcuguggccaaguguaaugaaaaacaugacgaggaguucugcgauaugcuuagacuguuugacuucaacaagcaggcuauucagcggcucaaagccccugcgcagaugagcauccaacugauuaauaaggccgugaacgcucuuaucaaugaucagcugaucaugaagaaccaccuccgcgacauuauggggauccccuauugcaauuacuccaaauauuguuaccugaaccacaccacaaccggaagaacgagccugccuaagugcugucucgucucuaauggcuccuaccugaacgaaacacauuucagcgacgauauugaacagcaagccgacaauaugaucaccgagaugcuucagaaagaguauauggaacggcaggggaagaccccgcugggacucguugaucuguuuguguucucuaccagcuuuuaccugauuuccaucuuccuucaccucgugaaaauccccacacaucgccacauugucggcaagucuugcccuaaaccccauagacugaaccacaugggcaucuguagcugcgggcuguauaagcagccuggagugcccguuaaguggaaacggugaggacuagucccuguucccagagcccacuuuuuuuucuuuuuuugaaauaaaauagccugucuuucagaucuaaaaaaaaaaaaaaaaaaaaaaaaaaaaaaaaaaaaaaaaaaaaaaaaaaaaaaaaaaaaaaaaaaaaaaaaaaaaaaaaaaaaaaaaaaaaaaaaaaaa

SEQ ID NO: 31942 - RNA, 1721 nt, Artificial Sequence
  mRNA product Design a-1 (A100) comprising derived and/or modified sequence from LASV(LP;Clade I)__AAF86701__GPCmut7 (opt5)
aggagagucccgcagucggcguccagcggcucugcuuguucgugugugugucguugcaggccuuauucaagcuuaccaugggccagaucauuaccuucuuucaagaggugccccacgucaucgaagagguuaugaacauugugcugaucgcccucagccugcuugcuauucugaaggggcucuacaauaucgccacaugcggaaucauuggccugguggcguuccuuuuucugugugggaaauccugcucucucacgcugaagggaggcuaugaacugcagacccucgagcugaacauggaaacacuuaauaugaccaugccucugagcuguaccaaaaacuccucucaucacuacaucagagucgggaaugagacaggacucgagcugacacuuaccaacacgagcauuaucaaucauaaguucugcaaccuguccgacgcucacaaaaagaaucucuaugaucaugcccugaugucuauuaucagcaccuuucaccuguccauuccgaacuucaaucaguacgaagccaugagcugugacuuuaacggcggcaagaucucugugcaguauaaucucucccacagcuacgcuggggaugccgcugagcauugcggaacaguugccaacggcgugcugcaaaccuucaugcggauggcguggggagggcgcuauaucgcccuugacucuggcaaagggaauugggauuguauuaugacauccuaccaguaccugaucauucagaacaccacgugggaagaccacugccaguuuagcagacccucuccuaucggauaucucggccugcuuucccaacggacacgcgauauuuacaucagcagacggcugcucggcaccuucacauggacccuguccgacucugaggggaacgagacccccggaggcuauugucugacacgcuggaugcucaucgaagcugagcugaagugcuuugggaauacggccgucgcuaaauguaacgaaaagcaugaugaggaguucugcgacaugcuuagacuguuugauuucaauaaacaggccauucggcgccucaaggcgccugcccagaugagcauccagcugauuaacaaggcugugaaugcccuuaucaacgaccaacugauuaugaaaaaucaccucagagauaucaugggaauccccuacugcaacuauuccaaguacuguuaucugaaucacaccagcucuggccggacaucccugccuaaaugcugucucauuagcaacgggucuuaccugaaugaaacccaguucagcgacgacaucgagcagcaagcugauaacaugauuacagaaaugcuucagaaggaguacaucgaacgccagggaaaaaccccgcugggccucguugacauuuuuaucuucuccacgucuuuuuaucugauuagcaucuuccugcaucuuaucaagauucccacacacagacauaucgugggcaaaccuugccccaagccucaccggcucaaucauaugggggucuguuccugcggacuguacaagcaccccggcgugccgaccaaauggaagcgcugaggacuagucccuguucccagagcccacuuuuuuuucuuuuuuugaaauaaaauagccugucuuucagaucuaaaaaaaaaaaaaaaaaaaaaaaaaaaaaaaaaaaaaaaaaaaaaaaaaaaaaaaaaaaaaaaaaaaaaaaaaaaaaaaaaaaaaaaaaaaaaaaaaaaa

SEQ ID NO: 31943 - RNA, 1721 nt, Artificial Sequence
  mRNA product Design a-1 (A100) comprising derived and/or modified sequence from LASV(803213;Clade II)__AAF86703__GPCmut7 (opt5)
aggagagucccgcagucggcguccagcggcucugcuuguucgugugugugucguugcaggccuuauucaagcuuaccaugggccagaucauuaccuucuuucaagaggugccccacgucaucgaagagguuaugaacauugugcugaucgcccucagccugcuugcuauucugaaggggaucuacaauguggccacaugcggacucuucggccugaucuccuuucuucugcucugugggagaucuugcagcgucacguauaaaggaguguacgaacugcagacccuggagcucaacauggcgaaucugaacaugacaaugccucuuuccuguaccaagaauaacucucaucacuauauuaugguuggcaaugaaacagggcuggagcucacccugacaaacaccagcaucauuaaucauaaauucugcaaccuuuccgacgcucacaagaaaaaucuguacgaucaugcccucaugucuaucauuagcacguuucaccuguccaucccgaacuucaaucaguaugaggccaugagcugugacuuuaacggaggcaagauuucugugcaguacaaucugucccacagcuucgcugucgaugccgcuaaccauugcggcaccaucgccaacggggugcuccaaacauuuaugcggauggcguggggaggcucuuauaucgcccuggacuccgggaagggaaauugggauuguauuaugaccagcuaccaguaccuuaucauucagaacacaaccugggaagaccacugccaguucucucgccccuccccuaucggcuaucuggggcuccugagccaaagaacgcgggauauuuacaucucccgcagacuucugggaacauuuaccuggacacucucugacagcgagggcaaugaagcucccggcggguauugucugacccgguggaugcugaucgaggccgagcucaaaugcuucggaaacaccgcuguugccaaguguaaugaaaaacaugaugaggaauuuugcgacaugcugcgccuuuucgauuucaacaagcaggcgauuaaaagacugaagacgccugcccagauguccauccagcucauuaauaaggcugugaacgcccugaucaaugaccaacuuauuaugaaaaaccaucugcgggauaucaugggcauccccuacugcaauuauagccgcuacuguuaucucaaccacacagucaccgggaagacaucucugccuagaugcugucugguguccaauggaagcuaccucaacgagacccacuuuucugacgacauugaacagcaggcugauaauaugaucacagagaugcugcaaaaagaguacauggaccggcagggcaagaccccgcuugggcugguggaucucuucgucuuuagcacguccuucuaucugauuucuaucuuucugcaccuuguuaaaauucccacacaucgccacaucgugggaaagccuugccccaaaccucauagacucaaccacaugggcauuuguagcugcggccuguacaagcaccccggggugccggucaaguggaaacggugaggacuagucccuguucccagagcccacuuuuuuuucuuuuuuugaaauaaaauagccugucuuucagaucuaaaaaaaaaaaaaaaaaaaaaaaaaaaaaaaaaaaaaaaaaaaaaaaaaaaaaaaaaaaaaaaaaaaaaaaaaaaaaaaaaaaaaaaaaaaaaaaaaaaa

SEQ ID NO: 31944 - RNA, 1721 nt, Artificial Sequence
  mRNA product Design a-1 (A100) comprising derived and/or modified sequence from LASV(GA391;Clade III)__CAA36645__GPCmut7 (opt5)
aggagagucccgcagucggcguccagcggcucugcuuguucgugugugugucguugcaggccuuauucaagcuuaccaugggccagaucgugaccuucuuucaagaggucccccacguuauugaagaggugaugaacaucgugcugauugcccucagcauccuggcuauucuuaaggggcuguacaaugucgccacaugcggacucaucggccuggugacguuccuucugcucuccgggagaucuuguagccugaucuauaaaggaaccuacgaacugcagacacucgagcugaacauggaaacccuuaauaugacaaugccucuguccugcaccaagaacaauucucaucacuauauucggguuggcaacgagacagggcucgagcugacccuuacgaauaccagcauccugaaccauaaauuuuguaaucucuccgacgcgcacaagcgcaaccuguacgaucauucucugaugagcauuaucuccacauuccaccucagcauuccgaauuuuaaccaguaugaagcuaugucuugcgacuucaauggaggcaaaaucaccgugcaguacaaccugucccacagcuuugccgucgaugccgcuggccauugugggacacuugccaauggagugcugcaaaccuucaugagaauggcuuggggcgggucuuauauugcccucgacuccggacggggcaacugggauugcaucaugacgagcuaccaguaccugaucauucagaacacaaccugggacgaucacugucaguuuucucgccccuccccuaucggguaucuuggacugcucagccaaagaacacgggacauuuacaucucccgcagacugcugggcaccuucaccuggacacucucugauagcgagggcaaugaaacgcccgggggauauugccugacccgguggaugcuuauugaggcggagcugaaguguuuuggcaacacagccguugcuaagugcaaugaaaaacaugacgaggaguucugugauaugcuccgccuguuugacuucaacaagcaggccaucagacggcuuaaaaccccugcucagauguccauccagcugauuaauaaggccgugaacgcgcucaucaaugaucaacugauuaugaaaaaccaucugcgcgacaucauggggauucccuacugcaauuauagcagauacugcuaucucaaccacacaucuaccggaaagacgucccugccucgguguugccuuaucagcaauggcucuuaccugaacgaaacaaaguucagcgacgauaucgaacagcaggccgacaauaugauuaccgagaugcuccaaaaagaguacaucgaucgccaggggaagaccccgcugggacuggucgaccuuuuuguguucuccacaucuuuuuaucucauuagcaucuuccugcaccuggugaaaauucccacccacagacauaucgucggcaagccuugucccaaaccucaccggcucaaccauaugggcauuugcuccugugggcuguacaagcagcccggaguuccggugagauggaaacgcugaggacuagucccuguucccagagcccacuuuuuuuucuuuuuuugaaauaaaauagccugucuuucagaucuaaaaaaaaaaaaaaaaaaaaaaaaaaaaaaaaaaaaaaaaaaaaaaaaaaaaaaaaaaaaaaaaaaaaaaaaaaaaaaaaaaaaaaaaaaaaaaaaaaaa

SEQ ID NO: 31945 - RNA, 1724 nt, Artificial Sequence
  mRNA product Design a-1 (A100) comprising derived and/or modified sequence from LASV(AV;Clade V)__CCA30314__GPCmut7 (opt5)
aggagagucccgcagucggcguccagcggcucugcuuguucgugugugugucguugcaggccuuauucaagcuuaccaugggccagaucgugaccuucuuucaagaggucccccacguuauugaagaggugaugaacaucgugcugauugcccucagcauccuggcuguccuuaaggggcuguacaauauugccacaugcggacucaucggccugaucacguuccuucugcucugugggagauccugcucuagcaaccuguauaaaggaguguacgaacugcagucccucgaccugaauauggagacccuuaacaugacaaugccucugucuuguaccaagaauaacagccaucacuauauucggguuggcaaugauacagggcucgaacugacccuuacaaacaccuccauccugaaucauaaauuuugcaaccucucugacgcgcacaagaaagaucuguacgaccaugcucugaugagcauuaucuccacguuccaccucagcauuccgaauuuuaaccaguaugaggccaugucuugugauuucaauggaggcaagaucuccgugcaguacaaccugagccacucuuaugccauugacgcugccaaucauugcggcaccgucgcuaacgggauccuucaaacauuuaugcgcauggccuggggaggcuccuacaucgcgcuggauagcgggagaggaaacugggacuguauuaugaccucuuaccaguaucucaucauucagaauacaaccugggagaaccacugccaguucucccggcccagcccuaucggcuaccuggggcuucugucccaacgcacgagagauauuuauaucucucggcgccuccugggaacauuuaccuggacacugagcgacuccgaaggcaaugccacccccggcggguacugucucaccagauggaugcugaucgaggcugaacuuaagugcuucggaaacacagccguggcuaaauguaaugagaagcaugaugaggaauuuugcgacaugcugcgccucuucgauuuuaacaaacaggccauuagccggcugaagucuccugcgcagauguccauccagcuuauuaauaaagccguuaacgcucugaucaaugaccaacucauuaugaagaaccaccugagagacaucaugggcauccccuauugcaauuacagcaaguauuguuaccugaaccacacgauuaccgggaaaacaucucucccuaagugcugucuggugagcaauggauccuaccuuaacgagacccauuucucugaugacaucgaacagcaggccgauaauaugauuacagagaugcugcaaaaagaauauauggagcggcagggcaagaccccgcucgggcuggucgaccuguucguguuuagcacguccuucuaccuuaucagcauuuuucuccgccuggugaaaauccccacacacagacauauugucggaaagccuugccccaaaccucaccggcugaaccauaugggcaucuguucuugcggccucuauaagcagcccgggguuccggugcgcuggaagagaugaggacuagucccuguucccagagcccacuuuuuuuucuuuuuuugaaauaaaauagccugucuuucagaucuaaaaaaaaaaaaaaaaaaaaaaaaaaaaaaaaaaaaaaaaaaaaaaaaaaaaaaaaaaaaaaaaaaaaaaaaaaaaaaaaaaaaaaaaaaaaaaaaaaaa

SEQ ID NO: 31946 - RNA, 1721 nt, Artificial Sequence
  mRNA product Design a-1 (A100) comprising derived and/or modified sequence from LASV(Togo/2016/7082;Clade VI)__AMR44577__GPCmut7 (opt5)
aggagagucccgcagucggcguccagcggcucugcuuguucgugugugugucguugcaggccuuauucaagcuuaccaugggccagaucauuaccuucuuucaagaggugccccacgucaucgaagagguuaugaacauugugcugaucgcccucagccugcuugcuauucugaaggggguguacaaugucgccacaugcggaaucaucggccucgugacguuccuguuucuuugugggagauccugcucucugauuuauaaaggaagcuacgaacuccagacccuggagcugaacauggaaacacucaauaugaccaugccucuguccuguacaaagaacucuagccaucacuauauccggguuggcaaugagaccgggcuugagcugacacucaccaacacguccauuaucaaucauaaauucugcaaccugucugacgcgcacaagcgcaaucuuuacgaucaugcucugaugagcauucucuccaccuuucaccugagcaucccgaacuucaaucaguaugaagccaugucuugugacuuuaacggaggcaaaauuuccgugcaguacaaucugagccacgccuaugcugucgaugccgcugagcauugcggcacaguggccaacgggguucuccaaaccuucaugagaauggcguggggaggcucuuacaucgcccuggacuccgggcggggaaauugggauuguaucaugacaagcuaccaguaucuuauuauccagaacaccacgugggaagaccacugccaguuuucucgccccuccccuauuggcuaccuggggcuccugagccaaagaacacgggauaucuauauuucccgcagacuucugggaaccuucacauggacccucucugacagcgagggcaacgagacccccggcggguacugucugacacgguggaugcugaucgaagcugagcucaagugcuuuggaaauacggccguggcuaaguguaacgaaaaacaugaugaggaguucugcgacaugcugcgccuuuuugauuucaauaagcaggccauccagagacugaaauccccugcgcagaugagcauucaacucaucaacaaggccgucaaugcucugauuaacgaccagcuuaucaugaaaaaucaucugcgggauaugaugggcauucccuauugcaacuacucuaaguauuguuaccucaaucacaccuccagcgggcgcacaucucugccuaagugcugucuggugagcaacggauccuaccucaaugaaacccacuucucugacgacaucgagcagcaagccgauaacaugaucacagaaaugcugcagaaagaguauauugacagacagggcaagaccccgcuugggcugguggaucucuuugucuucagcacguccuuuuaccugaucagcauuuuccugcaccuuaucaaaauucccacacaucggcacaucguuggaaagccuugccccaaaccucaucgccucaaucacaugggcauuuguucuugcggccuguauaagcagcccggggugccgaccagauggaaacggugaggacuagucccuguucccagagcccacuuuuuuuucuuuuuuugaaauaaaauagccugucuuucagaucuaaaaaaaaaaaaaaaaaaaaaaaaaaaaaaaaaaaaaaaaaaaaaaaaaaaaaaaaaaaaaaaaaaaaaaaaaaaaaaaaaaaaaaaaaaaaaaaaaaaa

SEQ ID NO: 31947 - RNA, 1721 nt, Artificial Sequence
  mRNA product Design a-1 (A100) comprising derived and/or modified sequence from LASV(KAK-428;Clade n.d. (VII))__ANH09740__GPCmut7 (opt5)
aggagagucccgcagucggcguccagcggcucugcuuguucgugugugugucguugcaggccuuauucaagcuuaccaugggccagaucgugaccuucuuucaagaggucccccacguuauugaagaggugaugaacaucgugcugauugcccucagccugcuugcuauccugaaggggcucuacaauuucgccacaugcggagucauuggccugaucacguuucuucugcucugugggagauccugcucugcgaccuauaaaggacaguacgaacugcagacacuggagcucaacauggaaagccugaauaugaccaugccucuuuccuguacaaagaacaauucucaucacuauauccgggcuggcaacaauaccgggcuggagcucacacugaccaacacgagcauuaucucccauaaauucugcaaucuuucugacgcccacaagaaaaaccuguacgaucauacccucaugagcauuaucacaaccuuucaccuguccauuccgaauuucaaccaguaugaggccaugagcugugacuuuaauggaggcaagaucucuauucaauacaaccugucccacagcuaugcuggcgaugccgcucagcauugcgggacaguggccaauggaguucuccagaccuucaugcgcauggcguggggcgggucuuaccuggcccuugacuccggaagacggggcugggauuguaucaucagcucuuaccaguaucugauuauccaaaacacgacaugggacgaucacugccaguuuucccgccccagcccuauuggguaccucggauucgugucccagaagaccagagacaucuauauuucucggcgccugcuuggcacauuuaccuggacccugagcgauuccgaaggccaugacaugcccgggggauacugucucacaagauggaugcugaucgaggcugaucugaaaugcuucggcaacacggccgucgcuaaguguaaugaaaaacacgacgaggaguuuugcgauauguggcgccucuucgacuucaacaagcaggccauccaacggcugaaagcgccugcccagaugaauauucagcuuaucaacaaggcugugaaugcccugauuaacgaccaacucaugaugaagaaucaccugagagauaucauggggauucccuauugcaacuacagcaaauuuuguuaucuuaauaacaccacaaccggacggacaucucugccucgcugcugucucaucuccaauggcagcuaccugaacgaaacccauuucucugacgauaucgagcagcaggcugacaauaugauuacggaaaugcugcagaaggaguacauggauagacaagggaaaacaccgcucggacugguugaccuuuuuguguucagcaccuccuuuuaucugaucaccauuuuccuccaccuggucaagauccccacacaucggcacauugugggcaaaccuugccccaagccucaucgccugaaccacaugggcaucuguucuugcgggcuuuacaaacagcccggagugccggucagauggaagcggugaggacuagucccuguucccagagcccacuuuuuuuucuuuuuuugaaauaaaauagccugucuuucagaucuaaaaaaaaaaaaaaaaaaaaaaaaaaaaaaaaaaaaaaaaaaaaaaaaaaaaaaaaaaaaaaaaaaaaaaaaaaaaaaaaaaaaaaaaaaaaaaaaaaaa

SEQ ID NO: 31948 - RNA, 1721 nt, Artificial Sequence; identical to SEQ ID NO: 31942
  mRNA product Design a-1 (A100) comprising derived and/or modified sequence from LASV(Pinneo-NIG-1969;Clade I)__AIT17836__GPCmut7 (opt5)

SEQ ID NO: 31949 - RNA, 1721 nt, Artificial Sequence
  mRNA product Design a-1 (A100) comprising derived and/or modified sequence from LASV(ISTH0009-NIG-2011;Clade II)__AIT17404__GPCmut7 (opt5)
aggagagucccgcagucggcguccagcggcucugcuuguucgugugugugucguugcaggccuuauucaagcuuaccaugggccagaucauuaccuucuuucaagaggugccccacgucaucgaagagguuaugaacauugugcugaucgcccucagccugcuugcuauucugaaggggaucuacaauguggccacaugcggacucuucggccuggucuccuuucuucugcucugugggagaucuugcagcacgaccuauaaaggaguguacgaacugcagacacuggagcucgacauggcgucccugaacaugaccaugccucuuucuuguacaaagaauaacagccaucacuauaucaugguuggcaaugaaaccgggcuggagcucacacugaccaacacguccauuaucaaucauaaauucugcaaccuuucugaugcucacaagaaaaaucuguacgaccaugcccucaugagcauuaucuccaccuuucaccugagcauuccgaacuucaaucaguaugaggccaugucuugugauuuuaacggaggcaagaucuccgugcaguacaaucugagccacgcuuaugccgucgacgcugccaaccauugcggcacaauugcgaauggggugcuccaaaccuucaugcggauggccuggggaggcucuuacaucgcucuggauuccgggaagggaagcugggacuguaucaugacaucuuaccaguaucuuauuauccagaacaccacgugggaagaucacugccaguuuucccgccccagcccuauuggcuaccuggggcuccugucccaaagaacacgggacaucuauauuucucgcagacuucugggaaccuucacauggacccucagcgauuccgagggcaacgaaacccccggcggguacugucugacacgguggaugcugaucgaggccgagcucaaaugcuuuggaaauacggcuguugccaaguguaacgaaaaacaugacgaggaguucugcgauaugcugcgccuuuuugacuucaauaagcaggcgaucagacggcugaaaaccccugcccagaugagcauucagcucaucaacaaggcugugaaugcccugauuaacgaucaacuuaucaugaagaaucaucugcgcgacauuaugggcauccccuauugcaacuacucuaaauauuguuaccucaaucacacagucaccgggaagacaucccugccuagaugcugucuggugagcaacggaucuuaccucaaugaaacccacuucagcgacgauaucgaacagcaggcugacaacaugauuacggagcugcuucaaaaagaguauauggaucggcagggcaagacaccgcuggggcucguggaccuguuugucuucuccaccucuuuuuaccugaucagcauuuuccuucaccucaucaaaauucccacccaucgccacaucacaggaaagccuugccccaaaccucauagacugaaucacaugggcauuuguuccugcggccuguauaagcaccccgggguuccggugaaguggaaacggugaggacuagucccuguucccagagcccacuuuuuuuucuuuuuuugaaauaaaauagccugucuuucagaucuaaaaaaaaaaaaaaaaaaaaaaaaaaaaaaaaaaaaaaaaaaaaaaaaaaaaaaaaaaaaaaaaaaaaaaaaaaaaaaaaaaaaaaaaaaaaaaaaaaaa

SEQ ID NO: 31950 - RNA, 1721 nt, Artificial Sequence
  mRNA product Design a-1 (A100) comprising derived and/or modified sequence from LASV(ISTH2010-NIG-2012;Clade II)__AIT17482__GPCmut7 (opt5)
aggagagucccgcagucggcguccagcggcucugcuuguucgugugugugucguugcaggccuuauucaagcuuaccaugggccagaucauuaccuucuuucaagaggugccccacgucaucgaagagguuaugaacauugugcugaucgcccucagccugcuugcuauucugaaggggaucuacaauguggccacaugcggacucuucggccuggucuccuuucuucugcucugugggagaucuugcagcacgaccuauaaaggaguguacgaacugcagacacuggagcucgacauggcgucccugaacaugaccaugccucuuucuuguacaaagaauaacagccaucacuauaucaugguuggcaaugaaaccgggcuggagcucacacugaccaacacguccauuaucaaucauaaauucugcaaccuuucugaugcucacaagaaaaaucuguacgaccaugcccucaugagcauuaucuccaccuuucaccugagcauuccgaacuucaaucaguaugaggccaugucuugugauuuuaacggaggcaagaucuccgugcaguacaaucugagccacgcuuaugccgucgacgcugccaaccauugcggcacaauugcgaauggggugcuccaaaccuucaugcggauggccuggggaggcucuuacaucgcucuggauuccgggaagggaagcugggacuguaucaugacaucuuaccaguaucuuauuauccagaacauuaccugggaagaucacugccaguuuucccgccccagcccuaucggcuaccuggggcuccugucccaaagaacgcgggacauuuauaucucucgcagacuucugggaacauucaccuggacacucagcgauuccgagggcaacgaaacccccggcggguacugucugacccgguggaugcugaucgaggccgagcucaaaugcuuuggaaauacagcuguugccaaguguaacgaaaaacaugacgaggaguucugcgauaugcugcgccuuuuugacuucaauaagcaggcgauuagacggcugaaaacgccugcccagaugagcauccagcucauuaacaaggcugugaaugcccugaucaacgaucaacuuauuaugaagaaucaucugcgcgacaucaugggcauccccuauugcaacuacucuaaauauuguuaccucaaucacaccgucacagggaagaccucccugccuagaugcugucuggugagcaacggaucuuaccucaaugaaacacacuucagcgacgauauugaacagcaggcugacaacaugaucaccgagcugcuucaaaaagaguauauugaucggcagggcaagacgccgcuggggcucguggaccuguuugucuucuccacaucuuuuuaccugaucagcauuuuccuucaccucguuaaaauccccacccaucgccacguggugggaaagccuugccccaaaccucauagacugaaucacaugggcauuuguuccugcggccuguauaagcaccccggggucccggugaaguggaaacggugaggacuagucccuguucccagagcccacuuuuuuuucuuuuuuugaaauaaaauagccugucuuucagaucuaaaaaaaaaaaaaaaaaaaaaaaaaaaaaaaaaaaaaaaaaaaaaaaaaaaaaaaaaaaaaaaaaaaaaaaaaaaaaaaaaaaaaaaaaaaaaaaaaaaa

SEQ ID NO: 31951 - RNA, 1721 nt, Artificial Sequence
  mRNA product Design a-1 (A100) comprising derived and/or modified sequence from LASV(Lassa virus/H.sapiens-wt/NGA/2015/ISTH_0543;Clade II)__AVO03639__GPCmut7 (opt5)
aggagagucccgcagucggcguccagcggcucugcuuguucgugugugugucguugcaggccuuauucaagcuuaccaugggccagaucauuaccuucuuucaagaggugccccacgucaucgaagagguuaugaacauugugcugaucgcccucagccugcuugcuauucugaaggggaucuacaauguggccacaugcggacucuucggccuggucuccuuucuucugcucugugggagaucuugcagcacgaccuauaaaggaguguacgaacugcagacacuggagcucgacauggcgaaccugaauaugaccaugccucuuuccuguacaaagaacaauucucaucacuauaucaugguuggcaacgaaaccgggcuggagcucacacugaccaauacgagcauuaucaaccauaaauucugcaaucuuuccgaugcucacaagaaaaaccuguacgaccaugcccucaugucuauuaucagcaccuuucaccuguccauuccgaauuucaaccaguaugaggccaugagcugugauuuuaauggaggcaagaucucugugcaguacaaccugucccacacauaugcugucgacgccgcuaaucauugcggcaccauugccaacggggugcuccaaacauucaugcggauggcguggggaggcagcuacaucgcccuggauucugggaagggauccugggacuguaucaugaccagcuaccaguaucuuguuauucagaacacgacaugggaagaucacugccaguuuucucgccccuccccuaucggcuaccuggggcuccugagccaaagaacccgggacauuuauaucucccgcagacuucugggaacauucaccuggacccucucugauagcgagggcaaugaaacacccggcggguacugucugacgcgguggaugcugauugaggcugagcucaaaugcuuuggaaacaccgccguggcuaaguguaaugaaaaacaugacgaggaguucugcgauaugcugcgccuuuuugacuucaacaagcaggccaucagacggcugaaaaccccugcgcagauguccauccagcucauuaauaaggccgucaacgcucugaucaaugaucaacuuauuaugaagaaccaucugcgcgacaucaugggcauucccuauugcaauuacagcaaauauuguuaccucaaccacacagugacagggaagaccucucugccuagaugcugucugguguccaauggaagcuaccucaacgaaacgcacuucucugacgauaucgaacagcaggccgacaauaugaucacagagcugcuucaaaaagaguauauugaucggcagggcaagaccccgcuggggcucgucgaccuguuuguuuucagcaccuccuuuuaccugaucucuauuuuccuucaccucgugaaaauccccacacaucgccacauuaccggaaagccuugccccaaaccucauagacugaaccacaugggcaucuguagcugcggccuguauaagcaccccggggugccggucaaguggaaacggugaggacuagucccuguucccagagcccacuuuuuuuucuuuuuuugaaauaaaauagccugucuuucagaucuaaaaaaaaaaaaaaaaaaaaaaaaaaaaaaaaaaaaaaaaaaaaaaaaaaaaaaaaaaaaaaaaaaaaaaaaaaaaaaaaaaaaaaaaaaaaaaaaaaaa

SEQ ID NO: 31952 - RNA, 1721 nt, Artificial Sequence
  mRNA product Design a-1 (A100) comprising derived and/or modified sequence from LASV(Lassa virus/H.sapiens-wt/NGA/2016/ISTH_0009;Clade II)__AVO03571__GPCmut7 (opt5)
aggagagucccgcagucggcguccagcggcucugcuuguucgugugugugucguugcaggccuuauucaagcuuaccaugggccagaucauuaccuucuuucaagaggugccccacgucaucgaagagguuaugaacauugugcugaucgcccucagccugcuugcuauucugaaggggaucuacaauguggccacaugcggacuccugggccuugucuccuuccugcuccugugugggagaucuugcagcacgaccuauaaaggaguguacgaacugcagacacucgagcuggacauggcgucccuuaacaugaccaugccucugucuuguacaaagaauaacagccaucacuauaucaugguuggcaaugaaaccgggcucgagcugacacuuaccaacacguccauuaucaaucauaaauuuugcaaccugucugaugcucacaagaaaaaucucuacgaccaugcccugaugagcauuaucuccaccuuccaccugagcauuccgaacuuuaaucaguaugaggccaugucuugugauuucaacggaggccggaucuccgugcaguacaaucucagccacucuuaugcugucgacgccgcuaaccauugcggcacaauugccaauggggugcugcaaaccuuuaugcgcauggcguggggaggcuccuacaucgcccuugauagcgggaagggaucuugggacuguaucaugacauccuaccaguaucugauuauccagaacaccacgugggaagaucacugccaguucagcagacccuccccuauuggcuaccucgggcugcuuucucaacggacacgcgacaucuauauuagcagacggcugcucggaaccuuuacauggacccuguccgauagcgagggcaacgaaacccccggcggguacugucugacacgcuggaugcucaucgaggcugagcugaagugcuucggaaauacggccguugcuaaauguaacgaaaagcaugacgaggaauuuugcgauaugcuuagacuguucgacuuuaauaaacaggccauccggcgccucaagaccccugcgcagaugucuauucagcugaucaacaaagccgugaaugcucuuauuaacgaucaacugaucaugaagaaucaccucagagacauuaugggcauccccuauugcaacuacuccaaguauuguuaccugaaucacacagucaccgggaaaacaagccugccucggugcugucucgugucuaacggaagcuaccugaaugagacccauuucuccgacgauaucgaacagcaggccgacaacaugauuacggagcuucugcaaaaggaguauaucgaucgccagggcaaaacaccgcucgggcugguggaccuguucgucuuuucuaccagcuucuaccuuauuuccaucuuucuccaccugguuaagauucccacccauagacacaucacaggaaaaccuugccccaagccucaucggcugaaucacaugggcauuuguagcugcggccucuauaaccaccccggggugccggugaaauggaagcgcugaggacuagucccuguucccagagcccacuuuuuuuucuuuuuuugaaauaaaauagccugucuuucagaucuaaaaaaaaaaaaaaaaaaaaaaaaaaaaaaaaaaaaaaaaaaaaaaaaaaaaaaaaaaaaaaaaaaaaaaaaaaaaaaaaaaaaaaaaaaaaaaaaaaaa

SEQ ID NO: 31953 - RNA, 1721 nt, Artificial Sequence
  mRNA product Design a-1 (A100) comprising derived and/or modified sequence from LASV(Lassa virus/H.sapiens-wt/NGA/2016/ISTH_0017;Clade II)__AVO03567__GPCmut7 (opt5)
aggagagucccgcagucggcguccagcggcucugcuuguucgugugugugucguugcaggccuuauucaagcuuaccaugggccagaucauuaccuucuuucaagaggugccccacgucaucgaagagguuaugaacauugugcugaucgcccucagccugcuugcuauucugaaggggaucuacaauguggccacaugcggacucuucggccuggucuccuuucuucugcucugugggagaucuugcagcacgaccuauaaaggaguguacgaacugcagacacuggagcucgacauggcgucccugaacaugaccaugccucuuucuuguacaaagaauaacagccaucacuauaucaugguuggcaaugaaaccgggcuggagcucacacugaccaacacguccauuaucaaucauaaauucugcaaccuuucugaugcucacaagaaaaaucuguacgaccaugcccucaugagcauuaucuccaccuuucaccugagcauuccgaacuucaaucaguaugaggccaugucuugugauuuuaacggaggcaagaucuccgugcaguacaaucugagccacacauaugcuauugacgccgcuaaccauugcggcaccaucgccaaugggguccuccaaacauucaugcggauggcguggggaggcucuuacaucgcccuggauuccgggaagggaagcugggacuguauuaugaccucuuaccaguaucuuaucauucagaacacgacaugggaagaucacugccaguuuucccgccccagcccuaucggcuaccuggggcuccugucccaaagaacccgggacauuuauaucucucgcagacuucugggaacauucaccuggacccucagcgauuccgagggcaacgaaacacccggcggguacugucugacgcgguggaugcugaucgaggcugagcucaaaugcuuuggaaauaccgccguggcuaaguguaacgaaaaacaugacgaggaguucugcgauaugcugcgccuuuuugacuucaauaagcaggccauuagacggcugaaaaccccugcgcagaugagcauccagcucauuaacaaggccguuaaugcucugaucaacgaucaacuuauuaugaagaaucaucugcgcgacaucaugggcauccccuauugcaacuacucuaaauauuguuaccucaaucacacagugacagggaagaccucccugccuagaugcugucuggucagcaacggaucuuaccucaaugaaacgcacuucagcgacgauauugaacagcaggccgacaacaugaucacagagcugcuucaaaaagaguauauggaucggcagggcaagaccccgcuggggcucguggaccuguuuguguucuccaccucuuuuuaccugauuagcaucuuccuucaccucguccgcauucccacacauagacacguuaucggaaaaccuugccccaagccucaucggcugaaucacaugggcauuuguuccugcggccuguauaaacaccccggggugccggugaaguggaagcgcugaggacuagucccuguucccagagcccacuuuuuuuucuuuuuuugaaauaaaauagccugucuuucagaucuaaaaaaaaaaaaaaaaaaaaaaaaaaaaaaaaaaaaaaaaaaaaaaaaaaaaaaaaaaaaaaaaaaaaaaaaaaaaaaaaaaaaaaaaaaaaaaaaaaaa

SEQ ID NO: 31954 - RNA, 1721 nt, Artificial Sequence
  mRNA product Design a-1 (A100) comprising derived and/or modified sequence from LASV(Lassa virus/H.sapiens-wt/NGA/2018/ISTH_0959;Clade II)__AVV65099__GPCmut7 (opt5)
aggagagucccgcagucggcguccagcggcucugcuuguucgugugugugucguugcaggccuuauucaagcuuaccaugggccagaucauuaccuucuuucaagaggugccccacgucaucgaagagguuaugaacauugugcugaucgcccucagccugcuugcuauucugaaggggaucuacaauguggucacaugcggacucuucggccugguguccuuucuucugcucugugggagaucuugcagcacgaccuauaaaggaguuuacgaacugcagacacuggagcucgacauggccucccugaacaugaccaugccucuuucuuguacaaagaauaacagccaucacuauaucauggugggcaaugaaaccgggcuggagcucacacugaccaacacguccauuaucaaucauaaauucugcaaccuuucugaugcgcacaagaaaaaucuguacgaccaugcucucaugagcauuaucuccaccuuucaccugagcauuccgaacuucaaucaguaugaggccaugucuugugauuuuaacggaggcaagaucuccguccaguacaaucugagccacgccuaugcuauugacgccgcuaaccauugcggcacaaucgccaauggggugcuccaaaccuucaugcggauggcguggggaggcucuuacaucgcccuggauuccgggaagggaagcugggacuguauuaugacaucuuaccaguaucuuaucauucagaacaccacgugggaagaucacugccaguuuucccgccccagcccuaucggcuaccuggggcuccugucccaaagaacacgggacauuuauaucucucgcagacuucugggaaccuucacauggacccucagcgauuccgagggcaacgaaacccccggcggguacugucugacacgguggaugcugaucgaggcugagcucaaaugcuuuggaaauacggccguugcuaaguguaacgaaaaacaugacgaggaguucugcgauaugcugcgccuuuuugacuucaauaagcaggccauuagacggcugaaaaccccugcgcagaugagcauccagcucauuaacaaggccgugaaugcucugaucaacgaucaacuuauuaugaagaaucaucugcgcgacaucaugggcauccccuauugcaacuacucuaaauauuguuaccucaaucacacagucaccgggaagacaucccugccuagaugcugucuggugagcaacggaucuuaccucaaugaaacccacuucagcgacgauauugaacagcaggccgacaacaugaucacggagcugcuucaaaaagaguauauugaucggcagggcaagacaccgcuggggcucguggaccuguuugucuucuccaccucuuuuuaccugaucagcauuuuccuucaccucguuaaaauccccacccaucgccacgugauuggaaagccuugccccaaaccucauagacugaaucacaugggcaucuguuccugcggccuguauaagcaccccggggugccggucaaguggaaacggugaggacuagucccuguucccagagcccacuuuuuuuucuuuuuuugaaauaaaauagccugucuuucagaucuaaaaaaaaaaaaaaaaaaaaaaaaaaaaaaaaaaaaaaaaaaaaaaaaaaaaaaaaaaaaaaaaaaaaaaaaaaaaaaaaaaaaaaaaaaaaaaaaaaaa

SEQ ID NO: 31955 - RNA, 1721 nt, Artificial Sequence
  mRNA product Design a-1 (A100) comprising derived and/or modified sequence from LASV(LASV003-NIG-2008;Clade II)__AIT17580__GPCmut7 (opt5)
aggagagucccgcagucggcguccagcggcucugcuuguucgugugugugucguugcaggccuuauucaagcuuaccaugggccagaucauuaccuucuuucaagaggugccccacgucaucgaagagguuaugaacauugugcugaucgcccucagccugcuugcuauucugaaggggaucuacaauguggccacaugcggacucuucggccuggucuccuuucuucugcucugugggagaucuugcagcacgaccuauaaaggaguguacgaacugcagacacuggagcucgacauggcgucccugaacaugaccaugccucuuucuuguacaaagaauaacagccaucacuauaucaugguuggcaaugaaaccgggcuggagcucacacugaccaacacguccauuaucaaucauaaauucugcaaccuuucugaugcucacaagaaaaaucuguacgaccaugcccucaugagcauuaucuccaccuuucaccugagcauuccgaacuucaaucaguaugaggccaugucuugugauuuuaacggaggcaagaucuccgugcaguacaaucugagccacacauaugcugucgacgccgcuaaccauugcggcaccauugccaauggggugcuccaaacauucaugcggauggcguggggaggcucuuacaucgcccuggauuccgggaagggaagcugggacuguaucaugaccucuuaccaguaucuuauuauccagaacacgacaugggaagaucacugccaguuuucccgccccagcccuauuggcuaccuggggcuccugucccaaagaacccgggacaucuauauuucucgcagacuucugggaacauucaccuggacccucagcgauuccgagagcaacgaaacacccggcggcuacugucugacgcgguggaugcugaucgaggcugagcucaaaugcuuugggaauaccgccguugcuaaguguaacgaaaaacaugacgaggaguucugcgauaugcugcgccuuuuugacuucaauaagcaggccaucagacggcugaaagcgccugcccagaugucuauucagcucaucaacaaggcugugaaugcccugauuaacgaucaacuuaucaugaagaaucaucugcgcgacauuaugggaauccccuauugcaacuacuccaaauauuguuaccucaaucacacagucaccggcagaacaagccugccucggugcugucuggugucuaacgggagcuaccucaaugaaacccacuucuccgacgauaucgaacagcaggcugacaacaugauuacggagcugcuucaaaaggaguauauggaucgccagggaaaaacaccgcugggccucguggaccuguuugucuucucuaccagcuuuuaccugaucuccauuuuccuucaccucguuaagauccccacccauagacacgugauugggaaaccuugccccaagccucaucggcugaaucacaugggaaucuguagcugcggccuguauaaacaccccggcgugccggucaaguggaagcgcugaggacuagucccuguucccagagcccacuuuuuuuucuuuuuuugaaauaaaauagccugucuuucagaucuaaaaaaaaaaaaaaaaaaaaaaaaaaaaaaaaaaaaaaaaaaaaaaaaaaaaaaaaaaaaaaaaaaaaaaaaaaaaaaaaaaaaaaaaaaaaaaaaaaaa

SEQ ID NO: 31956 - RNA, 1721 nt, Artificial Sequence
  mRNA product Design a-1 (A100) comprising derived and/or modified sequence from LASV(LASV035-NIG-2009;Clade II)__AIT17588__GPCmut7 (opt5)
aggagagucccgcagucggcguccagcggcucugcuuguucgugugugugucguugcaggccuuauucaagcuuaccaugggccagaucauuaccuucuuucaagaggugccccacgucaucgaagagguuaugaacauugugcugaucgcccucagccugcuugcuauucugaaggggaucuacaauguggccacaugcggacucuucggccuggucuccuuucuucugcucugugggagaucuugcagcacgaccuauaaaggaguguacgaacugcagacacuggagcucgacauggcgucccugaacaugaccaugccucuuucuuguacaaagaauaacagccaucacuauaucaugguuggcaaugaaaccgggcuggagcucacacugaccaacacguccauuaucaaucauaaauucugcaaccuuucugaugcucacaagaaaaaucuguacgaccaugcccucaugagcauuaucuccaccuuucaccugagcauuccgaacuucaaucaguaugaggccaugucuugugauuuuaacggaggcaagaucuccgugcaguacaaucugagccacgcuuaugccgucgacgcugccaaccauugcggcacaauugcgaauggggugcuccaaaccuucaugcggauggccuggggaggcucuuacaucgcucuggauuccgggaagggaagcugggacuguaucaugacaucuuaccaguaucuuauuauccagaacaccacgugggaagaucacugccaguuuucccgccccagcccuauuggcuaccuggggcuccugucccaaagaacacgggacaucuauauuucucgcagacuucugggaaccuucacauggacccucagcgauuccgagggcaacgaaacccccggcggguacugucugacacgguggaugcugaucgaggccgagcucaaaugcuuuggaaauacggcuguugccaaguguaacgaaaaacaugacgaggaguucugcgauaugcugcgccuuuuugacuucaauaagcaggcgaucagacggcugaaagccccugcucagaugagcauucagcucaucaacaaggccgugaaugcucugauuaacgaucaacuuaucaugaagaaucaucugcgcgacauuaugggcauccccuauugcaacuacucuaaauauuguuaccucaaucacaccgucacagggaagaccucccugccuagaugcugucuggugagcaacggaucuuaccucaaugaaacacacuucagcgacgauaucgaacagcaggccgacaacaugauuaccgagcugcuucaaaaagaguauaucgaucggcagggcaagacgccgcuggggcucguggaccuguuugucuucuccacaucuuuuuaccugauuagcaucuuccuucaccucguuaaaauucccacccaucgccacgugaucggaaagccuugccccaaaccucauagacugaaucacaugggcauuuguuccugcggccuguauaagcaccccggggugccggucaaguggaaacggugaggacuagucccuguucccagagcccacuuuuuuuucuuuuuuugaaauaaaauagccugucuuucagaucuaaaaaaaaaaaaaaaaaaaaaaaaaaaaaaaaaaaaaaaaaaaaaaaaaaaaaaaaaaaaaaaaaaaaaaaaaaaaaaaaaaaaaaaaaaaaaaaaaaaa

SEQ ID NO: 31957 - RNA, 1721 nt, Artificial Sequence
  mRNA product Design a-1 (A100) comprising derived and/or modified sequence from LASV(LASV1000-NIG-2009;Clade II)__AIT17782__GPCmut7 (opt5)
aggagagucccgcagucggcguccagcggcucugcuuguucgugugugugucguugcaggccuuauucaagcuuaccaugggccagaucauuaccuucuuucaagaggugccccacgucaucgaagagguuaugaacauugugcugaucgcccucagccugcuugcuauucugaaggggaucuacaauguggccacaugcggacucuucggccuggucuccuuucuucugcucugugggagaucuugcagcacgaccuauaaaggaguguacgaacugcagacacuggagcucgacauggcgucccugaacaugaccaugccucuuucuuguacaaagaauaacagccaucacuauaucaugguuggcaaugaaaccgggcuggagcucacacugaccaacacguccauuaucaaucauaaauucugcaaccuuucugaugcucacaagaaaaaucuguacgaccaugcccucaugagcauuaucuccaccuuucaccugagcauuccgaacuucaaucaguaugaggccaugucuugugauuuuaacggaggcaagaucuccgugcaguacaaucugagccacacauaugcugucgacgccgcuaaccauugcggcaccauugccaauggggugcuccaaacauucaugcggauggcguggggaggcucuuacaucgcccuggauuccgggaagggaagcugggacuguaucaugaccucuuaccaguaucuuauuauccagaacacgacaugggaagaucacugccaguuuucccgccccagcccuauuggcuaccuggggcuccugucccaaagaacccgggacaucuauauuucucgcagacuucugggaacauucaccuggacccucagcgauuccgagggcaacgaaacacccggcggguacugucugacgcgguggaugcugaucgaggcugagcucaaaugcuuuggaaauaccgccguugcuaaguguaacgaaaaacaugacgaggaguucugcgauaugcugcgccuuuuugacuucaauaagcaggccaucaaaagacugaagaccccugcgcagaugagcauucagcucaucaacaaggccgugaaugcucugauuaacgaucaacuuaucaugaaaaaucaucugcgggacauuaugggcauccccuauugcaacuacucuaaguauuguuaccucaaucacacagucacagggaaaaccucccugccucgcugcugucuggugagcaacggaucuuaccucaaugaaacgcacuucagcgacgauaucgaacagcaggccgacaacaugauuacagagcugcuucaaaaggaguauaucgauagacagggcaaaaccccgcuggggcucguggaccuguuugucuucuccaccucuuuuuaccugauuagcaucuuccuucaccucguuaagauucccacacaucggcacguggugggaaaaccuugccccaagccucaucgccugaaucacaugggcaucuguuccugcggccuguauaagcaccccggggucccggugaaauggaagagaugaggacuagucccuguucccagagcccacuuuuuuuucuuuuuuugaaauaaaauagccugucuuucagaucuaaaaaaaaaaaaaaaaaaaaaaaaaaaaaaaaaaaaaaaaaaaaaaaaaaaaaaaaaaaaaaaaaaaaaaaaaaaaaaaaaaaaaaaaaaaaaaaaaaaa

SEQ ID NO: 31958 - RNA, 1721 nt, Artificial Sequence
  mRNA product Design a-1 (A100) comprising derived and/or modified sequence from LASV(LASV221-NIG-2010;Clade II)__AIT17624__GPCmut7 (opt5)
aggagagucccgcagucggcguccagcggcucugcuuguucgugugugugucguugcaggccuuauucaagcuuaccaugggccagaucauuaccuucuuucaagaggugccccacgucaucgaagagguuaugaacauugugcugaucgcccucagccugcuugcuauucugaaggggaucuacaauguggccacaugcggacucuucggccuggucuccuuucuucugcucugugggagaucuugcagcacgaccuauaaaggaguguacgaacugcagacacuggagcucgacauggcgucccugaacaugaccaugccucuuucuuguacaaagaauaacagccaucacuauaucaugguuggcaaugaaaccgggcuggagcucacacugaccaacacguccauuaucaaucauaaauucugcaaccuuucugaugcucacaagaaaaaucuguacgaccaugcccucaugagcauuaucuccaccuuucaccugagcauuccgaacuucaaucaguaugaggccaugucuugugauuuuaacggaggcaagaucuccgugcaguacaaucugagccacacauaugcuauugacgccgcuaaccauugcggcaccaucgccaaugggguccuccaaacauucaugcggauggcguggggaggcucuuacaucgcccuggauuccgggaagggaagcugggacuguauuaugaccucuuaccaguaucuuaucauucagaacacgacaugggaagaucacugccaguuuucccgccccagcccuaucggcuaccuggggcuccugucccaaagaacccgggacauuuauaucucucgcagacuucugggaacauucaccuggacccucagcgauuccgagggcaacgaaacacccggcggguacugucugacgcgguggaugcugaucgaggcugagcucaaaugcuuuggaaauaccgccguggcuaaguguaacgaaaaacaugacgaggaguucugcgauaugcugcgccuuuuugacuucaauaagcaggccauuagacggcugaaaaccccugcgcagaugagcauccagcucauuaacaaggccguuaaugcucugaucaacgaucaacuuauuaugaagaaucaucugcgcgacaucaugggcauccccuauugcaacuacucuaaauauuguuaccucaaucacacagugacagggaagaccucccugccuagaugcugucuggucagcaacggaucuuaccucaaugaaacgcacuucagcgacgauauugaacagcaggccgacaacaugaucacagagaugcugcaaaaagaguauauggaucggcagggcaagaccccgcuugggcugguggaccucuuuguguucuccaccucuuuuuaccugauuagcaucuuccugcaccuugucaaaauucccacacaucgccacguuaucggaaagccuugccccaaaccucauagacucaaucacaugggcauuuguuccugcggccuguauaagcaccccggggugccggugaaguggaaacggugaggacuagucccuguucccagagcccacuuuuuuuucuuuuuuugaaauaaaauagccugucuuucagaucuaaaaaaaaaaaaaaaaaaaaaaaaaaaaaaaaaaaaaaaaaaaaaaaaaaaaaaaaaaaaaaaaaaaaaaaaaaaaaaaaaaaaaaaaaaaaaaaaaaaa

SEQ ID NO: 31959 - RNA, 1721 nt, Artificial Sequence
  mRNA product Design a-1 (A100) comprising derived and/or modified sequence from LASV(LASV237-NIG-2010;Clade II)__AIT17638__GPCmut7 (opt5)
aggagagucccgcagucggcguccagcggcucugcuuguucgugugugugucguugcaggccuuauucaagcuuaccaugggccagaucauuaccuucuuucaagaggugccccacgucaucgaagagguuaugaacauugugcugaucgcccucagccugcuugcuauucugaaggggaucuacaauguggccacaugcggacucuucggccuggucuccuuucuucugcucugugggagaucuugcagcacgaccuauaaaggaguguacgaacugcagacacuggagcucgacauggcgucccugaacaugaccaugccucuuucuuguacaaagaauaacagccaucacuauaucaugguuggcaaugaaaccgggcuggagcucacacugaccaacacguccauuaucaaucauaaauucugcaaccuuucugaugcucacaagaaagaccuguacgaucaugcccucaugagcauuaucuccaccuuucaccugagcauuccgaauuucaaccaguaugaggccaugucuugugacuuuaauggaggcaagaucuccgugcaguacaaccugagccacacauaugcugucgaugccgcuaaucauugcggcaccauugccaacggggugcuccaaacauucaugcggauggcguggggaggcucuuacaucgcccuggacuccgggaagggaagcugggauuguaucaugaccucuuaccaguaucuuauuauccagaauacgacaugggaagaccacugccaguuuucccgccccagcccuauuggcuaccuggggcuccugucccaaagaacccgggauaucuauauuucucgcagacuucugggaacauucaccuggacccucagcgacuccgagggcaacgaaacacccggcggguacugucugacgcgguggaugcugaucgaggcugagcucaaaugcuuuggaaacaccgccguugcuaaguguaaugaaaaacaugaugaggaguucugcgacaugcugcgccuuuuugauuucaacaagcaggccaucagacggcugaaaaccccugcgcagaugagcauucagcucaucaauaaggccgugaacgcucugauuaaugaccaacuuaucaugaagaaccaucugcgcgacauuaugggcauccccuauugcaauuacucuaaauauuguuaccucaaccacacagucacagggaagaccucccugccuagaugcugucuggugagcaauggaucuuaccucaacgaaacgcacuucagcgaugacaucgaacagcaggccgauaauaugauuacagagcugcuucaaaaagaguauauggaccggcagggcaagaccccgcuggggcucguggaucuguuugucuucuccaccucuuuuuaccugaucagcauuuuccuucaccucaucaaaauucccacacaucgccacaucaccggaaagccuugccccaaaccucauagacugaaccacaugggcauuuguuccugcggccuguauaagcaccccgggguuccggugaaguggaaacggugaggacuagucccuguucccagagcccacuuuuuuuucuuuuuuugaaauaaaauagccugucuuucagaucuaaaaaaaaaaaaaaaaaaaaaaaaaaaaaaaaaaaaaaaaaaaaaaaaaaaaaaaaaaaaaaaaaaaaaaaaaaaaaaaaaaaaaaaaaaaaaaaaaaaa

SEQ ID NO: 31960 - RNA, 1721 nt, Artificial Sequence
  mRNA product Design a-1 (A100) comprising derived and/or modified sequence from LASV(LASV253-NIG-2011;Clade II)__AIT17670__GPCmut7 (opt5)
aggagagucccgcagucggcguccagcggcucugcuuguucgugugugugucguugcaggccuuauucaagcuuaccaugggccagaucauuaccuucuuucaagaggugccccacgucaucgaagagguuaugaacauugugcugaucgcccucagccugcuugcuauucugaaggggaucuacaauguggccacaugcggacucuucggccuggucuccuuucuucugcucugugggagaucuugcagcacgaccuauaaaggaguguacgaacugcagacacuggagcucgacauggcgucccugaacaugaccaugccucuuucuuguacaaagaauaacagccaucacuauaucaugguuggcaaugaaaccgggcuggagcucacacugaccaacacguccauuaucaaucauaaauucugcaaccuuucugaugcucacaagaaaaaucuguacgaccaugcccucaugagcauuaucuccaccuuucaccugagcauuccgaacuucaaucaguaugaggccaugucuugugauuuuaacggaggcaagaucuccgugcaguacaaucugagccacacauaugcugucgacgccgcuaaccauugcggcaccauugccaauggggugcuccaaacauucaugcggauggcguggggaggcucuuacaucgcccuggauuccgggaagggaagcugggacuguaucaugaccucuuaccaguaucuuauuauccagaacacgacaugggaagaucacugccaguuuucccgccccagcccuauuggcuaccuggggcuccugucccaaagaacccgggacaucuauauuucucgcagacuucugggaacauucaccuggacccucagcgauuccgagggcaacgaaacacccggcggguacugucugacgcgguggaugcugaucgaggcugagcucaaaugcuuuggaaauaccgccguugcuaaguguaacgaaaaacaugacgaggaguucugcgauaugcugcgccuuuuugacuucaauaagcaggccaucagacggcugaaagcgccugcccagaugagcauucagcucaucaacaaggcugugaaugcccugauuaacgaucaacuuaucaugaagaaucaucugcgcgacauuaugggcauccccuauugcaacuacucuaaauauuguuaccucaaucacacagucaccgggagaacaucccugccucggugcugucuggugagcaacggaucuuaccucaaugaaacccacuucagcgacgauaucgaacagcaggcugacaacaugauuacggagcugcuucaaaaggaguauaucgaucgccagggcaaaacaccgcuggggcucguggaccuguuugucuucuccaccucuuuuuaccugauuagcaucuuccuucaccucguuaagauucccacccauagacacaucauuggaaaaccuugccccaagccucaucggcugaaucacaugggcaucuguuccugcggccuguauaaacaccccggggugccggugaaguggaagcgcugaggacuagucccuguucccagagcccacuuuuuuuucuuuuuuugaaauaaaauagccugucuuucagaucuaaaaaaaaaaaaaaaaaaaaaaaaaaaaaaaaaaaaaaaaaaaaaaaaaaaaaaaaaaaaaaaaaaaaaaaaaaaaaaaaaaaaaaaaaaaaaaaaaaaa

SEQ ID NO: 31961 - RNA, 1721 nt, Artificial Sequence
  mRNA product Design a-1 (A100) comprising derived and/or modified sequence from LASV(LASV254-NIG-2011;Clade II)__AIT17674__GPCmut7 (opt5)
aggagagucccgcagucggcguccagcggcucugcuuguucgugugugugucguugcaggccuuauucaagcuuaccaugggccagaucauuaccuucuuucaagaggugccccacgucaucgaagagguuaugaacauugugcugaucgcccucagccugcuugcuauucugaaggggaucuacaauguggccacaugcggacucuucggccuggucuccuuucuucugcucugugggagaucuugcagcacgaccuauaaaggaguguacgaacugcagacacuggagcucgacaugaccaaccugaauaugacaaugccucuuuccuguaccaagaacaauucucaucacuauaucaugguuggcaacgaaacagggcuggagcucacccugacgaauaccagcauuaucaaccauaaauucugcaaucuuuccgaugcgcacaagaaaaaccuguacaaucaugcucucaugucuauuaucagcacauuucaccuguccauuccgaacuucaaucaguaugaggccaugagcugugacuuuaacggaggcaagaucucugugcaguacaaucugucccacagcuaugccgucgaugcugccaaccauugcggcaccauugcuaacggggugcuccaaacauucaugcggauggccuggggaggcucuuacaucgcgcuggacuccgggaagggaaauugggauuguaucaugaccagcuaccaguaucuuauuauccagaacacgacaugggaagaccacugccaguuuucucgccccuccccuauuggcuaccuggggcuccugagccaaagaacccgggauaucuauauuucccgcagacuucugggaacauucaccuggacccucucugacagcgagggcaaugaaacacccggcggguacugucugacgcgguggaugcugaucgaggccgagcucaaaugcuuuggaaacaccgcuguugccaaguguaaugaaaaacaugaugaggaguucugcgacaugcugcgccuuuuugauuucaacaagcaggcuaucagacggcugaaaaccccugcccaggcgaauauucagcucaucaacaaggccgugaaugcucugauuaacgaccaacuuaucaugaagaaucaucugcgcgauauuaugggcauccccuauugcaacuacuccaaauauuguuaccucaaucacacagucacagggaagaccagccugccuagaugcugucuggugucuaacggauccuaccucaaugaaacgcacuucagcgacgacaucgaacagcaggccgauaacaugauuacagagcugcuucaaaaagaguauauggaccggcagggcaagaccccgcuggggcucguggaucuguuugucuucucuaccagcuuuuaccugaucuccauuuuccuucaccucguuaaaauccccacacaucgccacgugauuggaaagccuugccccaaaccucauagacugaaccacaugggcaucuguucuugcggccuguauaagcaccccggggugccggucaaguggaaacggugaggacuagucccuguucccagagcccacuuuuuuuucuuuuuuugaaauaaaauagccugucuuucagaucuaaaaaaaaaaaaaaaaaaaaaaaaaaaaaaaaaaaaaaaaaaaaaaaaaaaaaaaaaaaaaaaaaaaaaaaaaaaaaaaaaaaaaaaaaaaaaaaaaaaa

SEQ ID NO: 31962 - RNA, 1721 nt, Artificial Sequence
  mRNA product Design a-1 (A100) comprising derived and/or modified sequence from LASV(Nig08-A19;Clade III)__ADU56618__GPCmut7 (opt5)
aggagagucccgcagucggcguccagcggcucugcuuguucgugugugugucguugcaggccuuauucaagcuuaccaugggccagaucgugaccuucuuucaagaggucccccacguuauugaagaggugaugaacaucgugcugauugcccucagcauccuggcuauucuuaaggggcuguacaauaucgccacaugcggacucaucggccuggucacguuccuucugcucuccgggagaucuuguagcaugaccuauaaaggaguguacgaacugcagacacuggagcucaacaugaauacccugaacaugacaaugccucuuuccugcaccaagaauaacucucaucacuauauuaugguuggcaaugaaacagggcuggagcucacccugacgaacaccagccuucugcaucacaaauuuuguaaucucuccgacgcgcauaagaaaaaccuguacgaucacacacugaugucuaucauuagcaccuuccaccucuccaucccgaauuuuaaccaguaugaggcuaugagcugcgacuucaauggaggcaagauuacagugcaguacaaccugucucauuccuaugccaucgaugccgcuaaucacuguggcaccgucgccaacggggugcuucaaacguuuaugcggauggcuuggggaggcagcuacauugcccuggacucugggcgcggaaagugggauugcaucaugacauccuaccaguaucucaucauucagaacaccacaugggaagaccauugucaguucagcagacccucuccuaucggcuaccuggggcuucugucccaacggacccgcgauauuuauaucagcagacggcuccugggaaccuuuacauggacgcuguccgacucugagggcaaugaaacccccggcggguacugccucacacgcuggaugcugauugaggcggagcuuaaauguuucggaaacaccgccguugcuaagugcaaugaaaaacacgaugaggaauuuugugacaugcugagacucuucgauuuuaacaagcaggccauccggcgccugaaagcuccugcccagaugagcauccagcuuauuaauaaggcggugaacgcccugaucaaugaccaacucauuaugaagaaccaccugagagauaucaugggcauucccuauugcaauuacuccaaauauugcuaccugaaccauacaagcaccgggcggacgucucucccucgcuguugccuggucuccaauggaagcuaccuuaacgagacacacuucucugacgacaucgaacagcaggcugauaauaugaucaccgagaugcugcaaaaggaguaucucgacagacagggcaaaaccccgcuggggcugguggaucuuuucguguuuagcacauccuucuaccucauuucuaucuuucugcaucuggucaagauucccacccaccggcauaucguuggaaaaccuugucccaagccucaccgccucaaccacaugggcauuugcagcuguggccuguauaaacagcccggggugccggugagauggaagcggugaggacuagucccuguucccagagcccacuuuuuuuucuuuuuuugaaauaaaauagccugucuuucagaucuaaaaaaaaaaaaaaaaaaaaaaaaaaaaaaaaaaaaaaaaaaaaaaaaaaaaaaaaaaaaaaaaaaaaaaaaaaaaaaaaaaaaaaaaaaaaaaaaaaaa

SEQ ID NO: 31963 - RNA, 1724 nt, Artificial Sequence
  mRNA product Design a-1 (A100) comprising derived and/or modified sequence from LASV(G1180-SLE-2010;Clade IV)__AIT17168__GPCmut7 (opt5)
aggagagucccgcagucggcguccagcggcucugcuuguucgugugugugucguugcaggccuuauucaagcuuaccaugggccagaucgugaccuucuuucaagaggucccccacguuauugaagaggugaugaacaucgugcugauugcccucagcauccuggcuguccuuaaggggcuguacaauuucgccacaugcggacucgugggccugcuuacguuucugcuccugugugggagauccugcaccgcgucucgguauaaaggaguuuacgaacugcagacacucgagcugaacauggaaacccuuaauaugacaaugccucugagcuguaccaagaacaauucccaucacuauauuauggugggcaacgagacagggcucgagcugacccuuacgaauaccucuaucaucaaccauaaauucugcaaucugagcgacgcucacaagaaaaaccucuacgaucaugcccugauguccauuaucucuacauuucaccugagcauuccgaauuucaaccaguaugaagccauguccugugacuuuaauggaggcaagaucagcguccaguacaaccucucucacuccuaugcuggcgaugccgcuaaucauugcgggaccguggccaacggaguucugcaaacauucaugcgcauggcguggggcgggagcuacauugcccuugacucuggacacggcuccugggauuguaucaugaccagcuaccaguaucugauuauccagaacacgacaugggaggaccauugccaguuuucuagacccuccccuaucggguaccucggacugcuuagccaacggacccgcgauauuuauaucuccagacggcugcucggcacauucaccuggacccugucugacagcgaaggcaaggauacacccgggggauacugucugacgcgcuggaugcucauugaggcugagcugaaaugcuuuggcaauaccgccguggcuaaguguaacgaaaaacacgacgaggaguucugcgauaugcuuagacuguuugacuucaauaagcaggccauccagcggcucaaagcgccugcccagauguccauucaacugaucaacaaggcugucaaugcccuuaucaacgaucagcugauuaugaagaaucaccuccgcgacaucauggggauucccuauugcaacuacagcaaauauuguuaccugaaucauacaaccacaggaaagaccucucugccuaaaugcugucucguguccaacggcagcuaccugaaugaaacgcacuucucugacgauaucgaacagcaagcugacaacaugauuacagagaugcuucagaaggaguauauggaaagacaggggaaaaccccgcugggacucguggaucuguuugucuucagcaccuccuuuuaccugaucucuaucuuccuucaucucguuaagauucccacacaccggcauaucgugggcaaaagcugcccuaagccccaccgccugaaucacaugggcauuuguuccugcgggcuguauaagcagccuggagugcccgucaaauggaagagaugaggacuagucccuguucccagagcccacuuuuuuuucuuuuuuugaaauaaaauagccugucuuucagaucuaaaaaaaaaaaaaaaaaaaaaaaaaaaaaaaaaaaaaaaaaaaaaaaaaaaaaaaaaaaaaaaaaaaaaaaaaaaaaaaaaaaaaaaaaaaaaaaaaaaa

SEQ ID NO: 31964 - RNA, 1724 nt, Artificial Sequence
  mRNA product Design a-1 (A100) comprising derived and/or modified sequence from LASV(G1442-SLE-2011;Clade IV)__AIT17180__GPCmut7 (opt5)
aggagagucccgcagucggcguccagcggcucugcuuguucgugugugugucguugcaggccuuauucaagcuuaccaugggccagaucgugaccuucuuucaagaggucccccacguuauugaagaggugaugaacaucgugcugauugcccucagcauccuggcuguccuuaaggggcuguacaauguggccacaugcggacucauuggccugguuacguuccuucugcucugugggagauccugcaccacaacccuguauaaaggaguguacgaacugcagacacucgagcugaacauggaaacccuuaauaugacaaugccucugucuuguaccaagaacaauagccaucacuauauccgggucggcaacgagacggggcucgagcugacccuuacaaauaccuccaucauuaaccauaaauuuugcaaucugucugacgcgcacaagaaaaaccucuacgaucaugcucugaugagcaucauuuccacauuccaccugucuaucccgaauuuuaaccaguaugaagccaugagcugugacuucaauggaggcaagauuuccgugcaguacaaccucagccacucuuaugccggcgaugcugccaaucauugcgggaccguugcuaacggagugcugcaaacguuuaugcgcauggccuggggcggguccuacaucgcgcuugacagcggaagaggcaacugggauuguauuaugacaucuuaccaguaucugaucauccagaauaccacaugggacgaucacugccaguucucccggcccagcccuauuggguaccucggacugcuuucucaacgcaccagagacgucuauaucucccggcgccugcucggcaccuuuacauggacgcugagcgauuccgagggcaaggacacccccgggggauacugucugacaagauggaugcucauugaagccgagcugaaaugcuucggcaacaccgcuguggccaaguguaaugagaaacaugaugaagaguuuugcgacaugcuucggcuguucgauuuuaacaagcaggcuauccagcgccucaaagccccugcgcagaugucuauucaacugaucaauaaggccgugaacgcucuuaucaaugaccagcugauuaugaagaaccaccucagagacaucauggggauucccuauugcaauuacagcaaauauuguuaccugaacaauacagccaccggaaagacgucccugccuaaaugcugucucaucagcaacggcucuuaccugaaugaaacacacuucuccgaugacauugagcaggaagcugauaacaugaucaccgagaugcuucaaaaggaguauauggaacggcaggggaaaaccccgcugggacucgucgaccuguucguuuuuagcacaucuuucuaccugaucagcauuuuucuucaucucgugaagauccccacccaccgccauauugugggcaaauccugcccuaagccccacagacugaaucauaugggcaucuguucuugcgggcuguauaagcagccuggaguccccgugcgguggaaacgcugaggacuagucccuguucccagagcccacuuuuuuuucuuuuuuugaaauaaaauagccugucuuucagaucuaaaaaaaaaaaaaaaaaaaaaaaaaaaaaaaaaaaaaaaaaaaaaaaaaaaaaaaaaaaaaaaaaaaaaaaaaaaaaaaaaaaaaaaaaaaaaaaaaaaa

SEQ ID NO: 31965 - RNA, 1724 nt, Artificial Sequence
  mRNA product Design a-1 (A100) comprising derived and/or modified sequence from LASV(G3010-SLE-2013;Clade IV)__AIT17344__GPCmut7 (opt5)
aggagagucccgcagucggcguccagcggcucugcuuguucgugugugugucguugcaggccuuauucaagcuuaccaugggccagaucgugaccuucuuucaagaggucccccacguuauugaagaggugaugaacaucgugcugauugcccucagcauccuggcuguccuuaaggggcuguacaauuucgccacaugcggacucgugggccugguuacguuucuucugcucugugggagauccugcaccacaucucuguauaaaggaguguacgaacugcagacccucgagcugaacauggaaacacuuaauaugaccaugccucugagcuguacaaagaacaauucccaucacuauauuauggucggcaacgagaccgggcucgagcugacgcuuaccaauacaucuaucaucaaccauaaauucugcaaucugagcgacgcgcacaagaaaaaccucuacaaucaugcucugauguccauuaucucuaccuuucaccugagcauuccgaacuucaaucaguaugaagccauguccugugauuuuaacggaggcaagaucagcgugcaguacaaucucucucacuccuaugccggcgacgcugccagccauugcgggacaguugcuaacggagugcugcaaaccuucaugcggauggccuggggcgggucuuacauugcgcuugauuccggauacggcaagugggacuguaucaugacgagcuaucaguaccugauuauccagaacacaaccugggaggaucacugccaguuuucucgccccuccccuaucggguaucucggacugcuuagccaaagaacacgggacauuuacaucucccgcagacugcucggcaccuucaccuggacacugucugauagcgaaggcaaagacacgcccgggggauauugucugacccgguggaugcucauugaggccgagcugaagugcuuuggcaauacagcugucgccaaauguaacgaaaagcaugaugaggaguucugcgacaugcuucgccuguuugauuucaauaaacaggcuauccagagacucaagaccccugcccagauguccauucaacugaucaacaaggcggugaaugcccuuaucaacgaccagcugauuaugaaaaaucaccuccgggauaucauggggauucccuacugcaacuauagcaaguacuguuaccugaaucacacaaccacgggaaaaacaucucugccuaagugcugucucguguccaacggcagcuaucugaaugaaacccauuucucugacgacaucgaacagcaagcugauaacaugauuaccgagaugcuucagaaagaguacauggaacgccaggggaagacaccgcugggacucgucgaccuguuuguuuucagcaccuccuuuuaucugaucucuaucuuccuucaccucgugaaaauucccacacauagacacaucgugggcaagagcugcccuaagccccaucggcugaaucacaugggcauuuguuccugcgggcuguacaaacagccuggaguccccgugcgcuggaagagaugaggacuagucccuguucccagagcccacuuuuuuuucuuuuuuugaaauaaaauagccugucuuucagaucuaaaaaaaaaaaaaaaaaaaaaaaaaaaaaaaaaaaaaaaaaaaaaaaaaaaaaaaaaaaaaaaaaaaaaaaaaaaaaaaaaaaaaaaaaaaaaaaaaaaa

SEQ ID NO: 31966 - RNA, 1724 nt, Artificial Sequence
  mRNA product Design a-1 (A100) comprising derived and/or modified sequence from LASV(G502-SLE-2009;Clade IV)__AIT17126__GPCmut7 (opt5)
aggagagucccgcagucggcguccagcggcucugcuuguucgugugugugucguugcaggccuuauucaagcuuaccaugggccagaucgugaccuucuuucaagaggucccccacguuauugaagaggugaugaacaucgugcugauugcccucagcauccuggcuguccuuaaggggcuguacaauuucgccacaugcggacucgugggccugcuuacguuucugcuccugugugggagauccugcaccacaggacuguauaaaggcguuuacgaacuccagacccuggagcuuaacauggaaacacugaauaugaccaugccucucucuuguacaaagaacaauagccaucacuauauuaugguggggaacgagaccggacuggagcuuacgcugaccaauacauccaucaucaaccauaaauucugcaaucucucugacgcgcacaagaaaaaccuguacgaucaugcucugaugagcauuaucuccaccuuucaccucucuauuccgaauuucaaccaguaugaagccaugagcugugacuuuaauggcggcaagaucuccguccaguacaaccugagccacucuuaugccggggaugcugccgaccauugcggaacaguggcuaauggcguucuucaaaccuucaugcggauggccuggggaggguccuacauugcgcuggauagcggccgcgggagaugggacuguaucaugacgucuuaccaguaucucauuauccagaacacaaccugggaggaucacugccaguuuucccggcccagcccuaucggauaccugggccuucugucucaacgcacaagagacauuuauaucucccggcgccuccugggcaccuucaccuggacacugagcgauuccgaagggaaggacacgcccggaggcuacugucucaccagauggaugcugauugaggccgagcuuaaaugcuuugggaacacagcuguggccaaguguaaugaaaaacaugaugaggaguucugcgacaugcugcggcucuuugauuucaacaagcaggcuauccagcgccugaaagccccugcgcagaugucuauucaacuuaucaauaaggccgucaacgcucugaucaaugaccagcucgugaugaagaaccaccugagagacauuaugggaauccccuauugcaauuacagccgguauuguuaccugaaccacaccacaaccggccgcacgucccucccuaaaugcugucuggugagcaaugggucuuaccuuaacgaaacacauuucuccgaugacauugaacagcaagccgauaauaugaucaccgagaugcugcagaaggaguauauggaaagacagggaaaaaccccgcucggccuggucgaccuguuuguuuucagcacaucuuuuuaccuuauuagcaucuuccuccaccuggugaagauccccacccaucggcacauugugggcaaauccugcccuaagccccaucgccugaaccacauggggaucuguucuugcggacucuauaaacagccuggcguccccgugaaguggaagagaugaggacuagucccuguucccagagcccacuuuuuuuucuuuuuuugaaauaaaauagccugucuuucagaucuaaaaaaaaaaaaaaaaaaaaaaaaaaaaaaaaaaaaaaaaaaaaaaaaaaaaaaaaaaaaaaaaaaaaaaaaaaaaaaaaaaaaaaaaaaaaaaaaaaaa

SEQ ID NO: 31967 - RNA, 1724 nt, Artificial Sequence
  mRNA product Design a-1 (A100) comprising derived and/or modified sequence from LASV(G733-SLE-2010;Clade IV)__AIT17154__GPCmut7 (opt5)
aggagagucccgcagucggcguccagcggcucugcuuguucgugugugugucguugcaggccuuauucaagcuuaccaugggccagaucgugaccuucuuucaagaggucccccacguuauugaagaggugaugaacaucgugcugauugcccucagcauccuggcuguccuuaaggggcuguacaauuucgccacaugcggaauugugggccucguuuccuuucugcuucugugugggagaucuugcacgaccagccucuauaaaggaguguacgaacugcagacacuggagcucaacauggaaacccugaauaugacaaugccucuuuccuguaccaagaacaauucucaucacuauaucauggucggcaacgagacagggcuggagcucacccugacgaauaccagcaucauuaaccauaaauucugcaaucuuuccgacgcgcacaagaaaaaccuguacgaucaugcucucaugucuaucauuagcacauuucaccuguccaucccgaauuucaaccaguaugaagccaugagcugugacuuuaauggaggcaagauuucugugcaguacaaccugucccacagcuaugccggcgaugcugccaaucauugcgggaccaucgcuaacggaguucuccaaacauucaugcggauggccuggggcgggucuuacauugcgcuggacuccggacgcgauagaugggacuguaucaugaccagcuaccaguaucuuaucauucagaacacgacaugggaggaucacugccaguuuucucggcccuccccuaucggcuaccuggggcuccugagccaacgcaccagagacauuuauaucucccggcgccuucugggaacauucaccuggacccucucugauagcgaaggcaaggacacacccggcggguacugucugacgagauggaugcugauugaggccgagcucaaaugcuuuggaaauaccgcuguggccaaguguaacgaaaaacaugaugaggaguucugcgacaugcugcggcuuuuugauuucaauaagcaggcuauccagcgccugaaagccccugcgcagauguccauccaacucauuaacaaggccgucaaugcucugaucaacgaccagcuuauuaugaagaaucaccugagagacaucaugggcauucccuauugcaacuacagcaaauauuguuaccucaaucacacaaccacagggaagaccucucugccuaaaugcugucugguguccaacggaagcuaccucaaugaaacgcauuucucugaugacaucgaacagcaagccgauaacaugaucacagagaugcugcagaaggaguauauggaacggcagggcaaaaccccgcuugggcugguggaccucuuugucuucagcaccuccuuuuaccugauuucuaucuuccugcaccuuguuaagauucccacacaucgccacguggugggaaaaagcugcccuaagccccauagacucaaucacaugggcaucuguuccugcggccuguaugggcagccuggaguccccgugaaguggaaacggugaggacuagucccuguucccagagcccacuuuuuuuucuuuuuuugaaauaaaauagccugucuuucagaucuaaaaaaaaaaaaaaaaaaaaaaaaaaaaaaaaaaaaaaaaaaaaaaaaaaaaaaaaaaaaaaaaaaaaaaaaaaaaaaaaaaaaaaaaaaaaaaaaaaaa

SEQ ID NO: 31968 - RNA, 1724 nt, Artificial Sequence
  mRNA product Design a-1 (A100) comprising derived and/or modified sequence from MOPV/LASV reassortant(IGS-1;Clade IV)__AFY05576__GPCmut7 (opt5)
aggagagucccgcagucggcguccagcggcucugcuuguucgugugugugucguugcaggccuuauucaagcuuaccaugggccagaucgugaccuucuuucaagaggucccccacguuauugaagaggugaugaacaucgugcugauugcccucagcguccuggcugugcuuaaggggcuguacaauuucgccacaugcggacucguuggccuggugacguuucuucugcucugugggagauccugcaccacaucucuguauaaaggagucuacgaacugcagacccucgagcugaacauggaaacacuuaauaugaccaugccucugagcuguacaaagaacaauucccaucacuauaucauggugggcaacgagaccgggcucgagcugacgcuuaccaauacaucuauuaucaaccauaaauucugcaaucugagcgacgcgcacaagaaaaaccucuacgaucaugcucugauguccaucauuucuaccuuucaccugagcaucccgaauuucaaccaguaugaagccauguccugugacuuuaauggaggcaagauuagcguucaguacaaccucucucacuccuaugccggcgaugcugccaaucauugcgggacaguggcuaacggaguccugcaaaccuucaugcggauggccuggggcgggagcuacaucgcgcuugacucuggacgcggcaacugggauuguauuaugacguccuaccaguaucugaucauucagaauacaaccugggaggaccacugccaguuuagcagacccucuccuaucggguaccucggacugcuuucccaacggacacgcgauaucuauauuagcagacggcugcucggcaccuucaccuggacacuguccgacucugaaggcgaggauacgcccgggggauacugucugacccgcuggaugcucaucgaggccgaacugaagugcuuuggcaacacagcuguggccaaauguaaugagaagcaugacgaagaguucugcgauaugcuuagacuguuugacuucaacaaacaggcuauucagcggcucaaggccccugcgcagaugagcauccaacugauuaauaaagccgugaacgcucuuaucaaugaucagcugaucaugaagaaccaccuccgcgacauuauggggauccccuauugcaauuacuccaaguauuguuaccugaaccacaccacaaccggaagaacgagccugccuaaaugcugucucgucucuaauggcuccuaccugaacgaaacacauuucagcgacgauauugagcagcaagccgacaauaugaucaccgagaugcuucagaaggaauauauggagcggcaggggaaaaccccgcugggacucguugaucuguuuguguucucuaccagcuuuuaccugauuuccaucuuccuucaccucgugaagauccccacacaucgccacauugucggcaaaucuugcccuaagccccauagacugaaccacaugggcaucuguagcugcgggcuguauaaacagccuggagugcccguuaaguggaagcggugaggacuagucccuguucccagagcccacuuuuuuuucuuuuuuugaaauaaaauagccugucuuucagaucuaaaaaaaaaaaaaaaaaaaaaaaaaaaaaaaaaaaaaaaaaaaaaaaaaaaaaaaaaaaaaaaaaaaaaaaaaaaaaaaaaaaaaaaaaaaaaaaaaaaa

SEQ ID NO: 31969 - RNA, 1724 nt, Artificial Sequence
  mRNA product Design a-1 (A100) comprising derived and/or modified sequence from LASV(LM765-SLE-2012;Clade IV)__AIT17814__GPCmut7 (opt5)
aggagagucccgcagucggcguccagcggcucugcuuguucgugugugugucguugcaggccuuauucaagcuuaccaugggccagaucgugaccuucuuucaagaggucccccacguuauugaagaggugaugaacaucgugcugauugcccucagcauccuggcuguccuuaaggggcuguacaauuucgccacaugcggacucgugggccugguuacguuucuucugcucugugggagauccugcaccacaucucuguauaaaggaguguacgaacugcagacccucgagcugaacauggaaacacuuaauaugaccaugccucugagcuguacaaagaacaauucccaucacuauauuauggucggcaacgagaccgggcucgagcugacgcuuaccaauacaucuaucaucgaccauaaauucugcaaccugagcgaugcgcaccggaagaaucucuacgaccaugcucugauguccauuaucucuaccuuucaccugagcauuccgaacuucaaucaguaugaagccauguccugugauuuuaacggaggcaaaaucagcgugcaguacaaucucucucacuccuaugccaaggacgcugccgaucauugcggcacaguugcuaacggggugcugcaaaccuucaugcgcauggccuggggaggcagcuacauugcgcuugacucugggagaggacggugggauuguaucaugacguccuaccaguaucugauuauccagaauacaaccugggaggaccacugccaguuuagccgccccucuccuaucggcuaccucgggcugcuuucccaaagaacacgggauauuuauaucagccgcagacugcucggaaccuucaccuggacacuguccgacucugaaggcaaggauacgcccggcggguacugucugacccgguggaugcucauugaggccgagcugaaaugcuuuggaaacacagcugucgccaaguguaacgaaaaacaugacgaggaguucugcgauaugcuucgccuguuugacuucaauaagcaggcuauccagagacucaaagccccugcgcagaugagcauucaacugaucaacaaggccgugaaugcucuuaucaacgaccagcugauuaugaagaaucaccuccgggauaucaugggcauucccuauugcaacuacuccaaauauuguuaccugaaucacaccacaaccgggaagacgagccugccuaaaugcugucucgugucuaacggauccuaccugaaugaaacacauuucagcgacgauaucgaacagcaagccgacaacaugauuaccgagaugcuucagaaggaguauauggaacgccagggcaaaaccccgcuggggcucgucgaucuguuuguuuucucuaccagcuuuuaccugaucuccaucuuccuucaccucgugaagauucccacacauagacacaucgugggaaaaccuugccccaagccucaucggcugaaucacaugggcauuuguucuugcggccuguauaagcagcccggggucccggugaaauggaagcgcugaggacuagucccuguucccagagcccacuuuuuuuucuuuuuuugaaauaaaauagccugucuuucagaucuaaaaaaaaaaaaaaaaaaaaaaaaaaaaaaaaaaaaaaaaaaaaaaaaaaaaaaaaaaaaaaaaaaaaaaaaaaaaaaaaaaaaaaaaaaaaaaaaaaaa

SEQ ID NO: 31970 - RNA, 1724 nt, Artificial Sequence
  mRNA product Design a-1 (A100) comprising derived and/or modified sequence from LASV(LM776-SLE-2012;Clade IV)__AIT17824__GPCmut7 (opt5)
aggagagucccgcagucggcguccagcggcucugcuuguucgugugugugucguugcaggccuuauucaagcuuaccaugggccagaucgugaccuucuuucaagaggucccccacguuauugaagaggugaugaacaucgugcugauugcccucagcauccuggcuguccuuaaggggcuguacaauuucgccacaugcggacucgugggccugguuacguuucuucugcucugugggagauccugcaccacaucuguguauaaaggagucuacgaacugcagacccuggagcucaacauggaaacacugaauaugaccaugccucuuagcuguacaaagaacaauucccaucacuauauuauggugggcaacgagaccgggcuggagcucacgcugaccaauacaucuaucaucaaccauaaauucugcaaucuuagcgacgcgcacaagaaaaaccuguacgaucaugcucucauguccauuaucucuaccuuucaccugagcauuccgaauuucaaccaguaugaagccauguccugugacuuuaauggaggcaagaucagcguucaguacaaccugucucacuccuaugccggcgaugcugccaaucauugcgggacaguggcuaacggaguccuccaaaccuucaugcggauggccuggggcgggagcuacauugcgcuggacucuggacacggcaagugggauuguaucaugacguccuaccaguaucuuauuauccagaacacaaccugggaggaccauugccaguuuagccgccccucuccuaucggguaccugggacuccugucccaaagaacacgggauauuuauaucagccgcagacuucugggcaccuucaccuggacacucuccgacucugaaggcaaagauacgcccgggggauacugucugacccgguggaugcugauugaggccgagcucaagugcuuuggcaauacagcuguggccaaauguaacgaaaagcacgacgaggaguucugcgauaugcugcgccuuuuugacuucaauaaacaggcuauccagagacugaaggccccugcgcagaugagcauucaacucaucaacaaggccgugaaugcucugaucaacgaucagcuuauuaugaaaaaucaucugcgggacaucauggggauucccuauugcaacuacuccaaguauuguuaccucaaucacaccacaaccggaaaaacgagccugccuaagugcugucuggucucuaacggcuccuaccucaaugaaacacacuucagcgacgauaucgaacagcaagccgacaacaugauuaccgagaugcugcagaaagaguauauggaacgccaggggaagaccccgcuuggacugguugaucucuuuguguucucuaccagcuuuuaccugaucuccaucuuccugcaucuugugaaaauucccacacacagacauaucgucggcaagucuugcccuaagccccaccggcucaaucacaugggcauuuguagcugcgggcuguauaaacagccuggagugcccguucgcuggaagagaugaggacuagucccuguucccagagcccacuuuuuuuucuuuuuuugaaauaaaauagccugucuuucagaucuaaaaaaaaaaaaaaaaaaaaaaaaaaaaaaaaaaaaaaaaaaaaaaaaaaaaaaaaaaaaaaaaaaaaaaaaaaaaaaaaaaaaaaaaaaaaaaaaaaaa

SEQ ID NO: 31971 - RNA, 1724 nt, Artificial Sequence
  mRNA product Design a-1 (A100) comprising derived and/or modified sequence from LASV(Mad39;Clade IV)__ANH09722__GPCmut7 (opt5)
aggagagucccgcagucggcguccagcggcucugcuuguucgugugugugucguugcaggccuuauucaagcuuaccaugggccagaucgugaccuucuuucaagaggucccccacguuauugaagaggugaugaacaucgugcugauugcccucagcauccuggcuguccuuaaggggcuguacaauguggccacaugcggacucauuggccugguuacguuccuucugcucugugggagauccugcaccacaacccuguauaaaggaguguacgaacugcaggcgcucgagcugaacauggaaacacuuaauaugaccaugccucugucuuguacaaagaacaauagccaucacuauauccgggucggcaacgagaccgggcucgagcugacgcuuaccaauacaucccugaucaaccauaaauuuugcaaucucucugacgcucacaagaaaaaccuguacgaucaugcccugaugagcauuaucuccaccuuccaccucucuauuccgaauuuuaaccaguaugaagccaugagcugugacuucaaugauggaaagaucuccgugcaguacaaccugagccacacauaugcuggcgacaccgccaaucauugcggcacgguugcuaacggggugcuucaaacauuuaugcgcauggccuggggaggcucuuacauugcgcuggauuccgggagaggaggcugggacuguaucaugaccagcuaccaguaucucauuauccagaacacaaccugggaggaucacugccaguucucucggcccuccccuaucggguaccugggacuucugagccaacgcaccagagacauuuauaucucucggcgccuccugggcacauuuacguggacccuguccgauagcgaaggcaaggacacacccgggggauacugucucaccagauggaugcugauugaggccgagcuuaaaugcuucggcaauacagcugucgccaaguguaacgaaaaacaugaugaggaauuuugcgacaugcugcgccucuucgauuuuaauaagcaggcuauccagcggcugaaagccccugcgcagauguccauucaacuuaucaacaaggccgugaaugcucugaucaacgaccagcucauuaugaagaaucaccugagagacaucauggggauucccuauugcaacuacucuaaauauuguuaccugaaucacaccgugacgggaaagacaagccucccuaaaugcugucuggucuccaacggcagcuaccuuaaugagacccauuucucugaugacaucgaacagcaagccgauaacaugauuaccgagaugcugcagaaggaguauauggaacggcaggggaaaacaccgcucggacugguugaccuguucguguuuuccaccagcuucuaccuuaucucuaucuuucuccaccuggugaagauucccacacaucgccacgucgugggcaaaccuugccccaagccucauagacugaaucacaugggcaucuguagcugcggguucuauaagcagcccggaguuccggugcgguggaaacgcugaggacuagucccuguucccagagcccacuuuuuuuucuuuuuuugaaauaaaauagccugucuuucagaucuaaaaaaaaaaaaaaaaaaaaaaaaaaaaaaaaaaaaaaaaaaaaaaaaaaaaaaaaaaaaaaaaaaaaaaaaaaaaaaaaaaaaaaaaaaaaaaaaaaaa

SEQ ID NO: 31972 - RNA, 1724 nt, Artificial Sequence
  mRNA product Design a-1 (A100) comprising derived and/or modified sequence from LASV(Z0947-SLE-2011;Clade IV)__AIT17840__GPCmut7 (opt5)
aggagagucccgcagucggcguccagcggcucugcuuguucgugugugugucguugcaggccuuauucaagcuuaccaugggccagaucgugaccuucuuucaagaggucccccacguuauugaagaggugaugaacaucgugcugauugcccucagcauccuggcuguccuuaaggggcuguacaauuucgccacaugcggacucgugggccugguuacguuucuucugcucugugggagauccugcaccauuucucuguauaaaggaguguacgaacugcagacacucgagcugaacauggaaacccuuaauaugacaaugccucugagcuguaccaagaacaauucccaucacuauaucauggucggcaacgagacagggcucgagcugacccuuacgaauaccucuaucauuaaccauaaauucugcaaucugagcgacgcgcacaagaaaaaccucuacgaucaugcucugauguccaucauuucuacauuucaccugagcaucccgaauuucaaccaguaugaagccauguccugugacuuuaauggaggcaagauuagcgugcaguacaaccucucucacuccuaugccggcgaugcugccaaucauugcgggaccguugcuaacggagugcugcaaacauucaugcggauggccuggggcgggagcuacaucgcgcuugacucuggacgcgauagaugggacuguauuaugaccuccuaccaguaucugaucauccagaacacgacaugggaggaucacugccaguuuagccggcccucuccuauuggcuaccucgggcugcuuucccaacgcaccagagacaucuauauuagccggcgccugcucggaacauucaccuggacccuguccgauucugaaggcaaggacacacccggcggguacugucugacgagauggaugcucaucgaggccgagcugaaaugcuuuggaaauaccgcugucgccaaguguaacgaaaaacaugaugaggaguucugcgacaugcuucggcuguuugauuucaauaagcaggcuauucagcgccucaaagccccugcgcagaugagcauccaacugaucaacaaggccgugaaugcucuuauuaacgaccagcugaucaugaagaaucaccucagagacauuaugggcauccccuauugcaacuacuccaaauauuguuaccugaaucacacaaccacagggaagaccagccugccuaaaugcugucucgugucuaacggauccuaccugaaugaaacgcauuucagcgaugacauugaacagcaagccgauaacaugaucacagagaugcuucagaaggaguauauggaacggcagggcaaaaccccgcuggggcucgucgaccuguuuguuuucucuaccagcuuuuaccugaucuccauuuuccuucaccucgugaagauccccacacaucgccacauugugggaaaaccuugccccaagccucauagacugaaucacaugggcaucuguucuugcggccuguauaagcagcccggggucccggugaaauggaagcggugaggacuagucccuguucccagagcccacuuuuuuuucuuuuuuugaaauaaaauagccugucuuucagaucuaaaaaaaaaaaaaaaaaaaaaaaaaaaaaaaaaaaaaaaaaaaaaaaaaaaaaaaaaaaaaaaaaaaaaaaaaaaaaaaaaaaaaaaaaaaaaaaaaaaa

SEQ ID NO: 31973 - RNA, 1736 nt, Artificial Sequence
  mRNA product Design a-2 (hSL-A64-N5) comprising derived and/or modified sequence from LASV(Josiah;Clade IV)__NP_694870__GPCmut7 (opt1)
aggagaguccgcucagccagguugcagaagcggcuuagcguguguccuaaucuucucucugcguguagguaggccugugccgcaaacaagcuuaccaugggccagaucgugaccuucuuccaggaggucccccacgugaucgaggaggugaugaacaucguccugaucgcccucagcgugcuggccgugcugaaggggcucuacaacuucgcgaccugcggccuggucgggcuggugacguuccuccugcugugcggccgcuccugcaccaccagccucuacaaggggguguacgagcugcagacccuggagcucaacauggagacgcugaacaugaccaugccgcuguccugcaccaagaacaacagccaccacuacaucauggucggcaacgagaccggccucgagcugacgcugaccaacaccuccaucaucaaccacaaguucugcaaccucagcgacgcccacaagaagaaccuguacgaccacgcccugauguccaucaucagcaccuuccaccucuccauccccaacuucaaccaguacgaggccaugagcugcgacuucaacgggggcaagaucuccgugcaguacaaccugagccacuccuacgccggggacgcggccaaccacugcggcacgguggccaacgggguccugcagaccuucaugcggauggccuggggcggcagcuacaucgcgcucgacuccgggcgcggcaacugggacugcaucaugaccagcuaccaguaccugaucauccagaacaccacgugggaggaccacugccaguucucccggcccagccccaucggguaccugggccuccugucccagcgcacccgggacaucuacaucagccgccggcugcucggcaccuucaccuggacgcugagcgacuccgaggggaaggacaccccgggcggguacugccugacccgcuggaugcucaucgaggccgagcugaagugcuucggcaacaccgccguggccaagugcaacgagaagcacgacgaggaguucugcgacaugcugcggcuguucgacuucaacaagcaggccauccagcgccugaaggcgcccgcccagaugagcauccagcugaucaacaaggccgugaacgcccucaucaacgaccagcugaucaugaagaaccaccuccgggacaucauggggauccccuacugcaacuacuccaaguacugcuaccucaaccacacgaccaccggccgcaccagccugcccaagugcugccuggucuccaacggcagcuaccucaacgagacgcacuucuccgacgacaucgagcagcaggccgacaacaugaucaccgagaugcugcagaaggaguacauggagcggcaggggaagacgccccugggccucguggaccuguucguguucagcaccuccuucuaccugaucagcaucuuccugcaccucgucaagaucccgacccaccgccacaucguggggaaguccugccccaagccccaccggcugaaccacaugggcaucugcagcugcgggcuguacaagcagcccggcgugccggucaaguggaagcgcugaggacuagucccuguucccagagcccacuuuuuuuucuuuuuuugaaauaaaauagccugucuuucagaucucaaaggcucuuuucagagccaccaaaaaaaaaaaaaaaaaaaaaaaaaaaaaaaaaaaaaaaaaaaaaaaaaaaaaaaaaaaaaaaaagaauu

SEQ ID NO: 31974 - RNA, 1733 nt, Artificial Sequence
  mRNA product Design a-2 (hSL-A64-N5) comprising derived and/or modified sequence from LASV(LP;Clade I)__AAF86701__GPCmut7 (opt1)
aggagaguccgcucagccagguugcagaagcggcuuagcguguguccuaaucuucucucugcguguagguaggccugugccgcaaacaagcuuaccaugggccagaucaucaccuucuuccaggaggugccccacgucaucgaggaggugaugaacaucgugcugaucgcccucagccugcuggccauccucaaggggcuguacaacaucgcgaccugcggcaucaucgggcuggucgccuuccucuuccugugcggcaaguccugcagccugacgcucaagggcggguacgagcugcagacccuggagcucaacauggagacccugaacaugaccaugccgcuguccugcacgaagaacagcucccaccacuacauccgcgugggcaacgagaccgggcucgagcugacccugaccaacacgagcaucaucaaccacaaguucugcaaccucuccgacgcccacaagaagaaccuguacgaccacgcccugaugagcaucaucuccaccuuccaccucagcauccccaacuucaaccaguacgaggccauguccugcgacuucaacggcgggaagaucagcgugcaguacaaccugucccacagcuacgcgggcgacgccgccgagcacugcgggaccgucgccaacggcgugcugcagaccuucaugcggauggcguggggcgggcgcuacaucgcccucgacuccggcaaggggaacugggacugcaucaugacgagcuaccaguaccugaucauccagaacaccaccugggaggaccacugccaguucucccggcccagccccaucggcuaccugggccuccugucccagcgcacccgggacaucuacaucagccgccggcugcucgggacguucaccuggacccugagcgacuccgagggcaacgagacccccgggggcuacugccugacgcgcuggaugcucaucgaggccgagcugaagugcuucgggaacaccgccguggccaagugcaacgagaagcacgacgaggaguucugcgacaugcugcggcuguucgacuucaacaagcaggcgauccgccggcugaaggcccccgcccagaugagcauccagcugaucaacaaggccgucaacgcccucaucaacgaccagcugaucaugaagaaccaccuccgcgacaucaugggcauccccuacugcaacuacuccaaguacugcuaccucaaccacaccagcuccggccggaccagccugcccaagugcugccugaucuccaacgggagcuaccucaacgagacgcaguucuccgacgacaucgagcagcaggcggacaacaugaucaccgagaugcugcagaaggaguacaucgagcgccagggcaagaccccgcuggggcucguggacaucuucaucuucagcaccuccuucuaccugaucagcaucuuccugcaccugaucaagaucccgacgcaccggcacaucgugggcaagcccugccccaagccccaccgccucaaccacaugggggucugcuccugcggccuguacaagcacccgggcgugcccaccaaguggaagcggugaggacuagucccuguucccagagcccacuuuuuuuucuuuuuuugaaauaaaauagccugucuuucagaucucaaaggcucuuuucagagccaccaaaaaaaaaaaaaaaaaaaaaaaaaaaaaaaaaaaaaaaaaaaaaaaaaaaaaaaaaaaaaaaaagaauu

SEQ ID NO: 31975 - RNA, 1733 nt, Artificial Sequence
  mRNA product Design a-2 (hSL-A64-N5) comprising derived and/or modified sequence from LASV(803213;Clade II)__AAF86703__GPCmut7 (opt1)
aggagaguccgcucagccagguugcagaagcggcuuagcguguguccuaaucuucucucugcguguagguaggccugugccgcaaacaagcuuaccaugggccagaucaucaccuucuuccaggaggugccccacgucaucgaggaggugaugaacaucgugcugaucgcccucagccugcuggccauccucaaggggaucuacaacgucgcgaccugcggccuguucgggcugaucuccuuccuccugcugugcggccgcagcugcuccgugacguacaaggggguguacgagcuccagacccuggagcugaacauggccaaccucaacaugaccaugccgcugagcugcaccaagaacaacucccaccacuacaucauggucggcaacgagacgggccuggagcucacccugaccaacaccagcaucaucaaccacaaguucugcaaccuguccgacgcccacaagaagaaccucuacgaccacgcccugaugagcaucaucuccacguuccaccugagcauccccaacuucaaccaguacgaggccauguccugcgacuucaacgggggcaagaucagcgugcaguacaaccucucccacagcuucgcgguggacgccgccaaccacugcgggaccaucgccaacggcguccugcagaccuucaugcggauggcguggggcggguccuacaucgcccuggacagcggcaaggggaacugggacugcaucaugaccuccuaccaguaccucaucauccagaacacgaccugggaggaccacugccaguucagccgccccucccccaucggcuaccuggggcugcucagccagcggacccgcgacaucuacaucagccggcgccugcugggcaccuucacguggacccucuccgacagcgagggcaacgaggcccccgggggcuacugccugacccgguggaugcugaucgaggccgagcucaagugcuucgggaacaccgccguggcgaagugcaacgagaagcacgacgaggaguucugcgacaugcugcgccuguucgacuucaacaagcaggccaucaagcggcucaagacgcccgcccagauguccauccagcugaucaacaaggccgugaacgcccugaucaacgaccagcucaucaugaagaaccaccuccgcgacaucaugggcauccccuacugcaacuacagccgguacugcuaccugaaccacaccgucaccgggaagaccucccugccccgcugcugccuggugagcaacggcuccuaccugaacgagacgcacuucagcgacgacaucgagcagcaggcggacaacaugaucaccgagaugcuccagaaggaguacauggaccggcagggcaagaccccgcuggggcugguggaccucuucgucuucuccaccagcuucuaccugaucuccaucuuccugcaccuggugaagaucccgacgcaccgccacaucgugggcaagcccugccccaagccccaccggcucaaccacauggggaucugcagcugcggccuguacaagcacccggggguccccgugaaguggaagcgcugaggacuagucccuguucccagagcccacuuuuuuuucuuuuuuugaaauaaaauagccugucuuucagaucucaaaggcucuuuucagagccaccaaaaaaaaaaaaaaaaaaaaaaaaaaaaaaaaaaaaaaaaaaaaaaaaaaaaaaaaaaaaaaaaagaauu

SEQ ID NO: 31976 - RNA, 1733 nt, Artificial Sequence
  mRNA product Design a-2 (hSL-A64-N5) comprising derived and/or modified sequence from LASV(GA391;Clade III)__CAA36645__GPCmut7 (opt1)
aggagaguccgcucagccagguugcagaagcggcuuagcguguguccuaaucuucucucugcguguagguaggccugugccgcaaacaagcuuaccaugggccagaucgugaccuucuuccaggaggucccccacgugaucgaggaggugaugaacaucguccugaucgcccucagcauccuggccauccugaaggggcucuacaacguggcgaccugcggccugaucgggcuggugacguuccuccugcuguccggccgcagcugcucccucaucuacaaggggaccuacgagcugcagacccuggagcucaacauggagacccugaacaugacgaugccgcugagcugcaccaagaacaacucccaccacuacauccgggucggcaacgagaccggccucgagcugacccugacgaacaccagcauccucaaccacaaguucugcaaccuguccgacgcccacaagcgcaaccuguacgaccacagccucauguccaucaucagcaccuuccaccuguccauccccaacuucaaccaguacgaggccaugagcugcgacuucaacgggggcaagaucaccgugcaguacaaccugucccacagcuucgccguggacgccgcggggcacugcggcacgcucgccaacgggguccugcagaccuucaugcggauggccuggggcggcuccuacaucgcccuggacagcgggcgcggcaacugggacugcaucaugaccuccuaccaguaccucaucauccagaacaccacgugggacgaccacugccaguucagccggcccucccccaucggguaccugggccugcucagccagcgcacccgggacaucuacaucagccgccggcugcugggcaccuucaccuggacgcucuccgacagcgaggggaacgagaccccgggcggguacugccugacccgcuggaugcugaucgaggcggagcucaagugcuucggcaacaccgccguggccaagugcaacgagaagcacgacgaggaguucugcgacaugcugcggcuguucgacuucaacaagcaggccauccgccggcucaagacgcccgcccagauguccauccagcugaucaacaaggcggugaacgcccugaucaacgaccagcucaucaugaagaaccaccuccgcgacaucauggggauccccuacugcaacuacagccgguacugcuaccugaaccacaccuccaccggcaagaccagccugccccgcugcugccugaucuccaacggcagcuaccugaacgagacgaaguucuccgacgacaucgagcagcaggccgacaacaugaucaccgagaugcuccagaaggaguacaucgaccggcaggggaagacgccccugggccuggucgaccuguucguguucagcaccuccuucuaccucaucagcaucuuccugcaccuggugaagaucccgacccaccgccacaucgucgggaagcccugccccaagccccaccggcucaaccacaugggcaucugcuccugcgggcuguacaagcagccgggcgugcccgugcgcuggaagcggugaggacuagucccuguucccagagcccacuuuuuuuucuuuuuuugaaauaaaauagccugucuuucagaucucaaaggcucuuuucagagccaccaaaaaaaaaaaaaaaaaaaaaaaaaaaaaaaaaaaaaaaaaaaaaaaaaaaaaaaaaaaaaaaaagaauu

SEQ ID NO: 31977 - RNA, 1736 nt, Artificial Sequence
  mRNA product Design a-2 (hSL-A64-N5) comprising derived and/or modified sequence from LASV(AV;Clade V)__CCA30314__GPCmut7 (opt1)
aggagaguccgcucagccagguugcagaagcggcuuagcguguguccuaaucuucucucugcguguagguaggccugugccgcaaacaagcuuaccaugggccagaucgugaccuucuuccaggaggucccccacgugaucgaggaggugaugaacaucguccugaucgcccucagcauccuggccgugcugaaggggcucuacaacaucgcgaccugcggccugaucgggcugaucacguuccuccugcugugcggccgcuccugcagcuccaaccucuacaaggggguguacgagcugcagagccuggaccucaacauggagacccugaacaugaccaugccgcuguccugcaccaagaacaacagccaccacuacauccgggucggcaacgacacgggccucgagcugacccugaccaacaccuccauccucaaccacaaguucugcaaccugagcgacgcccacaagaaggaccuguacgaccacgcccucauguccaucaucagcacguuccaccuguccauccccaacuucaaccaguacgaggccaugagcugcgacuucaacgggggcaagaucuccgugcaguacaaccugagccacuccuacgccaucgacgcggccaaccacugcgggaccguggccaacggcauccuccagaccuucaugcgcauggccuggggcgggagcuacaucgcgcuggacuccggccgggggaacugggacugcaucaugaccagcuaccaguaccugaucauccagaacacgaccugggagaaccacugccaguucucccgccccagccccaucggcuaccucgggcugcugagccagcggacccgcgacaucuacaucucccggcgccuccugggcaccuucacguggacccugagcgacuccgagggcaacgccacccccgggggcuacugccucacccgguggaugcugaucgaggccgagcugaagugcuucgggaacacggccgucgccaagugcaacgagaagcacgacgaggaguucugcgacaugcuccgccuguucgacuucaacaagcaggcgaucagccggcugaagucccccgcccagaugagcauccagcucaucaacaaggccgugaacgcccugaucaacgaccagcugaucaugaagaaccaccuccgcgacaucaugggcauccccuacugcaacuacuccaaguacugcuaccugaaccacaccaucaccgggaagaccagccugcccaagugcugccucguguccaacggcagcuaccugaacgagacgcacuucuccgacgacaucgagcagcaggccgacaacaugaucaccgagaugcugcagaaggaguacauggagcggcagggcaagaccccgcucgggcuggucgaccuguucguguucagcaccuccuucuaccugaucagcaucuuccuccgccuggugaagaucccgacgcaccggcacaucgucggcaagcccugccccaagccccaccgccugaaccacauggggaucugcuccugcggccucuacaagcagccgggggugcccgugcgguggaagcgcugaggacuagucccuguucccagagcccacuuuuuuuucuuuuuuugaaauaaaauagccugucuuucagaucucaaaggcucuuuucagagccaccaaaaaaaaaaaaaaaaaaaaaaaaaaaaaaaaaaaaaaaaaaaaaaaaaaaaaaaaaaaaaaaaagaauu

SEQ ID NO: 31978 - RNA, 1733 nt, Artificial Sequence
  mRNA product Design a-2 (hSL-A64-N5) comprising derived and/or modified sequence from LASV(Togo/2016/7082;Clade VI)__AMR44577__GPCmut7 (opt1)
aggagaguccgcucagccagguugcagaagcggcuuagcguguguccuaaucuucucucugcguguagguaggccugugccgcaaacaagcuuaccaugggccagaucaucaccuucuuccaggaggugccccacgucaucgaggaggugaugaacaucgugcugaucgcccucagccugcuggccauccucaagggggucuacaacguggcgaccugcggcaucaucgggcuggugacguuccuguuccucugcggccgcuccugcagccugaucuacaagggguccuacgagcugcagacccucgagcugaacauggagacccugaacaugaccaugccgcucagcugcacgaagaacuccagccaccacuacauccgggucggcaacgagaccggccuggagcugacccucaccaacacguccaucaucaaccacaaguucugcaaccugagcgacgcccacaagcgcaaccuguacgaccacgcccucauguccauccugagcaccuuccaccuguccauccccaacuucaaccaguacgaggccaugagcugcgacuucaacgggggcaagaucuccgugcaguacaaccucagccacgccuacgcgguggacgccgccgagcacugcgggaccgucgccaacggcgugcugcagaccuucaugcggauggcguggggcggguccuacaucgcccuggacagcggccgcgggaacugggacugcaucaugacguccuaccaguaccucaucauccagaacaccaccugggaggaccacugccaguucagccggcccucccccaucggcuaccuggggcugcucagccagcgcacccgggacaucuacaucagccgccggcugcugggcacguucaccuggacccucuccgacagcgagggcaacgagacccccgggggcuacugccugacgcgcuggaugcugaucgaggccgagcucaagugcuucgggaacaccgccguggccaagugcaacgagaagcacgacgaggaguucugcgacaugcugcggcuguucgacuucaacaagcaggcgauccagcgccucaagucccccgcccagaugagcauccagcugaucaacaaggccgucaacgcccugaucaacgaccagcucaucaugaagaaccaccuccgggacaugaugggcauccccuacugcaacuacuccaaguacugcuaccugaaccacaccagcuccgggcgcaccagccugcccaagugcugccugguguccaacggcagcuaccugaacgagacgcacuucuccgacgacaucgagcagcaggccgacaacaugaucaccgagaugcuccagaaggaguacaucgaccggcagggcaagaccccgcuggggcugguggaccucuucgucuucagcaccuccuucuaccugaucagcaucuuccugcaccugaucaagaucccgacgcaccgccacaucgugggcaagcccugccccaagccccaccggcucaaccacauggggaucugcuccugcggccuguacaagcagccgggggugcccacccgcuggaagcggugaggacuagucccuguucccagagcccacuuuuuuuucuuuuuuugaaauaaaauagccugucuuucagaucucaaaggcucuuuucagagccaccaaaaaaaaaaaaaaaaaaaaaaaaaaaaaaaaaaaaaaaaaaaaaaaaaaaaaaaaaaaaaaaaagaauu

SEQ ID NO: 31979 - RNA, 1733 nt, Artificial Sequence
  mRNA product Design a-2 (hSL-A64-N5) comprising derived and/or modified sequence from LASV(KAK-428;Clade n.d. (VII))__ANH09740__GPCmut7 (opt1)
aggagaguccgcucagccagguugcagaagcggcuuagcguguguccuaaucuucucucugcguguagguaggccugugccgcaaacaagcuuaccaugggccagaucgugaccuucuuccaggaggucccccacgugaucgaggaggugaugaacaucguccugaucgcccucagccugcuggccauccucaaggggcuguacaacuucgcgaccugcggcgugaucgggcugaucacguuccuccugcugugcggccgcuccugcagcgccaccuacaaggggcaguacgagcuccagacccuggagcugaacauggagucccucaacaugaccaugccgcugagcugcacgaagaacaacucccaccacuacauccgggccggcaacaacaccggccuggagcucacccugaccaacacgagcaucaucucccacaaguucugcaaccugagcgacgcccacaagaagaaccucuacgaccacacccugauguccaucaucaccaccuuccaccugagcauccccaacuucaaccaguacgaggccauguccugcgacuucaacgggggcaagaucagcauccaguacaaccucucccacagcuacgcgggggacgccgcccagcacugcggcacgguggccaacgggguccugcagaccuucaugcgcauggcguggggcggcuccuaccuggcccucgacagcgggcggcgcggcugggacugcaucaucuccagcuaccaguaccugaucauccagaacaccaccugggacgaccacugccaguucucccggcccagccccaucggguaccugggcuucgugagccagaagacgcgcgacaucuacaucucccggcgccuccugggcaccuucaccuggacccugagcgacuccgaggggcacgacaugccgggcggguacugccucacgcgguggaugcugaucgaggccgaccugaagugcuucggcaacaccgccguggccaagugcaacgagaagcacgacgaggaguucugcgacauguggcgccucuucgacuucaacaagcaggcgauccagcggcugaaggcccccgcccagaugaacauccagcugaucaacaaggccgucaacgcccucaucaacgaccagcugaugaugaagaaccaccuccgcgacaucauggggauccccuacugcaacuacagcaaguucugcuaccugaacaacaccaccacgggccggaccucccugccccgcugcugccugaucagcaacggcuccuaccucaacgagacccacuucagcgacgacaucgagcagcaggcggacaacaugaucaccgagaugcugcagaaggaguacauggaccggcaggggaagacgccccugggccucguggaccuguucguguucuccaccagcuucuaccugaucaccaucuuccuccaccuggucaagaucccgacccaccgccacaucguggggaagcccugccccaagccccaccggcugaaccacaugggcaucugcuccugcgggcuguacaagcagccgggcgugcccguccgcuggaagcggugaggacuagucccuguucccagagcccacuuuuuuuucuuuuuuugaaauaaaauagccugucuuucagaucucaaaggcucuuuucagagccaccaaaaaaaaaaaaaaaaaaaaaaaaaaaaaaaaaaaaaaaaaaaaaaaaaaaaaaaaaaaaaaaaagaauu

SEQ ID NO: 31980 - RNA, 1733 nt, Artificial Sequence; identical to SEQ ID NO: 31974
  mRNA product Design a-2 (hSL-A64-N5) comprising derived and/or modified sequence from LASV(Pinneo-NIG-1969;Clade I)__AIT17836__GPCmut7 (opt1)

SEQ ID NO: 31981 - RNA, 1733 nt, Artificial Sequence
  mRNA product Design a-2 (hSL-A64-N5) comprising derived and/or modified sequence from LASV(ISTH0009-NIG-2011;Clade II)__AIT17404__GPCmut7 (opt1)
aggagaguccgcucagccagguugcagaagcggcuuagcguguguccuaaucuucucucugcguguagguaggccugugccgcaaacaagcuuaccaugggccagaucaucaccuucuuccaggaggugccccacgucaucgaggaggugaugaacaucgugcugaucgcccucagccugcuggccauccucaaggggaucuacaacgucgcgaccugcggccuguucgggcugguguccuuccuccugcugugcggccgcagcugcuccacgaccuacaaggggguguacgagcuccagacccuggagcuggacauggccagccucaacaugaccaugccgcuguccugcacgaagaacaacagccaccacuacaucauggucggcaacgagaccggccuggagcucacccugaccaacacguccaucaucaaccacaaguucugcaaccugagcgacgcccacaagaagaaccucuacgaccacgcccugauguccaucaucagcaccuuccaccuguccauccccaacuucaaccaguacgaggccaugagcugcgacuucaacgggggcaagaucuccgugcaguacaaccucagccacgcguacgccguggacgccgccaaccacugcgggaccaucgcgaacggcguccugcagaccuucaugcggauggccuggggcggguccuacaucgcccuggacagcggcaagggguccugggacugcaucaugacgagcuaccaguaccucaucauccagaacaccaccugggaggaccacugccaguucucccgccccagccccaucggcuaccuggggcugcucagccagcggacccgcgacaucuacaucucccggcgccugcugggcacguucaccuggacccucagcgacuccgagggcaacgagacccccgggggcuacugccugacgcgguggaugcugaucgaggccgagcucaagugcuucgggaacaccgccguggcgaagugcaacgagaagcacgacgaggaguucugcgacaugcugcgccuguucgacuucaacaagcaggccauccggcgccucaagacccccgcccagaugagcauccagcugaucaacaaggccgugaacgcccugaucaacgaccagcucaucaugaagaaccaccuccgggacaucaugggcaucccguacugcaacuacuccaaguacugcuaccugaaccacaccgucacggggaagaccagccugccccgcugcugccugguguccaacggcagcuaccugaacgagacccacuucuccgacgacaucgagcagcaggcggacaacaugaucaccgagcuccugcagaaggaguacauggaccggcagggcaagacgccccuggggcucguggaccuguucgucuucagcaccuccuucuaccugaucagcaucuuccugcaccucaucaagaucccgacccaccgccacaucaccggcaagcccugccccaagccccaccggcugaaccacauggggaucugcuccugcggccuguacaagcacccgggggugcccgugaaguggaagcgcugaggacuagucccuguucccagagcccacuuuuuuuucuuuuuuugaaauaaaauagccugucuuucagaucucaaaggcucuuuucagagccaccaaaaaaaaaaaaaaaaaaaaaaaaaaaaaaaaaaaaaaaaaaaaaaaaaaaaaaaaaaaaaaaaagaauu

SEQ ID NO: 31982 - RNA, 1733 nt, Artificial Sequence
  mRNA product Design a-2 (hSL-A64-N5) comprising derived and/or modified sequence from LASV(ISTH2010-NIG-2012;Clade II)__AIT17482__GPCmut7 (opt1)
aggagaguccgcucagccagguugcagaagcggcuuagcguguguccuaaucuucucucugcguguagguaggccugugccgcaaacaagcuuaccaugggccagaucaucaccuucuuccaggaggugccccacgucaucgaggaggugaugaacaucgugcugaucgcccucagccugcuggccauccucaaggggaucuacaacgucgcgaccugcggccuguucgggcugguguccuuccuccugcugugcggccgcagcugcuccacgaccuacaaggggguguacgagcuccagacccuggagcuggacauggccagccucaacaugaccaugccgcuguccugcacgaagaacaacagccaccacuacaucauggucggcaacgagaccggccuggagcucacccugaccaacacguccaucaucaaccacaaguucugcaaccugagcgacgcccacaagaagaaccucuacgaccacgcccugauguccaucaucagcaccuuccaccuguccauccccaacuucaaccaguacgaggccaugagcugcgacuucaacgggggcaagaucuccgugcaguacaaccucagccacgcguacgccguggacgccgccaaccacugcgggaccaucgcgaacggcguccugcagaccuucaugcggauggccuggggcggguccuacaucgcccuggacagcggcaagggguccugggacugcaucaugacgagcuaccaguaccucaucauccagaacaucaccugggaggaccacugccaguucucccgccccagccccaucggcuaccuggggcugcucagccagcggacccgcgacaucuacaucucccggcgccugcugggcaccuucacguggacccucagcgacuccgagggcaacgagacccccgggggcuacugccugacccgguggaugcugaucgaggccgagcucaagugcuucgggaacacggccguggcgaagugcaacgagaagcacgacgaggaguucugcgacaugcugcgccuguucgacuucaacaagcaggccauccggcgccucaagacccccgcccagaugagcauccagcugaucaacaaggccgugaacgcccugaucaacgaccagcucaucaugaagaaccaccuccgggacaucaugggcauccccuacugcaacuacuccaaguacugcuaccugaaccacaccgucaccgggaagacgagccugccccgcugcugccugguguccaacggcagcuaccugaacgagacccacuucuccgacgacaucgagcagcaggcggacaacaugaucaccgagcuccugcagaaggaguacaucgaccggcagggcaagaccccgcuggggcucguggaccuguucgucuucagcacguccuucuaccugaucagcaucuuccugcaccucgugaagaucccgacccaccgccacguggucggcaagcccugccccaagccccaccggcugaaccacauggggaucugcuccugcggccuguacaagcacccgggggugcccgugaaguggaagcgcugaggacuagucccuguucccagagcccacuuuuuuuucuuuuuuugaaauaaaauagccugucuuucagaucucaaaggcucuuuucagagccaccaaaaaaaaaaaaaaaaaaaaaaaaaaaaaaaaaaaaaaaaaaaaaaaaaaaaaaaaaaaaaaaaagaauu

SEQ ID NO: 31983 - RNA, 1733 nt, Artificial Sequence
  mRNA product Design a-2 (hSL-A64-N5) comprising derived and/or modified sequence from LASV(Lassa virus/H.sapiens-wt/NGA/2015/ISTH_0543;Clade II)__AVO03639__GPCmut7 (opt1)
aggagaguccgcucagccagguugcagaagcggcuuagcguguguccuaaucuucucucugcguguagguaggccugugccgcaaacaagcuuaccaugggccagaucaucaccuucuuccaggaggugccccacgucaucgaggaggugaugaacaucgugcugaucgcccucagccugcuggccauccucaaggggaucuacaacgucgcgaccugcggccuguucgggcugguguccuuccuccugcugugcggccgcagcugcuccacgaccuacaaggggguguacgagcuccagacccuggagcuggacauggccaaccucaacaugaccaugccgcugagcugcacgaagaacaacucccaccacuacaucauggucggcaacgagaccggccuggagcucacccugaccaacacgagcaucaucaaccacaaguucugcaaccuguccgacgcccacaagaagaaccucuacgaccacgcccugaugagcaucaucuccaccuuccaccugagcauccccaacuucaaccaguacgaggccauguccugcgacuucaacgggggcaagaucagcgugcaguacaaccucucccacaccuacgcgguggacgccgccaaccacugcgggaccaucgccaacggcguccugcagacguucaugcggauggcguggggcgggagcuacaucgcccuggacuccggcaaggggagcugggacugcaucaugaccuccuaccaguaccucgugauccagaacaccaccugggaggaccacugccaguucagccgccccucccccaucggcuaccuggggcugcucagccagcggacgcgcgacaucuacaucagccggcgccugcugggcaccuucaccuggacccucuccgacagcgagggcaacgagacgcccgggggcuacugccugacccgguggaugcugaucgaggccgagcucaagugcuucgggaacaccgccguggccaagugcaacgagaagcacgacgaggaguucugcgacaugcugcgccuguucgacuucaacaagcaggcgauccggcgccucaagacccccgcccagauguccauccagcugaucaacaaggccgucaacgcccugaucaacgaccagcucaucaugaagaaccaccuccgggacaucaugggcauccccuacugcaacuacagcaaguacugcuaccugaaccacacggugaccgggaagaccucccugccccgcugcugccuggugagcaacggcuccuaccugaacgagacccacuucagcgacgacaucgagcagcaggccgacaacaugaucacggagcuccugcagaaggaguacaucgaccggcagggcaagaccccgcuggggcucgucgaccuguucguguucuccaccagcuucuaccugaucuccaucuuccugcaccucgugaagaucccgacccaccgccacaucacgggcaagcccugccccaagccccaccggcugaaccacauggggaucugcagcugcggccuguacaagcacccggggguccccgugaaguggaagcgcugaggacuagucccuguucccagagcccacuuuuuuuucuuuuuuugaaauaaaauagccugucuuucagaucucaaaggcucuuuucagagccaccaaaaaaaaaaaaaaaaaaaaaaaaaaaaaaaaaaaaaaaaaaaaaaaaaaaaaaaaaaaaaaaaagaauu

SEQ ID NO: 31984 - RNA, 1733 nt, Artificial Sequence
  mRNA product Design a-2 (hSL-A64-N5) comprising derived and/or modified sequence from LASV(Lassa virus/H.sapiens-wt/NGA/2016/ISTH_0009;Clade II)__AVO03571__GPCmut7 (opt1)
aggagaguccgcucagccagguugcagaagcggcuuagcguguguccuaaucuucucucugcguguagguaggccugugccgcaaacaagcuuaccaugggccagaucaucaccuucuuccaggaggugccccacgucaucgaggaggugaugaacaucgugcugaucgcccucagccugcuggccauccucaaggggaucuacaacgucgcgaccugcggccugcuggggcucguguccuuccugcugcucugcggccgcagcugcuccacgaccuacaaggggguguacgagcugcagacccuggagcucgacauggccagccugaacaugaccaugccgcuguccugcacgaagaacaacagccaccacuacaucauggucggcaacgagaccggccucgagcugacccugaccaacacguccaucaucaaccacaaguucugcaaccucagcgacgcccacaagaagaaccuguacgaccacgcccugauguccaucaucagcaccuuccaccucuccauccccaacuucaaccaguacgaggccaugagcugcgacuucaacgggggccggaucuccgugcaguacaaccugagccacuccuacgcgguggacgccgccaaccacugcgggaccaucgccaacggcguccugcagaccuucaugcgcauggcguggggcgggagcuacaucgcccucgacuccggcaaggggagcugggacugcaucaugacguccuaccaguaccugaucauccagaacaccaccugggaggaccacugccaguucagccggcccagccccaucggcuaccuggggcuccugucccagcgcacccgggacaucuacaucagccgccggcugcucggcacguucaccuggacccuguccgacagcgagggcaacgagacccccgggggcuacugccugacgcgcuggaugcucaucgaggccgagcugaagugcuucgggaacaccgccguggccaagugcaacgagaagcacgacgaggaguucugcgacaugcugcggcuguucgacuucaacaagcaggcgauccgccggcugaagacccccgcccagauguccauccagcugaucaacaaggccgugaacgcccucaucaacgaccagcugaucaugaagaaccaccuccgcgacaucaugggcaucccguacugcaacuacagcaaguacugcuaccucaaccacaccgucacggggaagaccucccugccccggugcugccuggugagcaacggcuccuaccucaacgagacccacuucagcgacgacaucgagcagcaggccgacaacaugaucaccgagcugcugcagaaggaguacaucgaccgccagggcaagacgccccucgggcugguggaccuguucgucuucuccaccagcuucuaccugaucuccaucuuccuccaccuggugaagaucccgacccaccggcacaucaccggcaagcccugccccaagccccaccgccugaaccacauggggaucugcagcugcggccucuacaaccacccgggggugcccgucaaguggaagcggugaggacuagucccuguucccagagcccacuuuuuuuucuuuuuuugaaauaaaauagccugucuuucagaucucaaaggcucuuuucagagccaccaaaaaaaaaaaaaaaaaaaaaaaaaaaaaaaaaaaaaaaaaaaaaaaaaaaaaaaaaaaaaaaaagaauu

SEQ ID NO: 31985 - RNA, 1733 nt, Artificial Sequence
  mRNA product Design a-2 (hSL-A64-N5) comprising derived and/or modified sequence from LASV(Lassa virus/H.sapiens-wt/NGA/2016/ISTH_0017;Clade II)__AVO03567__GPCmut7 (opt1)
aggagaguccgcucagccagguugcagaagcggcuuagcguguguccuaaucuucucucugcguguagguaggccugugccgcaaacaagcuuaccaugggccagaucaucaccuucuuccaggaggugccccacgucaucgaggaggugaugaacaucgugcugaucgcccucagccugcuggccauccucaaggggaucuacaacgucgcgaccugcggccuguucgggcugguguccuuccuccugcugugcggccgcagcugcuccacgaccuacaaggggguguacgagcuccagacccuggagcuggacauggccagccucaacaugaccaugccgcuguccugcacgaagaacaacagccaccacuacaucauggucggcaacgagaccggccuggagcucacccugaccaacacguccaucaucaaccacaaguucugcaaccugagcgacgcccacaagaagaaccucuacgaccacgcccugauguccaucaucagcaccuuccaccuguccauccccaacuucaaccaguacgaggccaugagcugcgacuucaacgggggcaagaucuccgugcaguacaaccucagccacaccuacgcgaucgacgccgccaaccacugcgggaccaucgccaacggcgugcugcagacguucaugcggauggcguggggcggguccuacaucgcccuggacagcggcaagggguccugggacugcaucaugaccagcuaccaguaccucaucauccagaacaccaccugggaggaccacugccaguucucccgccccagccccaucggcuaccuggggcugcucagccagcggacgcgcgacaucuacaucucccggcgccugcugggcaccuucaccuggacccucagcgacuccgagggcaacgagacgcccgggggcuacugccugacccgguggaugcugaucgaggccgagcucaagugcuucgggaacaccgccgucgccaagugcaacgagaagcacgacgaggaguucugcgacaugcugcgccuguucgacuucaacaagcaggcgauccggcgccucaagacccccgcccagaugagcauccagcugaucaacaaggccgugaacgcccugaucaacgaccagcucaucaugaagaaccaccuccgggacaucaugggcauccccuacugcaacuacuccaaguacugcuaccugaaccacacggugaccgggaagaccagccugccccgcugcugccuggucuccaacggcagcuaccugaacgagacccacuucuccgacgacaucgagcagcaggccgacaacaugaucacggagcuccugcagaaggaguacauggaccggcagggcaagaccccgcuggggcucguggaccuguucguguucagcaccuccuucuaccugaucagcaucuuccugcaccucguccgcaucccgacccaccggcacgugaucggcaagcccugccccaagccccaccgccugaaccacauggggaucugcuccugcggccuguacaagcacccgggggugcccgucaaguggaagcggugaggacuagucccuguucccagagcccacuuuuuuuucuuuuuuugaaauaaaauagccugucuuucagaucucaaaggcucuuuucagagccaccaaaaaaaaaaaaaaaaaaaaaaaaaaaaaaaaaaaaaaaaaaaaaaaaaaaaaaaaaaaaaaaaagaauu

SEQ ID NO: 31986 - RNA, 1733 nt, Artificial Sequence
  mRNA product Design a-2 (hSL-A64-N5) comprising derived and/or modified sequence from LASV(Lassa virus/H.sapiens-wt/NGA/2018/ISTH_0959;Clade II)__AVV65099__GPCmut7 (opt1)
aggagaguccgcucagccagguugcagaagcggcuuagcguguguccuaaucuucucucugcguguagguaggccugugccgcaaacaagcuuaccaugggccagaucaucaccuucuuccaggaggugccccacgucaucgaggaggugaugaacaucgugcugaucgcccucagccugcuggccauccucaaggggaucuacaacgucgugaccugcggccuguucgggcugguguccuuccuccugcugugcggccgcagcugcuccacgaccuacaagggggucuacgagcuccagacccuggagcuggacauggcgagccucaacaugaccaugccgcuguccugcacgaagaacaacagccaccacuacaucauggugggcaacgagaccggccuggagcucacccugaccaacacguccaucaucaaccacaaguucugcaaccugagcgacgcccacaagaagaaccucuacgaccacgcccugauguccaucaucagcaccuuccaccuguccauccccaacuucaaccaguacgaggccaugagcugcgacuucaacgggggcaagaucuccgugcaguacaaccucagccacgccuacgcgaucgacgccgccaaccacugcgggaccaucgccaacggcguccugcagaccuucaugcggauggcguggggcggguccuacaucgcccuggacagcggcaagggguccugggacugcaucaugacgagcuaccaguaccucaucauccagaacaccaccugggaggaccacugccaguucucccgccccagccccaucggcuaccuggggcugcucagccagcggacccgcgacaucuacaucucccggcgccugcugggcacguucaccuggacccucagcgacuccgagggcaacgagacccccgggggcuacugccugacgcgguggaugcugaucgaggccgagcucaagugcuucgggaacaccgccguggccaagugcaacgagaagcacgacgaggaguucugcgacaugcugcgccuguucgacuucaacaagcaggcgauccggcgccucaagacccccgcccagaugagcauccagcugaucaacaaggccgugaacgcccugaucaacgaccagcucaucaugaagaaccaccuccgggacaucaugggcaucccguacugcaacuacuccaaguacugcuaccugaaccacaccgucacggggaagaccagccugccccgcugcugccugguguccaacggcagcuaccugaacgagacccacuucuccgacgacaucgagcagcaggccgacaacaugaucaccgagcuccugcagaaggaguacaucgaccggcagggcaagacgccccuggggcucguggaccuguucgucuucagcaccuccuucuaccugaucagcaucuuccugcaccucgugaagaucccgacccaccgccacgugaucggcaagcccugccccaagccccaccggcugaaccacauggggaucugcuccugcggccuguacaagcacccggggguccccgugaaguggaagcgcugaggacuagucccuguucccagagcccacuuuuuuuucuuuuuuugaaauaaaauagccugucuuucagaucucaaaggcucuuuucagagccaccaaaaaaaaaaaaaaaaaaaaaaaaaaaaaaaaaaaaaaaaaaaaaaaaaaaaaaaaaaaaaaaaagaauu

SEQ ID NO: 31987 - RNA, 1733 nt, Artificial Sequence
  mRNA product Design a-2 (hSL-A64-N5) comprising derived and/or modified sequence from LASV(LASV003-NIG-2008;Clade II)__AIT17580__GPCmut7 (opt1)
aggagaguccgcucagccagguugcagaagcggcuuagcguguguccuaaucuucucucugcguguagguaggccugugccgcaaacaagcuuaccaugggccagaucaucaccuucuuccaggaggugccccacgucaucgaggaggugaugaacaucgugcugaucgcccucagccugcuggccauccucaaggggaucuacaacgucgcgaccugcggccuguucgggcugguguccuuccuccugcugugcggccgcagcugcuccacgaccuacaaggggguguacgagcuccagacccuggagcuggacauggccagccucaacaugaccaugccgcuguccugcacgaagaacaacagccaccacuacaucauggucggcaacgagaccggccuggagcucacccugaccaacacguccaucaucaaccacaaguucugcaaccugagcgacgcccacaagaagaaccucuacgaccacgcccugauguccaucaucagcaccuuccaccuguccauccccaacuucaaccaguacgaggccaugagcugcgacuucaacgggggcaagaucuccgugcaguacaaccucagccacaccuacgcgguggacgccgccaaccacugcgggaccaucgccaacggcguccugcagacguucaugcggauggcguggggcggguccuacaucgcccuggacagcggcaagggguccugggacugcaucaugaccagcuaccaguaccucaucauccagaacaccaccugggaggaccacugccaguucucccgccccagccccaucggcuaccuggggcugcucagccagcggacgcgcgacaucuacaucucccggcgccugcugggcaccuucaccuggacccucagcgacuccgagagcaacgagacgccgggcggguacugccugacccgguggaugcugaucgaggccgagcucaagugcuucggcaacaccgccguggccaagugcaacgagaagcacgacgaggaguucugcgacaugcugcgccuguucgacuucaacaagcaggcgauccggcgccucaaggcccccgcccagauguccauccagcugaucaacaaggccgugaacgcccugaucaacgaccagcucaucaugaagaaccaccuccgggacaucauggggauccccuacugcaacuacagcaaguacugcuaccugaaccacaccgucacgggccgcaccucccugccccggugcugccuggugagcaacggguccuaccugaacgagacccacuucagcgacgacaucgagcagcaggcggacaacaugaucaccgagcuccugcagaaggaguacauggaccgccagggcaagacgccccugggccucguggaccuguucgucuucuccaccagcuucuaccugaucuccaucuuccugcaccucgugaagaucccgacccaccggcacgugaucgggaagcccugccccaagccccaccgccugaaccacaugggcaucugcagcugcgggcuguacaagcacccgggcguccccgugaaguggaagcggugaggacuagucccuguucccagagcccacuuuuuuuucuuuuuuugaaauaaaauagccugucuuucagaucucaaaggcucuuuucagagccaccaaaaaaaaaaaaaaaaaaaaaaaaaaaaaaaaaaaaaaaaaaaaaaaaaaaaaaaaaaaaaaaaagaauu

SEQ ID NO: 31988 - RNA, 1733 nt, Artificial Sequence
  mRNA product Design a-2 (hSL-A64-N5) comprising derived and/or modified sequence from LASV(LASV035-NIG-2009;Clade II)__AIT17588__GPCmut7 (opt1)
aggagaguccgcucagccagguugcagaagcggcuuagcguguguccuaaucuucucucugcguguagguaggccugugccgcaaacaagcuuaccaugggccagaucaucaccuucuuccaggaggugccccacgucaucgaggaggugaugaacaucgugcugaucgcccucagccugcuggccauccucaaggggaucuacaacgucgcgaccugcggccuguucgggcugguguccuuccuccugcugugcggccgcagcugcuccacgaccuacaaggggguguacgagcuccagacccuggagcuggacauggccagccucaacaugaccaugccgcuguccugcacgaagaacaacagccaccacuacaucauggucggcaacgagaccggccuggagcucacccugaccaacacguccaucaucaaccacaaguucugcaaccugagcgacgcccacaagaagaaccucuacgaccacgcccugauguccaucaucagcaccuuccaccuguccauccccaacuucaaccaguacgaggccaugagcugcgacuucaacgggggcaagaucuccgugcaguacaaccucagccacgcguacgccguggacgccgccaaccacugcgggaccaucgcgaacggcguccugcagaccuucaugcggauggccuggggcggguccuacaucgcccuggacagcggcaagggguccugggacugcaucaugacgagcuaccaguaccucaucauccagaacaccaccugggaggaccacugccaguucucccgccccagccccaucggcuaccuggggcugcucagccagcggacccgcgacaucuacaucucccggcgccugcugggcacguucaccuggacccucagcgacuccgagggcaacgagacccccgggggcuacugccugacgcgguggaugcugaucgaggccgagcucaagugcuucgggaacaccgccguggcgaagugcaacgagaagcacgacgaggaguucugcgacaugcugcgccuguucgacuucaacaagcaggccauccggcgccucaaggcccccgcccagaugagcauccagcugaucaacaaggccgugaacgcgcugaucaacgaccagcucaucaugaagaaccaccuccgggacaucaugggcauccccuacugcaacuacuccaaguacugcuaccugaaccacaccgucaccgggaagacgagccugccccgcugcugccugguguccaacggcagcuaccugaacgagacccacuucuccgacgacaucgagcagcaggccgacaacaugaucaccgagcuccugcagaaggaguacaucgaccggcagggcaagaccccgcuggggcucguggaccuguucgucuucagcacguccuucuaccugaucagcaucuuccugcaccucgugaagaucccgacccaccgccacgugaucggcaagcccugccccaagccccaccggcugaaccacauggggaucugcuccugcggccuguacaagcacccggggguccccgugaaguggaagcgcugaggacuagucccuguucccagagcccacuuuuuuuucuuuuuuugaaauaaaauagccugucuuucagaucucaaaggcucuuuucagagccaccaaaaaaaaaaaaaaaaaaaaaaaaaaaaaaaaaaaaaaaaaaaaaaaaaaaaaaaaaaaaaaaaagaauu

SEQ ID NO: 31989 - RNA, 1733 nt, Artificial Sequence
  mRNA product Design a-2 (hSL-A64-N5) comprising derived and/or modified sequence from LASV(LASV1000-NIG-2009;Clade II)__AIT17782__GPCmut7 (opt1)
aggagaguccgcucagccagguugcagaagcggcuuagcguguguccuaaucuucucucugcguguagguaggccugugccgcaaacaagcuuaccaugggccagaucaucaccuucuuccaggaggugccccacgucaucgaggaggugaugaacaucgugcugaucgcccucagccugcuggccauccucaaggggaucuacaacgucgcgaccugcggccuguucgggcugguguccuuccuccugcugugcggccgcagcugcuccacgaccuacaaggggguguacgagcuccagacccuggagcuggacauggccagccucaacaugaccaugccgcuguccugcacgaagaacaacagccaccacuacaucauggucggcaacgagaccggccuggagcucacccugaccaacacguccaucaucaaccacaaguucugcaaccugagcgacgcccacaagaagaaccucuacgaccacgcccugauguccaucaucagcaccuuccaccuguccauccccaacuucaaccaguacgaggccaugagcugcgacuucaacgggggcaagaucuccgugcaguacaaccucagccacaccuacgcgguggacgccgccaaccacugcgggaccaucgccaacggcguccugcagacguucaugcggauggcguggggcggguccuacaucgcccuggacagcggcaagggguccugggacugcaucaugaccagcuaccaguaccucaucauccagaacaccaccugggaggaccacugccaguucucccgccccagccccaucggcuaccuggggcugcucagccagcggacgcgcgacaucuacaucucccggcgccugcugggcaccuucaccuggacccucagcgacuccgagggcaacgagacgcccgggggcuacugccugacccgguggaugcugaucgaggccgagcucaagugcuucgggaacaccgccguggccaagugcaacgagaagcacgacgaggaguucugcgacaugcugcgccuguucgacuucaacaagcaggcgaucaagcggcucaagacccccgcccagaugagcauccagcugaucaacaaggccgugaacgcccugaucaacgaccagcucaucaugaagaaccaccuccgcgacaucaugggcauccccuacugcaacuacuccaaguacugcuaccugaaccacacggucaccgggaagaccagccugccccggugcugccugguguccaacggcagcuaccugaacgagacccacuucuccgacgacaucgagcagcaggccgacaacaugaucacggagcuccugcagaaggaguacaucgaccgccagggcaagaccccgcuggggcucguggaccuguucgucuucagcaccuccuucuaccugaucagcaucuuccugcaccucgugaagaucccgacccaccggcacguggucggcaagcccugccccaagccccaccgccugaaccacauggggaucugcuccugcggccuguacaagcacccgggggugcccgugaaguggaagcggugaggacuagucccuguucccagagcccacuuuuuuuucuuuuuuugaaauaaaauagccugucuuucagaucucaaaggcucuuuucagagccaccaaaaaaaaaaaaaaaaaaaaaaaaaaaaaaaaaaaaaaaaaaaaaaaaaaaaaaaaaaaaaaaaagaauu

SEQ ID NO: 31990 - RNA, 1733 nt, Artificial Sequence
  mRNA product Design a-2 (hSL-A64-N5) comprising derived and/or modified sequence from LASV(LASV221-NIG-2010;Clade II)__AIT17624__GPCmut7 (opt1)
aggagaguccgcucagccagguugcagaagcggcuuagcguguguccuaaucuucucucugcguguagguaggccugugccgcaaacaagcuuaccaugggccagaucaucaccuucuuccaggaggugccccacgucaucgaggaggugaugaacaucgugcugaucgcccucagccugcuggccauccucaaggggaucuacaacgucgcgaccugcggccuguucgggcugguguccuuccuccugcugugcggccgcagcugcuccacgaccuacaaggggguguacgagcuccagacccuggagcuggacauggccagccucaacaugaccaugccgcuguccugcacgaagaacaacagccaccacuacaucauggucggcaacgagaccggccuggagcucacccugaccaacacguccaucaucaaccacaaguucugcaaccugagcgacgcccacaagaagaaccucuacgaccacgcccugauguccaucaucagcaccuuccaccuguccauccccaacuucaaccaguacgaggccaugagcugcgacuucaacgggggcaagaucuccgugcaguacaaccucagccacaccuacgcgaucgacgccgccaaccacugcgggaccaucgccaacggcgugcugcagacguucaugcggauggcguggggcggguccuacaucgcccuggacagcggcaagggguccugggacugcaucaugaccagcuaccaguaccucaucauccagaacaccaccugggaggaccacugccaguucucccgccccagccccaucggcuaccuggggcugcucagccagcggacgcgcgacaucuacaucucccggcgccugcugggcaccuucaccuggacccucagcgacuccgagggcaacgagacgcccgggggcuacugccugacccgguggaugcugaucgaggccgagcucaagugcuucgggaacaccgccgucgccaagugcaacgagaagcacgacgaggaguucugcgacaugcugcgccuguucgacuucaacaagcaggcgauccggcgccucaagacccccgcccagaugagcauccagcugaucaacaaggccgugaacgcccugaucaacgaccagcucaucaugaagaaccaccuccgggacaucaugggcauccccuacugcaacuacuccaaguacugcuaccugaaccacacggugaccgggaagaccagccugccccgcugcugccuggucuccaacggcagcuaccugaacgagacccacuucuccgacgacaucgagcagcaggccgacaacaugaucacggagaugcuccagaaggaguacauggaccggcagggcaagaccccgcuggggcugguggaccucuucguguucagcaccuccuucuaccugaucagcaucuuccugcaccuggucaagaucccgacccaccgccacgugaucggcaagcccugccccaagccccaccggcucaaccacauggggaucugcuccugcggccuguacaagcacccgggggugcccgucaaguggaagcgcugaggacuagucccuguucccagagcccacuuuuuuuucuuuuuuugaaauaaaauagccugucuuucagaucucaaaggcucuuuucagagccaccaaaaaaaaaaaaaaaaaaaaaaaaaaaaaaaaaaaaaaaaaaaaaaaaaaaaaaaaaaaaaaaaagaauu

SEQ ID NO: 31991 - RNA, 1733 nt, Artificial Sequence
  mRNA product Design a-2 (hSL-A64-N5) comprising derived and/or modified sequence from LASV(LASV237-NIG-2010;Clade II)__AIT17638__GPCmut7 (opt1)
aggagaguccgcucagccagguugcagaagcggcuuagcguguguccuaaucuucucucugcguguagguaggccugugccgcaaacaagcuuaccaugggccagaucaucaccuucuuccaggaggugccccacgucaucgaggaggugaugaacaucgugcugaucgcccucagccugcuggccauccucaaggggaucuacaacgucgcgaccugcggccuguucgggcugguguccuuccuccugcugugcggccgcagcugcuccacgaccuacaaggggguguacgagcuccagacccuggagcuggacauggccagccucaacaugaccaugccgcuguccugcacgaagaacaacagccaccacuacaucauggucggcaacgagaccggccuggagcucacccugaccaacacguccaucaucaaccacaaguucugcaaccugagcgacgcccacaagaaggaccucuacgaccacgcccugauguccaucaucagcaccuuccaccuguccauccccaacuucaaccaguacgaggccaugagcugcgacuucaacgggggcaagaucuccgugcaguacaaccucagccacaccuacgcgguggacgccgccaaccacugcgggaccaucgccaacggcguccugcagacguucaugcggauggcguggggcggguccuacaucgcccuggacagcggcaagggguccugggacugcaucaugaccagcuaccaguaccucaucauccagaacaccaccugggaggaccacugccaguucucccgccccagccccaucggcuaccuggggcugcucagccagcggacgcgcgacaucuacaucucccggcgccugcugggcaccuucaccuggacccucagcgacuccgagggcaacgagacgcccgggggcuacugccugacccgguggaugcugaucgaggccgagcucaagugcuucgggaacaccgccguggccaagugcaacgagaagcacgacgaggaguucugcgacaugcugcgccuguucgacuucaacaagcaggcgauccggcgccucaagacccccgcccagaugagcauccagcugaucaacaaggccgugaacgcccugaucaacgaccagcucaucaugaagaaccaccuccgggacaucaugggcauccccuacugcaacuacuccaaguacugcuaccugaaccacacggucaccgggaagaccagccugccccgcugcugccugguguccaacggcagcuaccugaacgagacccacuucuccgacgacaucgagcagcaggccgacaacaugaucacggagcuccugcagaaggaguacauggaccggcagggcaagaccccgcuggggcucguggaccuguucgucuucagcaccuccuucuaccugaucagcaucuuccugcaccucaucaagaucccgacccaccgccacaucacgggcaagcccugccccaagccccaccggcugaaccacauggggaucugcuccugcggccuguacaagcacccgggggugcccgugaaguggaagcgcugaggacuagucccuguucccagagcccacuuuuuuuucuuuuuuugaaauaaaauagccugucuuucagaucucaaaggcucuuuucagagccaccaaaaaaaaaaaaaaaaaaaaaaaaaaaaaaaaaaaaaaaaaaaaaaaaaaaaaaaaaaaaaaaaagaauu

SEQ ID NO: 31992 - RNA, 1733 nt, Artificial Sequence
  mRNA product Design a-2 (hSL-A64-N5) comprising derived and/or modified sequence from LASV(LASV253-NIG-2011;Clade II)__AIT17670__GPCmut7 (opt1)
aggagaguccgcucagccagguugcagaagcggcuuagcguguguccuaaucuucucucugcguguagguaggccugugccgcaaacaagcuuaccaugggccagaucaucaccuucuuccaggaggugccccacgucaucgaggaggugaugaacaucgugcugaucgcccucagccugcuggccauccucaaggggaucuacaacgucgcgaccugcggccuguucgggcugguguccuuccuccugcugugcggccgcagcugcuccacgaccuacaaggggguguacgagcuccagacccuggagcuggacauggccagccucaacaugaccaugccgcuguccugcacgaagaacaacagccaccacuacaucauggucggcaacgagaccggccuggagcucacccugaccaacacguccaucaucaaccacaaguucugcaaccugagcgacgcccacaagaagaaccucuacgaccacgcccugauguccaucaucagcaccuuccaccuguccauccccaacuucaaccaguacgaggccaugagcugcgacuucaacgggggcaagaucuccgugcaguacaaccucagccacaccuacgcgguggacgccgccaaccacugcgggaccaucgccaacggcguccugcagacguucaugcggauggcguggggcggguccuacaucgcccuggacagcggcaagggguccugggacugcaucaugaccagcuaccaguaccucaucauccagaacaccaccugggaggaccacugccaguucucccgccccagccccaucggcuaccuggggcugcucagccagcggacgcgcgacaucuacaucucccggcgccugcugggcaccuucaccuggacccucagcgacuccgagggcaacgagacgcccgggggcuacugccugacccgguggaugcugaucgaggccgagcucaagugcuucgggaacaccgccguggccaagugcaacgagaagcacgacgaggaguucugcgacaugcugcgccuguucgacuucaacaagcaggcgauccggcgccucaaggcccccgcccagaugagcauccagcugaucaacaaggccgugaacgcccugaucaacgaccagcucaucaugaagaaccaccuccgggacaucaugggcaucccguacugcaacuacuccaaguacugcuaccugaaccacaccgucacggggcgcaccagccugccccggugcugccugguguccaacggcagcuaccugaacgagacccacuucuccgacgacaucgagcagcaggcggacaacaugaucaccgagcuccugcagaaggaguacaucgaccgccagggcaagacgccccuggggcucguggaccuguucgucuucagcaccuccuucuaccugaucagcaucuuccugcaccucgugaagaucccgacccaccggcacaucaucggcaagcccugccccaagccccaccgccugaaccacauggggaucugcuccugcggccuguacaagcacccgggggugcccgucaaguggaagcggugaggacuagucccuguucccagagcccacuuuuuuuucuuuuuuugaaauaaaauagccugucuuucagaucucaaaggcucuuuucagagccaccaaaaaaaaaaaaaaaaaaaaaaaaaaaaaaaaaaaaaaaaaaaaaaaaaaaaaaaaaaaaaaaaagaauu

SEQ ID NO: 31993 - RNA, 1733 nt, Artificial Sequence
  mRNA product Design a-2 (hSL-A64-N5) comprising derived and/or modified sequence from LASV(LASV254-NIG-2011;Clade II)__AIT17674__GPCmut7 (opt1)
aggagaguccgcucagccagguugcagaagcggcuuagcguguguccuaaucuucucucugcguguagguaggccugugccgcaaacaagcuuaccaugggccagaucaucaccuucuuccaggaggugccccacgucaucgaggaggugaugaacaucgugcugaucgcccucagccugcuggccauccucaaggggaucuacaacgucgcgaccugcggccuguucgggcugguguccuuccuccugcugugcggccgcagcugcuccacgaccuacaaggggguguacgagcuccagacccuggagcuggacaugaccaaccucaacaugacgaugccgcugagcugcaccaagaacaacucccaccacuacaucauggucggcaacgagaccggccuggagcucacccugacgaacaccagcaucaucaaccacaaguucugcaaccuguccgacgcccacaagaagaaccucuacaaccacgcccugaugagcaucaucuccaccuuccaccugagcauccccaacuucaaccaguacgaggccauguccugcgacuucaacgggggcaagaucagcgugcaguacaaccucucccacagcuacgccguggacgcggccaaccacugcgggaccaucgccaacggcguccugcagacguucaugcggauggccuggggcggguccuacaucgcgcuggacagcggcaaggggaacugggacugcaucaugaccuccuaccaguaccucaucauccagaacaccaccugggaggaccacugccaguucagccgccccucccccaucggcuaccuggggcugcucagccagcggacgcgcgacaucuacaucagccggcgccugcugggcaccuucaccuggacccucuccgacagcgagggcaacgagacgcccgggggcuacugccugacccgguggaugcugaucgaggccgagcucaagugcuucgggaacaccgccguggccaagugcaacgagaagcacgacgaggaguucugcgacaugcugcgccuguucgacuucaacaagcaggccauccggcgccucaagacccccgcgcaggccaacauccagcugaucaacaaggccgugaacgcccugaucaacgaccagcucaucaugaagaaccaccuccgggacaucaugggcauccccuacugcaacuacuccaaguacugcuaccugaaccacacggucaccgggaagaccagccugccccgcugcugccugguguccaacggcagcuaccugaacgagacccacuucuccgacgacaucgagcagcaggccgacaacaugaucacggagcuccugcagaaggaguacauggaccggcagggcaagaccccgcuggggcucguggaccuguucgucuucagcaccuccuucuaccugaucagcaucuuccugcaccucgugaagaucccgacccaccgccacgugaucggcaagcccugccccaagccccaccggcugaaccacauggggaucugcuccugcggccuguacaagcacccggggguccccgugaaguggaagcgcugaggacuagucccuguucccagagcccacuuuuuuuucuuuuuuugaaauaaaauagccugucuuucagaucucaaaggcucuuuucagagccaccaaaaaaaaaaaaaaaaaaaaaaaaaaaaaaaaaaaaaaaaaaaaaaaaaaaaaaaaaaaaaaaaagaauu

SEQ ID NO: 31994 - RNA, 1733 nt, Artificial Sequence
  mRNA product Design a-2 (hSL-A64-N5) comprising derived and/or modified sequence from LASV(Nig08-A19;Clade III)__ADU56618__GPCmut7 (opt1)
aggagaguccgcucagccagguugcagaagcggcuuagcguguguccuaaucuucucucugcguguagguaggccugugccgcaaacaagcuuaccaugggccagaucgugaccuucuuccaggaggucccccacgugaucgaggaggugaugaacaucguccugaucgcccucagcauccuggccauccugaaggggcucuacaacaucgcgaccugcggccugaucgggcuggugacguuccuccugcuguccggccgcagcugcuccaugaccuacaaggggguguacgagcuccagacccuggagcugaacaugaacacccucaacaugacgaugccgcugagcugcaccaagaacaacucccaccacuacaucauggucggcaacgagaccggccuggagcucacccugacgaacaccagccugcuccaccacaaguucugcaaccuguccgacgcccacaagaagaaccuguacgaccacacccucaugagcaucaucuccaccuuccaccugagcauccccaacuucaaccaguacgaggccauguccugcgacuucaacgggggcaagaucacggugcaguacaaccugagccacuccuacgccaucgacgccgcgaaccacugcgggaccguggccaacggcguccuccagaccuucaugcggauggccuggggcgggagcuacaucgcccuggacuccggccgcgggaagugggacugcaucaugaccagcuaccaguaccugaucauccagaacacgaccugggaggaccacugccaguucucccggcccagccccaucggcuaccucgggcugcugucccagcgcacccgggacaucuacaucagccgccggcuccugggcaccuucacguggacccugagcgacuccgagggcaacgagacccccgggggcuacugccucacccgcuggaugcugaucgaggcggagcugaagugcuucgggaacacggccguggccaagugcaacgagaagcacgacgaggaguucugcgacaugcuccggcuguucgacuucaacaagcaggccauccgccggcugaaggcccccgcgcagaugagcauccagcucaucaacaaggccgugaacgcccugaucaacgaccagcugaucaugaagaaccaccuccgcgacaucaugggcauccccuacugcaacuacuccaaguacugcuaccugaaccacaccagcaccgggcggaccucccugccccgcugcugccucgucagcaacggcuccuaccugaacgagacgcacuucagcgacgacaucgagcagcaggccgacaacaugaucaccgagaugcugcagaaggaguaccucgaccggcagggcaagaccccgcuggggcugguggaccuguucguguucuccaccagcuucuaccucaucuccaucuuccugcaccuggucaagaucccgacgcaccgccacaucgugggcaagcccugccccaagccccaccggcucaaccacauggggaucugcagcugcggccuguacaagcagccgggggugcccguccgcuggaagcggugaggacuagucccuguucccagagcccacuuuuuuuucuuuuuuugaaauaaaauagccugucuuucagaucucaaaggcucuuuucagagccaccaaaaaaaaaaaaaaaaaaaaaaaaaaaaaaaaaaaaaaaaaaaaaaaaaaaaaaaaaaaaaaaaagaauu

SEQ ID NO: 31995 - RNA, 1736 nt, Artificial Sequence
  mRNA product Design a-2 (hSL-A64-N5) comprising derived and/or modified sequence from LASV(G1180-SLE-2010;Clade IV)__AIT17168__GPCmut7 (opt1)
aggagaguccgcucagccagguugcagaagcggcuuagcguguguccuaaucuucucucugcguguagguaggccugugccgcaaacaagcuuaccaugggccagaucgugaccuucuuccaggaggucccccacgugaucgaggaggugaugaacaucguccugaucgcccucagcauccuggccgugcugaaggggcucuacaacuucgcgaccugcggccugguggggcugcucaccuuccugcugcucugcggccgcuccugcaccgccagccgguacaagggggucuacgagcugcagacccuggagcucaacauggagacccugaacaugacgaugccgcuguccugcaccaagaacaacagccaccacuacaucauggugggcaacgagaccggccucgagcugacccugacgaacaccuccaucaucaaccacaaguucugcaaccucagcgacgcccacaagaagaaccuguacgaccacgcccugauguccaucaucagcaccuuccaccucuccauccccaacuucaaccaguacgaggccaugagcugcgacuucaacgggggcaagaucuccgugcaguacaaccugagccacuccuacgcgggggacgccgccaaccacugcggcaccgucgccaacggggugcugcagacguucaugcgcauggcguggggcggcagcuacaucgcccucgacuccgggcacggcagcugggacugcaucaugaccuccuaccaguaccugaucauccagaacaccaccugggaggaccacugccaguucagccggcccucccccaucggguaccugggccuccugagccagcgcacgcgggacaucuacaucagccgccggcugcucggcaccuucaccuggacccuguccgacagcgaggggaaggacacgccgggcggguacugccugacccgcuggaugcucaucgaggccgagcugaagugcuucggcaacaccgccguggccaagugcaacgagaagcacgacgaggaguucugcgacaugcugcggcuguucgacuucaacaagcaggcgauccagcgccugaaggcccccgcccagauguccauccagcugaucaacaaggccgucaacgcccucaucaacgaccagcugaucaugaagaaccaccuccgggacaucauggggauccccuacugcaacuacagcaaguacugcuaccucaaccacaccacgaccggcaagaccucccugcccaagugcugccuggugagcaacggcuccuaccucaacgagacccacuucagcgacgacaucgagcagcaggcggacaacaugaucacggagaugcugcagaaggaguacauggagcgccaggggaagacgccccugggccucguggaccuguucgucuucuccaccagcuucuaccugaucuccaucuuccugcaccucgugaagaucccgacccaccggcacaucgugggcaagagcugccccaagccccaccgccugaaccacauggggaucugcuccugcgggcuguacaagcagcccggcgucccggugaaguggaagcggugaggacuagucccuguucccagagcccacuuuuuuuucuuuuuuugaaauaaaauagccugucuuucagaucucaaaggcucuuuucagagccaccaaaaaaaaaaaaaaaaaaaaaaaaaaaaaaaaaaaaaaaaaaaaaaaaaaaaaaaaaaaaaaaaagaauu

SEQ ID NO: 31996 - RNA, 1736 nt, Artificial Sequence
  mRNA product Design a-2 (hSL-A64-N5) comprising derived and/or modified sequence from LASV(G1442-SLE-2011;Clade IV)__AIT17180__GPCmut7 (opt1)
aggagaguccgcucagccagguugcagaagcggcuuagcguguguccuaaucuucucucugcguguagguaggccugugccgcaaacaagcuuaccaugggccagaucgugaccuucuuccaggaggucccccacgugaucgaggaggugaugaacaucguccugaucgcccucagcauccuggccgugcugaaggggcucuacaacguggcgaccugcggccugaucgggcuggucacguuccuccugcugugcggccgcuccugcaccaccacccucuacaaggggguguacgagcugcagacgcuggagcucaacauggagacccugaacaugaccaugccgcugagcugcaccaagaacaacucccaccacuacauccgggugggcaacgagacgggccucgagcugacccugaccaacaccagcaucaucaaccacaaguucugcaaccucuccgacgcccacaagaagaaccuguacgaccacgcccugaugagcaucaucuccacguuccaccucagcauccccaacuucaaccaguacgaggccauguccugcgacuucaacgggggcaagaucagcguccaguacaaccugucccacagcuacgccggggacgcggccaaccacugcggcaccguggccaacggggugcugcagaccuucaugcgcauggccuggggcggcuccuacaucgcgcucgacagcgggcggggcaacugggacugcaucaugaccuccuaccaguaccugaucauccagaacacgaccugggacgaccacugccaguucagccgccccucccccaucggguaccugggccuccugagccagcggacccgcgacgucuacaucucccggcgccugcucggcaccuucacguggacccugagcgacagcgaggggaaggacaccccgggcggguacugccugacccgguggaugcucaucgaggccgagcugaagugcuucggcaacacggccguggccaagugcaacgagaagcacgacgaggaguucugcgacaugcugcgccucuucgacuucaacaagcaggccauccagcggcugaaggcgcccgcccagauguccauccagcugaucaacaaggccgugaacgcccucaucaacgaccagcugaucaugaagaaccaccuccgcgacaucauggggauccccuacugcaacuacagcaaguacugcuaccugaacaacaccgccaccggcaagaccucccugcccaagugcugccugaucagcaacggcuccuaccucaacgagacgcacuucagcgacgacaucgagcaggaggcggacaacaugaucaccgagaugcugcagaaggaguacauggagcggcaggggaagacgccccugggccucgucgaccuguucguguucuccaccagcuucuaccugaucuccaucuuccugcaccucgugaagaucccgacccaccgccacaucgucggcaagagcugccccaagccccaccggcugaaccacauggggaucugcuccugcgggcuguacaagcagcccggcgugccggugcgcuggaagcggugaggacuagucccuguucccagagcccacuuuuuuuucuuuuuuugaaauaaaauagccugucuuucagaucucaaaggcucuuuucagagccaccaaaaaaaaaaaaaaaaaaaaaaaaaaaaaaaaaaaaaaaaaaaaaaaaaaaaaaaaaaaaaaaaagaauu

SEQ ID NO: 31997 - RNA, 1736 nt, Artificial Sequence
  mRNA product Design a-2 (hSL-A64-N5) comprising derived and/or modified sequence from LASV(G3010-SLE-2013;Clade IV)__AIT17344__GPCmut7 (opt1)
aggagaguccgcucagccagguugcagaagcggcuuagcguguguccuaaucuucucucugcguguagguaggccugugccgcaaacaagcuuaccaugggccagaucgugaccuucuuccaggaggucccccacgugaucgaggaggugaugaacaucguccugaucgcccucagcauccuggccgugcugaaggggcucuacaacuucgcgaccugcggccugguggggcuggucacguuccuccugcugugcggccgcuccugcaccaccagccucuacaaggggguguacgagcugcagacccuggagcucaacauggagacgcugaacaugaccaugccgcuguccugcaccaagaacaacagccaccacuacaucauggugggcaacgagaccggccucgagcugacgcugaccaacaccuccaucaucaaccacaaguucugcaaccucagcgacgcccacaagaagaaccuguacaaccacgcccugauguccaucaucagcaccuuccaccucuccauccccaacuucaaccaguacgaggccaugagcugcgacuucaacgggggcaagaucuccguccaguacaaccugagccacuccuacgccggggacgcggccagccacugcggcacgguggccaacggggugcugcagaccuucaugcggauggccuggggcggcuccuacaucgcgcucgacagcggguacggcaagugggacugcaucaugaccuccuaccaguaccugaucauccagaacaccacgugggaggaccacugccaguucagccgccccucccccaucggguaccugggccuccugagccagcggacccgcgacaucuacaucagccggcgccugcucggcaccuucaccuggacgcuguccgacagcgaggggaaggacaccccgggcggguacugccugacccgguggaugcucaucgaggccgagcugaagugcuucggcaacaccgccgucgccaagugcaacgagaagcacgacgaggaguucugcgacaugcugcgccucuucgacuucaacaagcaggccauccagcggcugaagacgcccgcgcagauguccauccagcugaucaacaaggccgugaacgcccucaucaacgaccagcugaucaugaagaaccaccuccgcgacaucauggggauccccuacugcaacuacagcaaguacugcuaccugaaccacaccaccaccggcaagacgucccugcccaagugcugccuggugagcaacggcuccuaccucaacgagacccacuucagcgacgacaucgagcagcaggccgacaacaugaucaccgagaugcugcagaaggaguacauggagcggcaggggaagacgccccugggccucgucgaccuguucguguucuccaccagcuucuaccugaucuccaucuuccugcaccucgugaagaucccgacccaccgccacaucgucggcaagagcugccccaagccccaccggcugaaccacauggggaucugcuccugcgggcuguacaagcagcccggcgugccggugcgcuggaagcggugaggacuagucccuguucccagagcccacuuuuuuuucuuuuuuugaaauaaaauagccugucuuucagaucucaaaggcucuuuucagagccaccaaaaaaaaaaaaaaaaaaaaaaaaaaaaaaaaaaaaaaaaaaaaaaaaaaaaaaaaaaaaaaaaagaauu

SEQ ID NO: 31998 - RNA, 1736 nt, Artificial Sequence
  mRNA product Design a-2 (hSL-A64-N5) comprising derived and/or modified sequence from LASV(G502-SLE-2009;Clade IV)__AIT17126__GPCmut7 (opt1)
aggagaguccgcucagccagguugcagaagcggcuuagcguguguccuaaucuucucucugcguguagguaggccugugccgcaaacaagcuuaccaugggccagaucgugaccuucuuccaggaggucccccacgugaucgaggaggugaugaacaucguccugaucgcccucagcauccuggccgugcugaaggggcucuacaacuucgcgaccugcggccugguggggcugcucacguuccugcugcucugcggccgcuccugcaccaccgggcuguacaagggcgucuacgagcugcagacccucgagcugaacauggagacgcugaacaugaccaugccgcucagcugcaccaagaacaacucccaccacuacaucauggugggcaacgagaccgggcuggagcugacgcucaccaacaccagcaucaucaaccacaaguucugcaaccuguccgacgcccacaagaagaaccuguacgaccacgcccucaugagcaucaucuccaccuuccaccugagcauccccaacuucaaccaguacgaggccauguccugcgacuucaacggcgggaagaucagcgugcaguacaaccugucccacagcuacgccggcgacgcggccgaccacugcgggacggucgccaacggcgugcuccagaccuucaugcggauggccuggggcggguccuacaucgcgcuggacagcggccgcgggcggugggacugcaucaugaccuccuaccaguaccugaucauccagaacaccacgugggaggaccacugccaguucagccgccccucccccaucggcuaccucggccugcugagccagcggacccgcgacaucuacaucucccggcgccuccuggggaccuucaccuggacgcugagcgacagcgagggcaaggacacccccgggggcuacugccucacccgguggaugcugaucgaggccgagcugaagugcuucgggaacaccgccguggccaagugcaacgagaagcacgacgaggaguucugcgacaugcuccgccuguucgacuucaacaagcaggccauccagcggcugaaggcgcccgcccagauguccauccagcucaucaacaaggccgucaacgcccugaucaacgaccagcuggugaugaagaaccaccuccgcgacaucaugggcauccccuacugcaacuacagccgguacugcuaccugaaccacacgaccaccggccgcaccucccugcccaagugcugccucgugagcaacggguccuaccugaacgagacgcacuucagcgacgacaucgagcagcaggccgacaacaugaucaccgagaugcugcagaaggaguacauggagcggcagggcaagaccccgcucgggcuggucgaccuguucguguucuccaccagcuucuaccugaucuccaucuuccuccaccuggugaagaucccgacgcaccgccacaucgucggcaagagcugccccaagccccaccggcugaaccacauggggaucugcuccugcggccucuacaagcagcccggcgugccggugaaguggaagcgcugaggacuagucccuguucccagagcccacuuuuuuuucuuuuuuugaaauaaaauagccugucuuucagaucucaaaggcucuuuucagagccaccaaaaaaaaaaaaaaaaaaaaaaaaaaaaaaaaaaaaaaaaaaaaaaaaaaaaaaaaaaaaaaaaagaauu

SEQ ID NO: 31999 - RNA, 1736 nt, Artificial Sequence
  mRNA product Design a-2 (hSL-A64-N5) comprising derived and/or modified sequence from LASV(G733-SLE-2010;Clade IV)__AIT17154__GPCmut7 (opt1)
aggagaguccgcucagccagguugcagaagcggcuuagcguguguccuaaucuucucucugcguguagguaggccugugccgcaaacaagcuuaccaugggccagaucgugaccuucuuccaggaggucccccacgugaucgaggaggugaugaacaucguccugaucgcccucagcauccuggccgugcugaaggggcucuacaacuucgcgaccugcggcaucguggggcuggucuccuuccugcuccugugcggccgcagcugcacgaccucccuguacaaggggguguacgagcuccagacccuggagcugaacauggagacccucaacaugacgaugccgcugagcugcaccaagaacaacucccaccacuacaucauggugggcaacgagaccggccuggagcucacccugacgaacaccagcaucaucaaccacaaguucugcaaccuguccgacgcccacaagaagaaccucuacgaccacgcccugaugagcaucaucuccaccuuccaccugagcauccccaacuucaaccaguacgaggccauguccugcgacuucaacgggggcaagaucagcguccaguacaaccucucccacagcuacgccggggacgcggccaaccacugcggcaccaucgccaacggggugcugcagacguucaugcggauggccuggggcggcuccuacaucgcgcuggacagcgggcgcgaccggugggacugcaucaugaccuccuaccaguaccucaucauccagaacaccaccugggaggaccacugccaguucagccgccccucccccaucggcuaccuggggcugcucagccagcggacgcgcgacaucuacaucagccggcgccugcugggcaccuucaccuggacccucuccgacagcgagggcaaggacacgcccgggggcuacugccugacccgguggaugcugaucgaggccgagcucaagugcuucgggaacaccgccguggccaagugcaacgagaagcacgacgaggaguucugcgacaugcugcgccuguucgacuucaacaagcaggccauccagcggcucaaggcgcccgcccagauguccauccagcugaucaacaaggccgucaacgcccugaucaacgaccagcucaucaugaagaaccaccuccgcgacaucaugggcauccccuacugcaacuacagcaaguacugcuaccugaaccacaccacgaccgggaagaccucccugcccaagugcugccuggugagcaacggcuccuaccugaacgagacccacuucagcgacgacaucgagcagcaggccgacaacaugaucacggagaugcuccagaaggaguacauggagcggcagggcaagaccccgcuggggcugguggaccucuucgucuucuccaccagcuucuaccugaucuccaucuuccugcaccuggugaagaucccgacccaccgccacguggucggcaagagcugccccaagccccaccggcucaaccacauggggaucugcuccugcggccuguacgggcagcccggcgugccggugaaguggaagcgcugaggacuagucccuguucccagagcccacuuuuuuuucuuuuuuugaaauaaaauagccugucuuucagaucucaaaggcucuuuucagagccaccaaaaaaaaaaaaaaaaaaaaaaaaaaaaaaaaaaaaaaaaaaaaaaaaaaaaaaaaaaaaaaaaagaauu

SEQ ID NO: 32000 - RNA, 1736 nt, Artificial Sequence
  mRNA product Design a-2 (hSL-A64-N5) comprising derived and/or modified sequence from MOPV/LASV reassortant(IGS-1;Clade IV)__AFY05576__GPCmut7 (opt1)
aggagaguccgcucagccagguugcagaagcggcuuagcguguguccuaaucuucucucugcguguagguaggccugugccgcaaacaagcuuaccaugggccagaucgugaccuucuuccaggaggucccccacgugaucgaggaggugaugaacaucguccugaucgcccucagcgugcuggccgugcugaaggggcucuacaacuucgcgaccugcggccuggucgggcuggugacguuccuccugcugugcggccgcuccugcaccaccagccucuacaaggggguguacgagcugcagacccuggagcucaacauggagacgcugaacaugaccaugccgcuguccugcaccaagaacaacagccaccacuacaucauggucggcaacgagaccggccucgagcugacgcugaccaacaccuccaucaucaaccacaaguucugcaaccucagcgacgcccacaagaagaaccuguacgaccacgcccugauguccaucaucagcaccuuccaccucuccauccccaacuucaaccaguacgaggccaugagcugcgacuucaacgggggcaagaucuccgugcaguacaaccugagccacuccuacgccggggacgcggccaaccacugcggcacgguggccaacgggguccugcagaccuucaugcggauggccuggggcggcagcuacaucgcgcucgacuccgggcgcggcaacugggacugcaucaugaccagcuaccaguaccugaucauccagaacaccacgugggaggaccacugccaguucucccggcccagccccaucggguaccugggccuccugucccagcgcacccgggacaucuacaucagccgccggcugcucggcaccuucaccuggacgcugagcgacuccgagggggaggacaccccgggcggguacugccugacccgcuggaugcucaucgaggccgagcugaagugcuucggcaacaccgccguggccaagugcaacgagaagcacgacgaggaguucugcgacaugcugcggcuguucgacuucaacaagcaggccauccagcgccugaaggcgcccgcccagaugagcauccagcugaucaacaaggccgugaacgcccucaucaacgaccagcugaucaugaagaaccaccuccgggacaucauggggauccccuacugcaacuacuccaaguacugcuaccucaaccacacgaccaccggccgcaccagccugcccaagugcugccuggucuccaacggcagcuaccucaacgagacgcacuucuccgacgacaucgagcagcaggccgacaacaugaucaccgagaugcugcagaaggaguacauggagcggcaggggaagacgccccugggccucguggaccuguucguguucagcaccuccuucuaccugaucagcaucuuccugcaccucgucaagaucccgacccaccgccacaucguggggaaguccugccccaagccccaccggcugaaccacaugggcaucugcagcugcgggcuguacaagcagcccggcgugccggucaaguggaagcgcugaggacuagucccuguucccagagcccacuuuuuuuucuuuuuuugaaauaaaauagccugucuuucagaucucaaaggcucuuuucagagccaccaaaaaaaaaaaaaaaaaaaaaaaaaaaaaaaaaaaaaaaaaaaaaaaaaaaaaaaaaaaaaaaaagaauu

SEQ ID NO: 32001 - RNA, 1736 nt, Artificial Sequence
  mRNA product Design a-2 (hSL-A64-N5) comprising derived and/or modified sequence from LASV(LM765-SLE-2012;Clade IV)__AIT17814__GPCmut7 (opt1)
aggagaguccgcucagccagguugcagaagcggcuuagcguguguccuaaucuucucucugcguguagguaggccugugccgcaaacaagcuuaccaugggccagaucgugaccuucuuccaggaggucccccacgugaucgaggaggugaugaacaucguccugaucgcccucagcauccuggccgugcugaaggggcucuacaacuucgcgaccugcggccugguggggcuggucacguuccuccugcugugcggccgcuccugcaccaccagccucuacaaggggguguacgagcugcagacccuggagcucaacauggagacgcugaacaugaccaugccgcuguccugcaccaagaacaacagccaccacuacaucauggugggcaacgagaccggccucgagcugacgcugaccaacaccuccaucaucgaccacaaguucugcaaccucagcgacgcccaccggaagaaccuguacgaccacgcccugauguccaucaucagcaccuuccaccucuccauccccaacuucaaccaguacgaggccaugagcugcgacuucaacgggggcaagaucuccguccaguacaaccugagccacuccuacgccaaggacgcggccgaccacugcgggacgguggccaacggcgugcugcagaccuucaugcgcauggccuggggcgggagcuacaucgcgcucgacuccggccgggggcgcugggacugcaucaugaccagcuaccaguaccugaucauccagaacaccacgugggaggaccacugccaguucucccggcccagccccaucggcuaccuggggcuccugucccagcgcacccgggacaucuacaucagccgccggcugcucggcaccuucaccuggacgcugagcgacuccgagggcaaggacacccccgggggcuacugccugacccgcuggaugcucaucgaggccgagcugaagugcuucgggaacaccgccgucgccaagugcaacgagaagcacgacgaggaguucugcgacaugcugcggcuguucgacuucaacaagcaggccauccagcgccugaaggcgcccgcccagaugagcauccagcugaucaacaaggccgugaacgcccucaucaacgaccagcugaucaugaagaaccaccuccgggacaucaugggcauccccuacugcaacuacuccaaguacugcuaccucaaccacacgaccaccgggaagaccagccugcccaagugcugccugguguccaacggcagcuaccucaacgagacgcacuucuccgacgacaucgagcagcaggccgacaacaugaucaccgagaugcugcagaaggaguacauggagcgccagggcaagaccccgcuggggcucgucgaccuguucguguucagcaccuccuucuaccugaucagcaucuuccugcaccucgugaagaucccgacgcaccggcacaucgucggcaagcccugccccaagccccaccgccugaaccacauggggaucugcuccugcggccuguacaagcagccgggggugcccgugaaguggaagcggugaggacuagucccuguucccagagcccacuuuuuuuucuuuuuuugaaauaaaauagccugucuuucagaucucaaaggcucuuuucagagccaccaaaaaaaaaaaaaaaaaaaaaaaaaaaaaaaaaaaaaaaaaaaaaaaaaaaaaaaaaaaaaaaaagaauu

SEQ ID NO: 32002 - RNA, 1736 nt, Artificial Sequence
  mRNA product Design a-2 (hSL-A64-N5) comprising derived and/or modified sequence from LASV(LM776-SLE-2012;Clade IV)__AIT17824__GPCmut7 (opt1)
aggagaguccgcucagccagguugcagaagcggcuuagcguguguccuaaucuucucucugcguguagguaggccugugccgcaaacaagcuuaccaugggccagaucgugaccuucuuccaggaggucccccacgugaucgaggaggugaugaacaucguccugaucgcccucagcauccuggccgugcugaaggggcucuacaacuucgcgaccugcggccugguggggcuggucacguuccuccugcugugcggccgcuccugcaccaccagcguguacaaggggguguacgagcuccagacccuggagcugaacauggagacgcucaacaugaccaugccgcuguccugcaccaagaacaacagccaccacuacaucauggucggcaacgagaccggccuggagcucacgcugaccaacaccuccaucaucaaccacaaguucugcaaccugagcgacgcccacaagaagaaccucuacgaccacgcccugauguccaucaucagcaccuuccaccuguccauccccaacuucaaccaguacgaggccaugagcugcgacuucaacgggggcaagaucuccgugcaguacaaccucagccacuccuacgccggggacgcggccaaccacugcggcacgguggccaacgggguccugcagaccuucaugcggauggccuggggcggcagcuacaucgcgcuggacuccgggcacggcaagugggacugcaucaugaccagcuaccaguaccucaucauccagaacaccacgugggaggaccacugccaguucucccgccccagccccaucggguaccugggccugcucucccagcggacccgcgacaucuacaucagccggcgccugcugggcaccuucaccuggacgcucagcgacuccgaggggaaggacaccccgggcggguacugccugacccgguggaugcugaucgaggccgagcucaagugcuucggcaacaccgccguggccaagugcaacgagaagcacgacgaggaguucugcgacaugcugcgccuguucgacuucaacaagcaggccauccagcggcucaaggcgcccgcccagaugagcauccagcugaucaacaaggccgugaacgcccugaucaacgaccagcucaucaugaagaaccaccuccgcgacaucauggggauccccuacugcaacuacuccaaguacugcuaccugaaccacacgaccaccggcaagaccagccugcccaagugcugccuggucuccaacggcagcuaccugaacgagacgcacuucuccgacgacaucgagcagcaggccgacaacaugaucaccgagaugcuccagaaggaguacauggagcggcaggggaagacgccccugggccugguggaccucuucguguucagcaccuccuucuaccugaucagcaucuuccugcaccuggucaagaucccgacccaccgccacaucguggggaaguccugccccaagccccaccggcucaaccacaugggcaucugcagcugcgggcuguacaagcagcccggcgugccgguccgcuggaagcggugaggacuagucccuguucccagagcccacuuuuuuuucuuuuuuugaaauaaaauagccugucuuucagaucucaaaggcucuuuucagagccaccaaaaaaaaaaaaaaaaaaaaaaaaaaaaaaaaaaaaaaaaaaaaaaaaaaaaaaaaaaaaaaaaagaauu

SEQ ID NO: 32003 - RNA, 1736 nt, Artificial Sequence
  mRNA product Design a-2 (hSL-A64-N5) comprising derived and/or modified sequence from LASV(Mad39;Clade IV)__ANH09722__GPCmut7 (opt1)
aggagaguccgcucagccagguugcagaagcggcuuagcguguguccuaaucuucucucugcguguagguaggccugugccgcaaacaagcuuaccaugggccagaucgugaccuucuuccaggaggucccccacgugaucgaggaggugaugaacaucguccugaucgcccucagcauccuggccgugcugaaggggcucuacaacguggcgaccugcggccugaucgggcuggucacguuccuccugcugugcggccgcuccugcaccaccacccucuacaaggggguguacgagcugcaggcccuggagcucaacauggagacgcugaacaugaccaugccgcugagcugcaccaagaacaacucccaccacuacauccgggugggcaacgagaccggccucgagcugacgcugaccaacaccagccucaucaaccacaaguucugcaaccuguccgacgcccacaagaagaaccuguacgaccacgcccucaugagcaucaucuccaccuuccaccugagcauccccaacuucaaccaguacgaggccauguccugcgacuucaacgacgggaagaucagcguccaguacaaccugucccacacguacgcgggcgacaccgccaaccacugcgggaccguggccaacggcgugcuccagaccuucaugcgcauggccuggggcgggagcuacaucgcgcuggacuccggccgcgggggcugggacugcaucaugacgagcuaccaguaccugaucauccagaacaccaccugggaggaccacugccaguucucccggcccagccccaucggguaccucggccugcugucccagcggacccgcgacaucuacaucagccggcgccuccugggcacguucaccuggacccuguccgacagcgaggggaaggacaccccgggcggguacugccucacgcgguggaugcugaucgaggccgagcugaagugcuucggcaacaccgccgucgccaagugcaacgagaagcacgacgaggaguucugcgacaugcuccgccuguucgacuucaacaagcaggccauccagcggcugaaggcgcccgcccagaugagcauccagcucaucaacaaggccgugaacgcccugaucaacgaccagcugaucaugaagaaccaccuccgcgacaucauggggauccccuacugcaacuacuccaaguacugcuaccugaaccacaccgugaccggcaagacgagccugcccaagugcugccucgucuccaacggcagcuaccugaacgagacccacuucuccgacgacaucgagcagcaggccgacaacaugaucaccgagaugcugcagaaggaguacauggagcggcaggggaagacgccccucggccugguggaccuguucguguucagcaccuccuucuaccugaucagcaucuuccuccaccuggucaagaucccgacccaccgccacgugguggggaagcccugccccaagccccaccggcugaaccacaugggcaucugcuccugcggguucuacaagcagccgggcguccccgugcgcuggaagcggugaggacuagucccuguucccagagcccacuuuuuuuucuuuuuuugaaauaaaauagccugucuuucagaucucaaaggcucuuuucagagccaccaaaaaaaaaaaaaaaaaaaaaaaaaaaaaaaaaaaaaaaaaaaaaaaaaaaaaaaaaaaaaaaaagaauu

SEQ ID NO: 32004 - RNA, 1736 nt, Artificial Sequence
  mRNA product Design a-2 (hSL-A64-N5) comprising derived and/or modified sequence from LASV(Z0947-SLE-2011;Clade IV)__AIT17840__GPCmut7 (opt1)
aggagaguccgcucagccagguugcagaagcggcuuagcguguguccuaaucuucucucugcguguagguaggccugugccgcaaacaagcuuaccaugggccagaucgugaccuucuuccaggaggucccccacgugaucgaggaggugaugaacaucguccugaucgcccucagcauccuggccgugcugaaggggcucuacaacuucgcgaccugcggccugguggggcuggucacguuccuccugcugugcggccgcuccugcaccaucagccucuacaaggggguguacgagcugcagacccuggagcucaacauggagacccugaacaugacgaugccgcuguccugcaccaagaacaacagccaccacuacaucauggugggcaacgagaccggccucgagcugacccugacgaacaccuccaucaucaaccacaaguucugcaaccucagcgacgcccacaagaagaaccuguacgaccacgcccugauguccaucaucagcaccuuccaccucuccauccccaacuucaaccaguacgaggccaugagcugcgacuucaacgggggcaagaucuccguccaguacaaccugagccacuccuacgccggggacgcggccaaccacugcggcaccguggccaacggggugcugcagacguucaugcggauggccuggggcggcagcuacaucgcgcucgacuccgggcgcgaccggugggacugcaucaugaccagcuaccaguaccugaucauccagaacaccaccugggaggaccacugccaguucucccgccccagccccaucggcuaccuggggcuccugucccagcggacgcgcgacaucuacaucagccggcgccugcucggcaccuucaccuggacccugagcgacuccgagggcaaggacacgcccgggggcuacugccugacccgguggaugcucaucgaggccgagcugaagugcuucgggaacaccgccgucgccaagugcaacgagaagcacgacgaggaguucugcgacaugcugcgccucuucgacuucaacaagcaggccauccagcggcugaaggcgcccgcccagaugagcauccagcugaucaacaaggccgugaacgcccucaucaacgaccagcugaucaugaagaaccaccuccgcgacaucaugggcauccccuacugcaacuacuccaaguacugcuaccugaaccacaccacgaccgggaagaccagccugcccaagugcugccugguguccaacggcagcuaccucaacgagacccacuucuccgacgacaucgagcagcaggccgacaacaugaucacggagaugcugcagaaggaguacauggagcggcagggcaagaccccgcuggggcucgucgaccuguucguguucagcaccuccuucuaccugaucagcaucuuccugcaccucgugaagaucccgacccaccgccacaucgucggcaagcccugccccaagccccaccggcugaaccacauggggaucugcuccugcggccuguacaagcagccgggggugcccgugaaguggaagcgcugaggacuagucccuguucccagagcccacuuuuuuuucuuuuuuugaaauaaaauagccugucuuucagaucucaaaggcucuuuucagagccaccaaaaaaaaaaaaaaaaaaaaaaaaaaaaaaaaaaaaaaaaaaaaaaaaaaaaaaaaaaaaaaaaagaauu

SEQ ID NO: 32005 - RNA, 1736 nt, Artificial Sequence
  mRNA product Design a-2 (hSL-A64-N5) comprising derived and/or modified sequence from LASV(Josiah;Clade IV)__NP_694870__GPCmut7 (opt1)
aggagaguccgcucagccagguugcagaagcggcuuagcguguguccuaaucuucucucugcguguagguaggccugugccgcaaacaagcuuaccaugggccagaucgugaccuucuuccaggaggucccccacgugaucgaggaggugaugaacaucguccugaucgcccucagcgugcuggccgugcugaaggggcucuacaacuucgcgaccugcggccuggucgggcuggugacguuccuccugcugugcggccgcuccugcaccaccagccucuacaaggggguguacgagcugcagacccuggagcucaacauggagacgcugaacaugaccaugccgcuguccugcaccaagaacaacagccaccacuacaucauggucggcaacgagaccggccucgagcugacgcugaccaacaccuccaucaucaaccacaaguucugcaaccucagcgacgcccacaagaagaaccuguacgaccacgcccugauguccaucaucagcaccuuccaccucuccauccccaacuucaaccaguacgaggccaugagcugcgacuucaacgggggcaagaucuccgugcaguacaaccugagccacuccuacgccggggacgcggccaaccacugcggcacgguggccaacgggguccugcagaccuucaugcggauggccuggggcggcagcuacaucgcgcucgacuccgggcgcggcaacugggacugcaucaugaccagcuaccaguaccugaucauccagaacaccacgugggaggaccacugccaguucucccggcccagccccaucggguaccugggccuccugucccagcgcacccgggacaucuacaucagccgccggcugcucggcaccuucaccuggacgcugagcgacuccgaggggaaggacaccccgggcggguacugccugacccgcuggaugcucaucgaggccgagcugaagugcuucggcaacaccgccguggccaagugcaacgagaagcacgacgaggaguucugcgacaugcugcggcuguucgacuucaacaagcaggccauccagcgccugaaggcgcccgcccagaugagcauccagcugaucaacaaggccgugaacgcccucaucaacgaccagcugaucaugaagaaccaccuccgggacaucauggggauccccuacugcaacuacuccaaguacugcuaccucaaccacacgaccaccggccgcaccagccugcccaagugcugccuggucuccaacggcagcuaccucaacgagacgcacuucuccgacgacaucgagcagcaggccgacaacaugaucaccgagaugcugcagaaggaguacauggagcggcaggggaagaccccgcugggccugguggaccucuucguguucagcaccuccuucuaccugaucagcaucuuccugcaccucgucaagauccccacgcaccgccacaucguggggaaguccugccccaagccccaccggcugaaccacaugggcaucugcagcugcgggcuguacaagcagccgggcgugcccgucaaguggaagcgcugaggacuagucccuguucccagagcccacuuuuuuuucuuuuuuugaaauaaaauagccugucuuucagaucucaaaggcucuuuucagagccaccaaaaaaaaaaaaaaaaaaaaaaaaaaaaaaaaaaaaaaaaaaaaaaaaaaaaaaaaaaaaaaaaagaauu

SEQ ID NO: 32006 - RNA, 1733 nt, Artificial Sequence
  mRNA product Design a-2 (hSL-A64-N5) comprising derived and/or modified sequence from LASV(LP;Clade I)__AAF86701__GPCmut7 (opt1)
aggagaguccgcucagccagguugcagaagcggcuuagcguguguccuaaucuucucucugcguguagguaggccugugccgcaaacaagcuuaccaugggccagaucaucaccuucuuccaggaggugccccacgucaucgaggaggugaugaacaucgugcugaucgcccucagccugcuggccauccucaaggggcuguacaacaucgcgaccugcggcaucaucgggcuggucgccuuccucuuccugugcggcaaguccugcagccugacgcucaagggcggguacgagcugcagacccuggagcucaacauggagacccugaacaugaccaugccgcuguccugcacgaagaacagcucccaccacuacauccgcgugggcaacgagaccgggcucgagcugacccugaccaacacgagcaucaucaaccacaaguucugcaaccucuccgacgcccacaagaagaaccuguacgaccacgcccugaugagcaucaucuccaccuuccaccucagcauccccaacuucaaccaguacgaggccauguccugcgacuucaacggcgggaagaucagcgugcaguacaaccugucccacagcuacgcgggcgacgccgccgagcacugcgggaccgucgccaacggcgugcugcagaccuucaugcggauggcguggggcgggcgcuacaucgcccucgacuccggcaaggggaacugggacugcaucaugacgagcuaccaguaccugaucauccagaacaccaccugggaggaccacugccaguucucccggcccagccccaucggcuaccugggccuccugucccagcgcacccgggacaucuacaucagccgccggcugcucgggacguucaccuggacccugagcgacuccgagggcaacgagacccccgggggcuacugccugacgcgcuggaugcucaucgaggccgagcugaagugcuucgggaacaccgccguggccaagugcaacgagaagcacgacgaggaguucugcgacaugcugcggcuguucgacuucaacaagcaggcgauccgccggcugaaggccccggcccagaugagcauccagcugaucaacaaggccgucaacgcccucaucaacgaccagcugaucaugaagaaccaccuccgcgacaucaugggcauccccuacugcaacuacuccaaguacugcuaccucaaccacaccagcuccggccggaccagccugcccaagugcugccugaucuccaacgggagcuaccucaacgagacgcaguucuccgacgacaucgagcagcaggcggacaacaugaucaccgagaugcugcagaaggaguacaucgagcgccagggcaagaccccgcuggggcugguggacaucuucaucuucagcaccuccuucuaccucaucagcaucuuccugcaccugaucaagauccccacgcaccggcacaucgugggcaagcccugccccaagccgcaccgccucaaccacaugggggucugcuccugcggccuguacaagcaccccggcgugcccaccaaguggaagcggugaggacuagucccuguucccagagcccacuuuuuuuucuuuuuuugaaauaaaauagccugucuuucagaucucaaaggcucuuuucagagccaccaaaaaaaaaaaaaaaaaaaaaaaaaaaaaaaaaaaaaaaaaaaaaaaaaaaaaaaaaaaaaaaaagaauu

SEQ ID NO: 32007 - RNA, 1733 nt, Artificial Sequence
  mRNA product Design a-2 (hSL-A64-N5) comprising derived and/or modified sequence from LASV(803213;Clade II)__AAF86703__GPCmut7 (opt1)
aggagaguccgcucagccagguugcagaagcggcuuagcguguguccuaaucuucucucugcguguagguaggccugugccgcaaacaagcuuaccaugggccagaucaucaccuucuuccaggaggugccccacgucaucgaggaggugaugaacaucgugcugaucgcccucagccugcuggccauccucaaggggaucuacaacgucgcgaccugcggccuguucgggcugaucuccuuccuccugcugugcggccgcagcugcuccgugacguacaaggggguguacgagcuccagacccuggagcugaacauggccaaccucaacaugaccaugccgcugagcugcaccaagaacaacucccaccacuacaucauggucggcaacgagacgggccuggagcucacccugaccaacaccagcaucaucaaccacaaguucugcaaccuguccgacgcccacaagaagaaccucuacgaccacgcccugaugagcaucaucuccacguuccaccugagcauccccaacuucaaccaguacgaggccauguccugcgacuucaacgggggcaagaucagcgugcaguacaaccucucccacagcuucgcgguggacgccgccaaccacugcgggaccaucgccaacggcguccugcagaccuucaugcggauggcguggggcggguccuacaucgcccuggacagcggcaaggggaacugggacugcaucaugaccuccuaccaguaccucaucauccagaacacgaccugggaggaccacugccaguucagccgccccucccccaucggcuaccuggggcugcucagccagcggacccgcgacaucuacaucagccggcgccugcugggcaccuucacguggacccucuccgacagcgagggcaacgaggcccccgggggcuacugccugacccgguggaugcugaucgaggccgagcucaagugcuucgggaacaccgccguggcgaagugcaacgagaagcacgacgaggaguucugcgacaugcugcgccuguucgacuucaacaagcaggccaucaagcggcucaagacgccggcccagauguccauccagcugaucaacaaggccgugaacgcccugaucaacgaccagcucaucaugaagaaccaccuccgcgacaucaugggcauccccuacugcaacuacagccgguacugcuaccugaaccacaccgucaccgggaagaccucccugccccgcugcugccuggugagcaacggcuccuaccugaacgagacgcacuucagcgacgacaucgagcagcaggcggacaacaugaucaccgagaugcuccagaaggaguacauggaccggcagggcaagaccccgcuggggcugguggaccuguucgucuucuccaccagcuucuaccucaucuccaucuuccugcaccuggugaagauccccacgcaccgccacaucgugggcaagcccugccccaagccgcaccggcucaaccacauggggaucugcagcugcggccuguacaagcaccccgggguccccgugaaguggaagcgcugaggacuagucccuguucccagagcccacuuuuuuuucuuuuuuugaaauaaaauagccugucuuucagaucucaaaggcucuuuucagagccaccaaaaaaaaaaaaaaaaaaaaaaaaaaaaaaaaaaaaaaaaaaaaaaaaaaaaaaaaaaaaaaaaagaauu

SEQ ID NO: 32008 - RNA, 1733 nt, Artificial Sequence
  mRNA product Design a-2 (hSL-A64-N5) comprising derived and/or modified sequence from LASV(GA391;Clade III)__CAA36645__GPCmut7 (opt1)
aggagaguccgcucagccagguugcagaagcggcuuagcguguguccuaaucuucucucugcguguagguaggccugugccgcaaacaagcuuaccaugggccagaucgugaccuucuuccaggaggucccccacgugaucgaggaggugaugaacaucguccugaucgcccucagcauccuggccauccugaaggggcucuacaacguggcgaccugcggccugaucgggcuggugacguuccuccugcuguccggccgcagcugcucccucaucuacaaggggaccuacgagcugcagacccuggagcucaacauggagacccugaacaugacgaugccgcugagcugcaccaagaacaacucccaccacuacauccgggucggcaacgagaccggccucgagcugacccugacgaacaccagcauccucaaccacaaguucugcaaccuguccgacgcccacaagcgcaaccuguacgaccacagccucauguccaucaucagcaccuuccaccuguccauccccaacuucaaccaguacgaggccaugagcugcgacuucaacgggggcaagaucaccgugcaguacaaccugucccacagcuucgccguggacgccgcggggcacugcggcacgcucgccaacgggguccugcagaccuucaugcggauggccuggggcggcuccuacaucgcccuggacagcgggcgcggcaacugggacugcaucaugaccuccuaccaguaccucaucauccagaacaccacgugggacgaccacugccaguucagccggcccucccccaucggguaccugggccugcucagccagcgcacccgggacaucuacaucagccgccggcugcugggcaccuucaccuggacgcucuccgacagcgaggggaacgagaccccgggcggguacugccugacccgcuggaugcugaucgaggcggagcucaagugcuucggcaacaccgccguggccaagugcaacgagaagcacgacgaggaguucugcgacaugcugcggcuguucgacuucaacaagcaggccauccgccggcucaagacgcccgcccagauguccauccagcugaucaacaaggcggugaacgcccugaucaacgaccagcucaucaugaagaaccaccuccgcgacaucauggggauccccuacugcaacuacagccgguacugcuaccugaaccacaccuccaccggcaagaccagccugccccgcugcugccugaucuccaacggcagcuaccugaacgagacgaaguucuccgacgacaucgagcagcaggccgacaacaugaucaccgagaugcugcagaaggaguacaucgaccggcaggggaagaccccgcucggccuggucgaccuguucguguucagcaccuccuucuaccucaucagcaucuuccugcaccuggugaagauccccacgcaccgccacaucgucgggaagcccugccccaagccgcaccggcucaaccacaugggcaucugcuccugcgggcuguacaagcagcccggcgugcccgugcgcuggaagcggugaggacuagucccuguucccagagcccacuuuuuuuucuuuuuuugaaauaaaauagccugucuuucagaucucaaaggcucuuuucagagccaccaaaaaaaaaaaaaaaaaaaaaaaaaaaaaaaaaaaaaaaaaaaaaaaaaaaaaaaaaaaaaaaaagaauu

SEQ ID NO: 32009 - RNA, 1736 nt, Artificial Sequence
  mRNA product Design a-2 (hSL-A64-N5) comprising derived and/or modified sequence from LASV(AV;Clade V)__CCA30314__GPCmut7 (opt1)
aggagaguccgcucagccagguugcagaagcggcuuagcguguguccuaaucuucucucugcguguagguaggccugugccgcaaacaagcuuaccaugggccagaucgugaccuucuuccaggaggucccccacgugaucgaggaggugaugaacaucguccugaucgcccucagcauccuggccgugcugaaggggcucuacaacaucgcgaccugcggccugaucgggcugaucacguuccuccugcugugcggccgcuccugcagcuccaaccucuacaaggggguguacgagcugcagagccuggaccucaacauggagacccugaacaugaccaugccgcuguccugcaccaagaacaacagccaccacuacauccgggucggcaacgacacgggccucgagcugacccugaccaacaccuccauccucaaccacaaguucugcaaccugagcgacgcccacaagaaggaccuguacgaccacgcccucauguccaucaucagcacguuccaccuguccauccccaacuucaaccaguacgaggccaugagcugcgacuucaacgggggcaagaucuccgugcaguacaaccugagccacuccuacgccaucgacgcggccaaccacugcgggaccguggccaacggcauccuccagaccuucaugcgcauggccuggggcgggagcuacaucgcgcuggacuccggccgggggaacugggacugcaucaugaccagcuaccaguaccugaucauccagaacacgaccugggagaaccacugccaguucucccgccccagccccaucggcuaccucgggcugcugagccagcggacccgcgacaucuacaucucccggcgccuccugggcaccuucacguggacccugagcgacuccgagggcaacgccacccccgggggcuacugccucacccgguggaugcugaucgaggccgagcugaagugcuucgggaacacggccgucgccaagugcaacgagaagcacgacgaggaguucugcgacaugcuccgccuguucgacuucaacaagcaggcgaucagccggcugaaguccccggcccagaugagcauccagcucaucaacaaggccgugaacgcccugaucaacgaccagcugaucaugaagaaccaccuccgcgacaucaugggcauccccuacugcaacuacuccaaguacugcuaccugaaccacaccaucaccgggaagaccagccugcccaagugcugccucguguccaacggcagcuaccugaacgagacgcacuucuccgacgacaucgagcagcaggccgacaacaugaucaccgagaugcugcagaaggaguacauggagcggcagggcaagaccccgcuggggcucgucgaccuguucguguucagcaccuccuucuaccugaucagcaucuuccuccgccuggugaagauccccacgcaccggcacaucgucggcaagcccugccccaagccgcaccgccugaaccacauggggaucugcuccugcggccucuacaagcagcccggggugcccgugcgguggaagcgcugaggacuagucccuguucccagagcccacuuuuuuuucuuuuuuugaaauaaaauagccugucuuucagaucucaaaggcucuuuucagagccaccaaaaaaaaaaaaaaaaaaaaaaaaaaaaaaaaaaaaaaaaaaaaaaaaaaaaaaaaaaaaaaaaagaauu

SEQ ID NO: 32010 - RNA, 1733 nt, Artificial Sequence
  mRNA product Design a-2 (hSL-A64-N5) comprising derived and/or modified sequence from LASV(Togo/2016/7082;Clade VI)__AMR44577__GPCmut7 (opt1)
aggagaguccgcucagccagguugcagaagcggcuuagcguguguccuaaucuucucucugcguguagguaggccugugccgcaaacaagcuuaccaugggccagaucaucaccuucuuccaggaggugccccacgucaucgaggaggugaugaacaucgugcugaucgcccucagccugcuggccauccucaagggggucuacaacguggcgaccugcggcaucaucgggcuggugacguuccuguuccucugcggccgcuccugcagccugaucuacaagggguccuacgagcugcagacccucgagcugaacauggagacccugaacaugaccaugccgcucagcugcacgaagaacuccagccaccacuacauccgggucggcaacgagaccggccuggagcugacccucaccaacacguccaucaucaaccacaaguucugcaaccugagcgacgcccacaagcgcaaccuguacgaccacgcccucauguccauccugagcaccuuccaccuguccauccccaacuucaaccaguacgaggccaugagcugcgacuucaacgggggcaagaucuccgugcaguacaaccucagccacgccuacgcgguggacgccgccgagcacugcgggaccgucgccaacggcgugcugcagaccuucaugcggauggcguggggcggguccuacaucgcccuggacagcggccgcgggaacugggacugcaucaugacguccuaccaguaccucaucauccagaacaccaccugggaggaccacugccaguucagccggcccucccccaucggcuaccuggggcugcucagccagcgcacccgggacaucuacaucagccgccggcugcugggcacguucaccuggacccucuccgacagcgagggcaacgagacccccgggggcuacugccugacgcgcuggaugcugaucgaggccgagcucaagugcuucgggaacaccgccguggccaagugcaacgagaagcacgacgaggaguucugcgacaugcugcggcuguucgacuucaacaagcaggcgauccagcgccucaaguccccggcccagaugagcauccagcugaucaacaaggccgucaacgcccugaucaacgaccagcucaucaugaagaaccaccuccgggacaugaugggcauccccuacugcaacuacuccaaguacugcuaccugaaccacaccagcuccgggcgcaccagccugcccaagugcugccugguguccaacggcagcuaccugaacgagacgcacuucuccgacgacaucgagcagcaggccgacaacaugaucaccgagaugcuccagaaggaguacaucgaccggcagggcaagaccccgcuggggcugguggaccuguucgucuucagcaccuccuucuaccucaucagcaucuuccugcaccugaucaagauccccacgcaccgccacaucgugggcaagcccugccccaagccgcaccggcucaaccacauggggaucugcuccugcggccuguacaagcagcccggggugcccacccgcuggaagcggugaggacuagucccuguucccagagcccacuuuuuuuucuuuuuuugaaauaaaauagccugucuuucagaucucaaaggcucuuuucagagccaccaaaaaaaaaaaaaaaaaaaaaaaaaaaaaaaaaaaaaaaaaaaaaaaaaaaaaaaaaaaaaaaaagaauu

SEQ ID NO: 32011 - RNA, 1733 nt, Artificial Sequence
  mRNA product Design a-2 (hSL-A64-N5) comprising derived and/or modified sequence from LASV(KAK-428;Clade n.d. (VII))__ANH09740__GPCmut7 (opt1)
aggagaguccgcucagccagguugcagaagcggcuuagcguguguccuaaucuucucucugcguguagguaggccugugccgcaaacaagcuuaccaugggccagaucgugaccuucuuccaggaggucccccacgugaucgaggaggugaugaacaucguccugaucgcccucagccugcuggccauccucaaggggcuguacaacuucgcgaccugcggcgugaucgggcugaucacguuccuccugcugugcggccgcuccugcagcgccaccuacaaggggcaguacgagcuccagacccuggagcugaacauggagucccucaacaugaccaugccgcugagcugcacgaagaacaacucccaccacuacauccgggccggcaacaacaccggccuggagcucacccugaccaacacgagcaucaucucccacaaguucugcaaccugagcgacgcccacaagaagaaccucuacgaccacacccugauguccaucaucaccaccuuccaccugagcauccccaacuucaaccaguacgaggccauguccugcgacuucaacgggggcaagaucagcauccaguacaaccucucccacagcuacgcgggggacgccgcccagcacugcggcacgguggccaacgggguccugcagaccuucaugcgcauggcguggggcggcuccuaccuggcccucgacagcgggcggcgcggcugggacugcaucaucuccagcuaccaguaccugaucauccagaacaccaccugggacgaccacugccaguucucccggcccagccccaucggguaccugggcuucgugagccagaagacgcgcgacaucuacaucucccggcgccuccugggcaccuucaccuggacccugagcgacuccgaggggcacgacaugccgggcggguacugccucacgcgguggaugcugaucgaggccgaccugaagugcuucggcaacaccgccguggccaagugcaacgagaagcacgacgaggaguucugcgacauguggcgccucuucgacuucaacaagcaggcgauccagcggcugaaggcccccgcccagaugaacauccagcugaucaacaaggccgucaacgcccucaucaacgaccagcugaugaugaagaaccaccuccgcgacaucauggggauccccuacugcaacuacagcaaguucugcuaccugaacaacaccaccacgggccggaccucccugccccgcugcugccugaucagcaacggcuccuaccucaacgagacccacuucagcgacgacaucgagcagcaggcggacaacaugaucaccgagaugcugcagaaggaguacauggaccggcaggggaagacgccgcugggccucguggaccuguucguguucuccaccagcuucuaccugaucaccaucuuccugcaccucgucaagauccccacccaccgccacaucguggggaagcccugccccaagccgcaccggcugaaccacaugggcaucugcuccugcgggcuguacaagcagcccggcgugcccguccgcuggaagcggugaggacuagucccuguucccagagcccacuuuuuuuucuuuuuuugaaauaaaauagccugucuuucagaucucaaaggcucuuuucagagccaccaaaaaaaaaaaaaaaaaaaaaaaaaaaaaaaaaaaaaaaaaaaaaaaaaaaaaaaaaaaaaaaaagaauu

SEQ ID NO: 32012 - RNA, 1733 nt, Artificial Sequence; identical to SEQ ID NO: 32006
  mRNA product Design a-2 (hSL-A64-N5) comprising derived and/or modified sequence from LASV(Pinneo-NIG-1969;Clade I)__AIT17836__GPCmut7 (opt1)

SEQ ID NO: 32013 - RNA, 1733 nt, Artificial Sequence
  mRNA product Design a-2 (hSL-A64-N5) comprising derived and/or modified sequence from LASV(ISTH0009-NIG-2011;Clade II)__AIT17404__GPCmut7 (opt1)
aggagaguccgcucagccagguugcagaagcggcuuagcguguguccuaaucuucucucugcguguagguaggccugugccgcaaacaagcuuaccaugggccagaucaucaccuucuuccaggaggugccccacgucaucgaggaggugaugaacaucgugcugaucgcccucagccugcuggccauccucaaggggaucuacaacgucgcgaccugcggccuguucgggcugguguccuuccuccugcugugcggccgcagcugcuccacgaccuacaaggggguguacgagcuccagacccuggagcuggacauggccagccucaacaugaccaugccgcuguccugcacgaagaacaacagccaccacuacaucauggucggcaacgagaccggccuggagcucacccugaccaacacguccaucaucaaccacaaguucugcaaccugagcgacgcccacaagaagaaccucuacgaccacgcccugauguccaucaucagcaccuuccaccuguccauccccaacuucaaccaguacgaggccaugagcugcgacuucaacgggggcaagaucuccgugcaguacaaccucagccacgcguacgccguggacgccgccaaccacugcgggaccaucgcgaacggcguccugcagaccuucaugcggauggccuggggcggguccuacaucgcccuggacagcggcaagggguccugggacugcaucaugacgagcuaccaguaccucaucauccagaacaccaccugggaggaccacugccaguucucccgccccagccccaucggcuaccuggggcugcucagccagcggacccgcgacaucuacaucucccggcgccugcugggcacguucaccuggacccucagcgacuccgagggcaacgagacccccgggggcuacugccugacgcgguggaugcugaucgaggccgagcucaagugcuucgggaacaccgccguggcgaagugcaacgagaagcacgacgaggaguucugcgacaugcugcgccuguucgacuucaacaagcaggccauccggcgccucaagaccccggcccagaugagcauccagcugaucaacaaggccgugaacgcccugaucaacgaccagcucaucaugaagaaccaccuccgggacaucaugggcauccccuacugcaacuacuccaaguacugcuaccugaaccacaccgucacggggaagaccagccugccccgcugcugccugguguccaacggcagcuaccugaacgagacccacuucuccgacgacaucgagcagcaggcggacaacaugaucaccgagcuccugcagaaggaguacauggaccggcagggcaagacgccgcuggggcugguggaccucuucgucuucagcaccuccuucuaccugaucagcaucuuccugcaccucaucaagauccccacccaccgccacaucaccggcaagcccugccccaagccgcaccggcugaaccacauggggaucugcuccugcggccuguacaagcaccccggggugcccgugaaguggaagcgcugaggacuagucccuguucccagagcccacuuuuuuuucuuuuuuugaaauaaaauagccugucuuucagaucucaaaggcucuuuucagagccaccaaaaaaaaaaaaaaaaaaaaaaaaaaaaaaaaaaaaaaaaaaaaaaaaaaaaaaaaaaaaaaaaagaauu

SEQ ID NO: 32014 - RNA, 1733 nt, Artificial Sequence
  mRNA product Design a-2 (hSL-A64-N5) comprising derived and/or modified sequence from LASV(ISTH2010-NIG-2012;Clade II)__AIT17482__GPCmut7 (opt1)
aggagaguccgcucagccagguugcagaagcggcuuagcguguguccuaaucuucucucugcguguagguaggccugugccgcaaacaagcuuaccaugggccagaucaucaccuucuuccaggaggugccccacgucaucgaggaggugaugaacaucgugcugaucgcccucagccugcuggccauccucaaggggaucuacaacgucgcgaccugcggccuguucgggcugguguccuuccuccugcugugcggccgcagcugcuccacgaccuacaaggggguguacgagcuccagacccuggagcuggacauggccagccucaacaugaccaugccgcuguccugcacgaagaacaacagccaccacuacaucauggucggcaacgagaccggccuggagcucacccugaccaacacguccaucaucaaccacaaguucugcaaccugagcgacgcccacaagaagaaccucuacgaccacgcccugauguccaucaucagcaccuuccaccuguccauccccaacuucaaccaguacgaggccaugagcugcgacuucaacgggggcaagaucuccgugcaguacaaccucagccacgcguacgccguggacgccgccaaccacugcgggaccaucgcgaacggcguccugcagaccuucaugcggauggccuggggcggguccuacaucgcccuggacagcggcaagggguccugggacugcaucaugacgagcuaccaguaccucaucauccagaacaucaccugggaggaccacugccaguucucccgccccagccccaucggcuaccuggggcugcucagccagcggacccgcgacaucuacaucucccggcgccugcugggcaccuucacguggacccucagcgacuccgagggcaacgagacccccgggggcuacugccugacccgguggaugcugaucgaggccgagcucaagugcuucgggaacacggccguggcgaagugcaacgagaagcacgacgaggaguucugcgacaugcugcgccuguucgacuucaacaagcaggccauccggcgccucaagaccccggcccagaugagcauccagcugaucaacaaggccgugaacgcccugaucaacgaccagcucaucaugaagaaccaccuccgggacaucaugggcauccccuacugcaacuacuccaaguacugcuaccugaaccacaccgucaccgggaagacgagccugccccgcugcugccugguguccaacggcagcuaccugaacgagacccacuucuccgacgacaucgagcagcaggcggacaacaugaucaccgagcuccugcagaaggaguacaucgaccggcagggcaagaccccgcuggggcugguggaccucuucgucuucagcacguccuucuaccugaucagcaucuuccugcaccucgugaagauccccacccaccgccacguggucggcaagcccugccccaagccgcaccggcugaaccacauggggaucugcuccugcggccuguacaagcaccccggggugcccgugaaguggaagcgcugaggacuagucccuguucccagagcccacuuuuuuuucuuuuuuugaaauaaaauagccugucuuucagaucucaaaggcucuuuucagagccaccaaaaaaaaaaaaaaaaaaaaaaaaaaaaaaaaaaaaaaaaaaaaaaaaaaaaaaaaaaaaaaaaagaauu

SEQ ID NO: 32015 - RNA, 1733 nt, Artificial Sequence
  mRNA product Design a-2 (hSL-A64-N5) comprising derived and/or modified sequence from LASV(Lassa virus/H.sapiens-wt/NGA/2015/ISTH_0543;Clade II)__AVO03639__GPCmut7 (opt1)
aggagaguccgcucagccagguugcagaagcggcuuagcguguguccuaaucuucucucugcguguagguaggccugugccgcaaacaagcuuaccaugggccagaucaucaccuucuuccaggaggugccccacgucaucgaggaggugaugaacaucgugcugaucgcccucagccugcuggccauccucaaggggaucuacaacgucgcgaccugcggccuguucgggcugguguccuuccuccugcugugcggccgcagcugcuccacgaccuacaaggggguguacgagcuccagacccuggagcuggacauggccaaccucaacaugaccaugccgcugagcugcacgaagaacaacucccaccacuacaucauggucggcaacgagaccggccuggagcucacccugaccaacacgagcaucaucaaccacaaguucugcaaccuguccgacgcccacaagaagaaccucuacgaccacgcccugaugagcaucaucuccaccuuccaccugagcauccccaacuucaaccaguacgaggccauguccugcgacuucaacgggggcaagaucagcgugcaguacaaccucucccacaccuacgcgguggacgccgccaaccacugcgggaccaucgccaacggcguccugcagacguucaugcggauggcguggggcgggagcuacaucgcccuggacuccggcaaggggagcugggacugcaucaugaccuccuaccaguaccucgugauccagaacaccaccugggaggaccacugccaguucagccgccccucccccaucggcuaccuggggcugcucagccagcggacgcgcgacaucuacaucagccggcgccugcugggcaccuucaccuggacccucuccgacagcgagggcaacgagacgcccgggggcuacugccugacccgguggaugcugaucgaggccgagcucaagugcuucgggaacaccgccguggccaagugcaacgagaagcacgacgaggaguucugcgacaugcugcgccuguucgacuucaacaagcaggcgauccggcgccucaagaccccggcccagauguccauccagcugaucaacaaggccgucaacgcccugaucaacgaccagcucaucaugaagaaccaccuccgggacaucaugggcauccccuacugcaacuacagcaaguacugcuaccugaaccacacggugaccgggaagaccucccugccccgcugcugccuggugagcaacggcuccuaccugaacgagacccacuucagcgacgacaucgagcagcaggccgacaacaugaucacggagcuccugcagaaggaguacaucgaccggcagggcaagaccccgcuggggcuggucgaccucuucguguucuccaccagcuucuaccugaucuccaucuuccugcaccucgugaagauccccacccaccgccacaucacgggcaagcccugccccaagccgcaccggcugaaccacauggggaucugcagcugcggccuguacaagcaccccgggguccccgugaaguggaagcgcugaggacuagucccuguucccagagcccacuuuuuuuucuuuuuuugaaauaaaauagccugucuuucagaucucaaaggcucuuuucagagccaccaaaaaaaaaaaaaaaaaaaaaaaaaaaaaaaaaaaaaaaaaaaaaaaaaaaaaaaaaaaaaaaaagaauu

SEQ ID NO: 32016 - RNA, 1733 nt, Artificial Sequence
  mRNA product Design a-2 (hSL-A64-N5) comprising derived and/or modified sequence from LASV(Lassa virus/H.sapiens-wt/NGA/2016/ISTH_0009;Clade II)__AVO03571__GPCmut7 (opt1)
aggagaguccgcucagccagguugcagaagcggcuuagcguguguccuaaucuucucucugcguguagguaggccugugccgcaaacaagcuuaccaugggccagaucaucaccuucuuccaggaggugccccacgucaucgaggaggugaugaacaucgugcugaucgcccucagccugcuggccauccucaaggggaucuacaacgucgcgaccugcggccugcuggggcucguguccuuccugcugcucugcggccgcagcugcuccacgaccuacaaggggguguacgagcugcagacccuggagcucgacauggccagccugaacaugaccaugccgcuguccugcacgaagaacaacagccaccacuacaucauggucggcaacgagaccggccucgagcugacccugaccaacacguccaucaucaaccacaaguucugcaaccucagcgacgcccacaagaagaaccuguacgaccacgcccugauguccaucaucagcaccuuccaccucuccauccccaacuucaaccaguacgaggccaugagcugcgacuucaacgggggccggaucuccgugcaguacaaccugagccacuccuacgcgguggacgccgccaaccacugcgggaccaucgccaacggcguccugcagaccuucaugcgcauggcguggggcgggagcuacaucgcccucgacuccggcaaggggagcugggacugcaucaugacguccuaccaguaccugaucauccagaacaccaccugggaggaccacugccaguucagccggcccagccccaucggcuaccuggggcuccugucccagcgcacccgggacaucuacaucagccgccggcugcucggcacguucaccuggacccuguccgacagcgagggcaacgagacccccgggggcuacugccugacgcgcuggaugcucaucgaggccgagcugaagugcuucgggaacaccgccguggccaagugcaacgagaagcacgacgaggaguucugcgacaugcugcggcuguucgacuucaacaagcaggcgauccgccggcugaagaccccggcccagauguccauccagcugaucaacaaggccgugaacgcccucaucaacgaccagcugaucaugaagaaccaccuccgcgacaucaugggcauccccuacugcaacuacagcaaguacugcuaccucaaccacaccgucacggggaagaccucccugccccggugcugccuggugagcaacggcuccuaccucaacgagacccacuucagcgacgacaucgagcagcaggccgacaacaugaucaccgagcugcugcagaaggaguacaucgaccgccagggcaagacgccgcuggggcucguggaccuguucgucuucuccaccagcuucuaccugaucuccaucuuccuccaccuggugaagauccccacccaccggcacaucaccggcaagcccugccccaagccgcaccgccugaaccacauggggaucugcagcugcggccucuacaaccaccccggggugcccgucaaguggaagcggugaggacuagucccuguucccagagcccacuuuuuuuucuuuuuuugaaauaaaauagccugucuuucagaucucaaaggcucuuuucagagccaccaaaaaaaaaaaaaaaaaaaaaaaaaaaaaaaaaaaaaaaaaaaaaaaaaaaaaaaaaaaaaaaaagaauu

SEQ ID NO: 32017 - RNA, 1733 nt, Artificial Sequence
  mRNA product Design a-2 (hSL-A64-N5) comprising derived and/or modified sequence from LASV(Lassa virus/H.sapiens-wt/NGA/2016/ISTH_0017;Clade II)__AVO03567__GPCmut7 (opt1)
aggagaguccgcucagccagguugcagaagcggcuuagcguguguccuaaucuucucucugcguguagguaggccugugccgcaaacaagcuuaccaugggccagaucaucaccuucuuccaggaggugccccacgucaucgaggaggugaugaacaucgugcugaucgcccucagccugcuggccauccucaaggggaucuacaacgucgcgaccugcggccuguucgggcugguguccuuccuccugcugugcggccgcagcugcuccacgaccuacaaggggguguacgagcuccagacccuggagcuggacauggccagccucaacaugaccaugccgcuguccugcacgaagaacaacagccaccacuacaucauggucggcaacgagaccggccuggagcucacccugaccaacacguccaucaucaaccacaaguucugcaaccugagcgacgcccacaagaagaaccucuacgaccacgcccugauguccaucaucagcaccuuccaccuguccauccccaacuucaaccaguacgaggccaugagcugcgacuucaacgggggcaagaucuccgugcaguacaaccucagccacaccuacgcgaucgacgccgccaaccacugcgggaccaucgccaacggcgugcugcagacguucaugcggauggcguggggcggguccuacaucgcccuggacagcggcaagggguccugggacugcaucaugaccagcuaccaguaccucaucauccagaacaccaccugggaggaccacugccaguucucccgccccagccccaucggcuaccuggggcugcucagccagcggacgcgcgacaucuacaucucccggcgccugcugggcaccuucaccuggacccucagcgacuccgagggcaacgagacgcccgggggcuacugccugacccgguggaugcugaucgaggccgagcucaagugcuucgggaacaccgccgucgccaagugcaacgagaagcacgacgaggaguucugcgacaugcugcgccuguucgacuucaacaagcaggcgauccggcgccucaagaccccggcccagaugagcauccagcugaucaacaaggccgugaacgcccugaucaacgaccagcucaucaugaagaaccaccuccgggacaucaugggcauccccuacugcaacuacuccaaguacugcuaccugaaccacacggugaccgggaagaccagccugccccgcugcugccuggucuccaacggcagcuaccugaacgagacccacuucuccgacgacaucgagcagcaggccgacaacaugaucacggagcuccugcagaaggaguacauggaccggcagggcaagaccccgcuggggcugguggaccucuucguguucagcaccuccuucuaccugaucagcaucuuccugcaccucguccgcauccccacccaccggcacgugaucggcaagcccugccccaagccgcaccgccugaaccacauggggaucugcuccugcggccuguacaagcaccccggggugcccgucaaguggaagcggugaggacuagucccuguucccagagcccacuuuuuuuucuuuuuuugaaauaaaauagccugucuuucagaucucaaaggcucuuuucagagccaccaaaaaaaaaaaaaaaaaaaaaaaaaaaaaaaaaaaaaaaaaaaaaaaaaaaaaaaaaaaaaaaaagaauu

SEQ ID NO: 32018 - RNA, 1733 nt, Artificial Sequence
  mRNA product Design a-2 (hSL-A64-N5) comprising derived and/or modified sequence from LASV(Lassa virus/H.sapiens-wt/NGA/2018/ISTH_0959;Clade II)__AVV65099__GPCmut7 (opt1)
aggagaguccgcucagccagguugcagaagcggcuuagcguguguccuaaucuucucucugcguguagguaggccugugccgcaaacaagcuuaccaugggccagaucaucaccuucuuccaggaggugccccacgucaucgaggaggugaugaacaucgugcugaucgcccucagccugcuggccauccucaaggggaucuacaacgucgugaccugcggccuguucgggcugguguccuuccuccugcugugcggccgcagcugcuccacgaccuacaagggggucuacgagcuccagacccuggagcuggacauggcgagccucaacaugaccaugccgcuguccugcacgaagaacaacagccaccacuacaucauggugggcaacgagaccggccuggagcucacccugaccaacacguccaucaucaaccacaaguucugcaaccugagcgacgcccacaagaagaaccucuacgaccacgcccugauguccaucaucagcaccuuccaccuguccauccccaacuucaaccaguacgaggccaugagcugcgacuucaacgggggcaagaucuccgugcaguacaaccucagccacgccuacgcgaucgacgccgccaaccacugcgggaccaucgccaacggcguccugcagaccuucaugcggauggcguggggcggguccuacaucgcccuggacagcggcaagggguccugggacugcaucaugacgagcuaccaguaccucaucauccagaacaccaccugggaggaccacugccaguucucccgccccagccccaucggcuaccuggggcugcucagccagcggacccgcgacaucuacaucucccggcgccugcugggcacguucaccuggacccucagcgacuccgagggcaacgagacccccgggggcuacugccugacgcgguggaugcugaucgaggccgagcucaagugcuucgggaacaccgccguggccaagugcaacgagaagcacgacgaggaguucugcgacaugcugcgccuguucgacuucaacaagcaggcgauccggcgccucaagaccccggcccagaugagcauccagcugaucaacaaggccgugaacgcccugaucaacgaccagcucaucaugaagaaccaccuccgggacaucaugggcauccccuacugcaacuacuccaaguacugcuaccugaaccacaccgucacggggaagaccagccugccccgcugcugccugguguccaacggcagcuaccugaacgagacccacuucuccgacgacaucgagcagcaggccgacaacaugaucaccgagcuccugcagaaggaguacaucgaccggcagggcaagacgccgcuggggcugguggaccucuucgucuucagcaccuccuucuaccugaucagcaucuuccugcaccucgugaagauccccacccaccgccacgugaucggcaagcccugccccaagccgcaccggcugaaccacauggggaucugcuccugcggccuguacaagcaccccgggguccccgugaaguggaagcgcugaggacuagucccuguucccagagcccacuuuuuuuucuuuuuuugaaauaaaauagccugucuuucagaucucaaaggcucuuuucagagccaccaaaaaaaaaaaaaaaaaaaaaaaaaaaaaaaaaaaaaaaaaaaaaaaaaaaaaaaaaaaaaaaaagaauu

SEQ ID NO: 32019 - RNA, 1733 nt, Artificial Sequence
  mRNA product Design a-2 (hSL-A64-N5) comprising derived and/or modified sequence from LASV(LASV003-NIG-2008;Clade II)__AIT17580__GPCmut7 (opt1)
aggagaguccgcucagccagguugcagaagcggcuuagcguguguccuaaucuucucucugcguguagguaggccugugccgcaaacaagcuuaccaugggccagaucaucaccuucuuccaggaggugccccacgucaucgaggaggugaugaacaucgugcugaucgcccucagccugcuggccauccucaaggggaucuacaacgucgcgaccugcggccuguucgggcugguguccuuccuccugcugugcggccgcagcugcuccacgaccuacaaggggguguacgagcuccagacccuggagcuggacauggccagccucaacaugaccaugccgcuguccugcacgaagaacaacagccaccacuacaucauggucggcaacgagaccggccuggagcucacccugaccaacacguccaucaucaaccacaaguucugcaaccugagcgacgcccacaagaagaaccucuacgaccacgcccugauguccaucaucagcaccuuccaccuguccauccccaacuucaaccaguacgaggccaugagcugcgacuucaacgggggcaagaucuccgugcaguacaaccucagccacaccuacgcgguggacgccgccaaccacugcgggaccaucgccaacggcguccugcagacguucaugcggauggcguggggcggguccuacaucgcccuggacagcggcaagggguccugggacugcaucaugaccagcuaccaguaccucaucauccagaacaccaccugggaggaccacugccaguucucccgccccagccccaucggcuaccuggggcugcucagccagcggacgcgcgacaucuacaucucccggcgccugcugggcaccuucaccuggacccucagcgacuccgagagcaacgagacgccgggcggguacugccugacccgguggaugcugaucgaggccgagcucaagugcuucggcaacaccgccguggccaagugcaacgagaagcacgacgaggaguucugcgacaugcugcgccuguucgacuucaacaagcaggcgauccggcgccucaaggcccccgcccagauguccauccagcugaucaacaaggccgugaacgcccugaucaacgaccagcucaucaugaagaaccaccuccgggacaucauggggauccccuacugcaacuacagcaaguacugcuaccugaaccacaccgucacgggccgcaccucccugccccggugcugccuggugagcaacggguccuaccugaacgagacccacuucagcgacgacaucgagcagcaggcggacaacaugaucaccgagcuccugcagaaggaguacauggaccgccagggcaagacgccgcugggccugguggaccucuucgucuucuccaccagcuucuaccugaucuccaucuuccugcaccucgugaagauccccacccaccggcacgugaucgggaagcccugccccaagccgcaccgccugaaccacaugggcaucugcagcugcgggcuguacaagcaccccggcguccccgugaaguggaagcggugaggacuagucccuguucccagagcccacuuuuuuuucuuuuuuugaaauaaaauagccugucuuucagaucucaaaggcucuuuucagagccaccaaaaaaaaaaaaaaaaaaaaaaaaaaaaaaaaaaaaaaaaaaaaaaaaaaaaaaaaaaaaaaaaagaauu

SEQ ID NO: 32020 - RNA, 1733 nt, Artificial Sequence
  mRNA product Design a-2 (hSL-A64-N5) comprising derived and/or modified sequence from LASV(LASV035-NIG-2009;Clade II)__AIT17588__GPCmut7 (opt1)
aggagaguccgcucagccagguugcagaagcggcuuagcguguguccuaaucuucucucugcguguagguaggccugugccgcaaacaagcuuaccaugggccagaucaucaccuucuuccaggaggugccccacgucaucgaggaggugaugaacaucgugcugaucgcccucagccugcuggccauccucaaggggaucuacaacgucgcgaccugcggccuguucgggcugguguccuuccuccugcugugcggccgcagcugcuccacgaccuacaaggggguguacgagcuccagacccuggagcuggacauggccagccucaacaugaccaugccgcuguccugcacgaagaacaacagccaccacuacaucauggucggcaacgagaccggccuggagcucacccugaccaacacguccaucaucaaccacaaguucugcaaccugagcgacgcccacaagaagaaccucuacgaccacgcccugauguccaucaucagcaccuuccaccuguccauccccaacuucaaccaguacgaggccaugagcugcgacuucaacgggggcaagaucuccgugcaguacaaccucagccacgcguacgccguggacgccgccaaccacugcgggaccaucgcgaacggcguccugcagaccuucaugcggauggccuggggcggguccuacaucgcccuggacagcggcaagggguccugggacugcaucaugacgagcuaccaguaccucaucauccagaacaccaccugggaggaccacugccaguucucccgccccagccccaucggcuaccuggggcugcucagccagcggacccgcgacaucuacaucucccggcgccugcugggcacguucaccuggacccucagcgacuccgagggcaacgagacccccgggggcuacugccugacgcgguggaugcugaucgaggccgagcucaagugcuucgggaacaccgccguggcgaagugcaacgagaagcacgacgaggaguucugcgacaugcugcgccuguucgacuucaacaagcaggccauccggcgccucaaggccccggcccagaugagcauccagcugaucaacaaggccgugaacgcgcugaucaacgaccagcucaucaugaagaaccaccuccgggacaucaugggcauccccuacugcaacuacuccaaguacugcuaccugaaccacaccgucaccgggaagacgagccugccccgcugcugccugguguccaacggcagcuaccugaacgagacccacuucuccgacgacaucgagcagcaggccgacaacaugaucaccgagcuccugcagaaggaguacaucgaccggcagggcaagaccccgcuggggcugguggaccucuucgucuucagcacguccuucuaccugaucagcaucuuccugcaccucgugaagauccccacccaccgccacgugaucggcaagcccugccccaagccgcaccggcugaaccacauggggaucugcuccugcggccuguacaagcaccccgggguccccgugaaguggaagcgcugaggacuagucccuguucccagagcccacuuuuuuuucuuuuuuugaaauaaaauagccugucuuucagaucucaaaggcucuuuucagagccaccaaaaaaaaaaaaaaaaaaaaaaaaaaaaaaaaaaaaaaaaaaaaaaaaaaaaaaaaaaaaaaaaagaauu

SEQ ID NO: 32021 - RNA, 1733 nt, Artificial Sequence
  mRNA product Design a-2 (hSL-A64-N5) comprising derived and/or modified sequence from LASV(LASV1000-NIG-2009;Clade II)__AIT17782__GPCmut7 (opt1)
aggagaguccgcucagccagguugcagaagcggcuuagcguguguccuaaucuucucucugcguguagguaggccugugccgcaaacaagcuuaccaugggccagaucaucaccuucuuccaggaggugccccacgucaucgaggaggugaugaacaucgugcugaucgcccucagccugcuggccauccucaaggggaucuacaacgucgcgaccugcggccuguucgggcugguguccuuccuccugcugugcggccgcagcugcuccacgaccuacaaggggguguacgagcuccagacccuggagcuggacauggccagccucaacaugaccaugccgcuguccugcacgaagaacaacagccaccacuacaucauggucggcaacgagaccggccuggagcucacccugaccaacacguccaucaucaaccacaaguucugcaaccugagcgacgcccacaagaagaaccucuacgaccacgcccugauguccaucaucagcaccuuccaccuguccauccccaacuucaaccaguacgaggccaugagcugcgacuucaacgggggcaagaucuccgugcaguacaaccucagccacaccuacgcgguggacgccgccaaccacugcgggaccaucgccaacggcguccugcagacguucaugcggauggcguggggcggguccuacaucgcccuggacagcggcaagggguccugggacugcaucaugaccagcuaccaguaccucaucauccagaacaccaccugggaggaccacugccaguucucccgccccagccccaucggcuaccuggggcugcucagccagcggacgcgcgacaucuacaucucccggcgccugcugggcaccuucaccuggacccucagcgacuccgagggcaacgagacgcccgggggcuacugccugacccgguggaugcugaucgaggccgagcucaagugcuucgggaacaccgccguggccaagugcaacgagaagcacgacgaggaguucugcgacaugcugcgccuguucgacuucaacaagcaggcgaucaagcggcucaagaccccggcccagaugagcauccagcugaucaacaaggccgugaacgcccugaucaacgaccagcucaucaugaagaaccaccuccgcgacaucaugggcauccccuacugcaacuacuccaaguacugcuaccugaaccacacggucaccgggaagaccagccugccccggugcugccugguguccaacggcagcuaccugaacgagacccacuucuccgacgacaucgagcagcaggccgacaacaugaucacggagcuccugcagaaggaguacaucgaccgccagggcaagaccccgcuggggcugguggaccucuucgucuucagcaccuccuucuaccugaucagcaucuuccugcaccucgugaagauccccacccaccggcacguggucggcaagcccugccccaagccgcaccgccugaaccacauggggaucugcuccugcggccuguacaagcaccccggggugcccgugaaguggaagcggugaggacuagucccuguucccagagcccacuuuuuuuucuuuuuuugaaauaaaauagccugucuuucagaucucaaaggcucuuuucagagccaccaaaaaaaaaaaaaaaaaaaaaaaaaaaaaaaaaaaaaaaaaaaaaaaaaaaaaaaaaaaaaaaaagaauu

SEQ ID NO: 32022 - RNA, 1733 nt, Artificial Sequence
  mRNA product Design a-2 (hSL-A64-N5) comprising derived and/or modified sequence from LASV(LASV221-NIG-2010;Clade II)__AIT17624__GPCmut7 (opt1)
aggagaguccgcucagccagguugcagaagcggcuuagcguguguccuaaucuucucucugcguguagguaggccugugccgcaaacaagcuuaccaugggccagaucaucaccuucuuccaggaggugccccacgucaucgaggaggugaugaacaucgugcugaucgcccucagccugcuggccauccucaaggggaucuacaacgucgcgaccugcggccuguucgggcugguguccuuccuccugcugugcggccgcagcugcuccacgaccuacaaggggguguacgagcuccagacccuggagcuggacauggccagccucaacaugaccaugccgcuguccugcacgaagaacaacagccaccacuacaucauggucggcaacgagaccggccuggagcucacccugaccaacacguccaucaucaaccacaaguucugcaaccugagcgacgcccacaagaagaaccucuacgaccacgcccugauguccaucaucagcaccuuccaccuguccauccccaacuucaaccaguacgaggccaugagcugcgacuucaacgggggcaagaucuccgugcaguacaaccucagccacaccuacgcgaucgacgccgccaaccacugcgggaccaucgccaacggcgugcugcagacguucaugcggauggcguggggcggguccuacaucgcccuggacagcggcaagggguccugggacugcaucaugaccagcuaccaguaccucaucauccagaacaccaccugggaggaccacugccaguucucccgccccagccccaucggcuaccuggggcugcucagccagcggacgcgcgacaucuacaucucccggcgccugcugggcaccuucaccuggacccucagcgacuccgagggcaacgagacgcccgggggcuacugccugacccgguggaugcugaucgaggccgagcucaagugcuucgggaacaccgccgucgccaagugcaacgagaagcacgacgaggaguucugcgacaugcugcgccuguucgacuucaacaagcaggcgauccggcgccucaagaccccggcccagaugagcauccagcugaucaacaaggccgugaacgcccugaucaacgaccagcucaucaugaagaaccaccuccgggacaucaugggcauccccuacugcaacuacuccaaguacugcuaccugaaccacacggugaccgggaagaccagccugccccgcugcugccuggucuccaacggcagcuaccugaacgagacccacuucuccgacgacaucgagcagcaggccgacaacaugaucacggagaugcuccagaaggaguacauggaccggcagggcaagaccccgcuggggcugguggaccuguucguguucagcaccuccuucuaccucaucagcaucuuccugcaccuggucaagauccccacccaccgccacgugaucggcaagcccugccccaagccgcaccggcucaaccacauggggaucugcuccugcggccuguacaagcaccccggggugcccgucaaguggaagcgcugaggacuagucccuguucccagagcccacuuuuuuuucuuuuuuugaaauaaaauagccugucuuucagaucucaaaggcucuuuucagagccaccaaaaaaaaaaaaaaaaaaaaaaaaaaaaaaaaaaaaaaaaaaaaaaaaaaaaaaaaaaaaaaaaagaauu

SEQ ID NO: 32023 - RNA, 1733 nt, Artificial Sequence
  mRNA product Design a-2 (hSL-A64-N5) comprising derived and/or modified sequence from LASV(LASV237-NIG-2010;Clade II)__AIT17638__GPCmut7 (opt1)
aggagaguccgcucagccagguugcagaagcggcuuagcguguguccuaaucuucucucugcguguagguaggccugugccgcaaacaagcuuaccaugggccagaucaucaccuucuuccaggaggugccccacgucaucgaggaggugaugaacaucgugcugaucgcccucagccugcuggccauccucaaggggaucuacaacgucgcgaccugcggccuguucgggcugguguccuuccuccugcugugcggccgcagcugcuccacgaccuacaaggggguguacgagcuccagacccuggagcuggacauggccagccucaacaugaccaugccgcuguccugcacgaagaacaacagccaccacuacaucauggucggcaacgagaccggccuggagcucacccugaccaacacguccaucaucaaccacaaguucugcaaccugagcgacgcccacaagaaggaccucuacgaccacgcccugauguccaucaucagcaccuuccaccuguccauccccaacuucaaccaguacgaggccaugagcugcgacuucaacgggggcaagaucuccgugcaguacaaccucagccacaccuacgcgguggacgccgccaaccacugcgggaccaucgccaacggcguccugcagacguucaugcggauggcguggggcggguccuacaucgcccuggacagcggcaagggguccugggacugcaucaugaccagcuaccaguaccucaucauccagaacaccaccugggaggaccacugccaguucucccgccccagccccaucggcuaccuggggcugcucagccagcggacgcgcgacaucuacaucucccggcgccugcugggcaccuucaccuggacccucagcgacuccgagggcaacgagacgcccgggggcuacugccugacccgguggaugcugaucgaggccgagcucaagugcuucgggaacaccgccguggccaagugcaacgagaagcacgacgaggaguucugcgacaugcugcgccuguucgacuucaacaagcaggcgauccggcgccucaagaccccggcccagaugagcauccagcugaucaacaaggccgugaacgcccugaucaacgaccagcucaucaugaagaaccaccuccgggacaucaugggcauccccuacugcaacuacuccaaguacugcuaccugaaccacacggucaccgggaagaccagccugccccgcugcugccugguguccaacggcagcuaccugaacgagacccacuucuccgacgacaucgagcagcaggccgacaacaugaucacggagcuccugcagaaggaguacauggaccggcagggcaagaccccgcuggggcugguggaccucuucgucuucagcaccuccuucuaccugaucagcaucuuccugcaccucaucaagauccccacccaccgccacaucacgggcaagcccugccccaagccgcaccggcugaaccacauggggaucugcuccugcggccuguacaagcaccccggggugcccgugaaguggaagcgcugaggacuagucccuguucccagagcccacuuuuuuuucuuuuuuugaaauaaaauagccugucuuucagaucucaaaggcucuuuucagagccaccaaaaaaaaaaaaaaaaaaaaaaaaaaaaaaaaaaaaaaaaaaaaaaaaaaaaaaaaaaaaaaaaagaauu

SEQ ID NO: 32024 - RNA, 1733 nt, Artificial Sequence
  mRNA product Design a-2 (hSL-A64-N5) comprising derived and/or modified sequence from LASV(LASV253-NIG-2011;Clade II)__AIT17670__GPCmut7 (opt1)
aggagaguccgcucagccagguugcagaagcggcuuagcguguguccuaaucuucucucugcguguagguaggccugugccgcaaacaagcuuaccaugggccagaucaucaccuucuuccaggaggugccccacgucaucgaggaggugaugaacaucgugcugaucgcccucagccugcuggccauccucaaggggaucuacaacgucgcgaccugcggccuguucgggcugguguccuuccuccugcugugcggccgcagcugcuccacgaccuacaaggggguguacgagcuccagacccuggagcuggacauggccagccucaacaugaccaugccgcuguccugcacgaagaacaacagccaccacuacaucauggucggcaacgagaccggccuggagcucacccugaccaacacguccaucaucaaccacaaguucugcaaccugagcgacgcccacaagaagaaccucuacgaccacgcccugauguccaucaucagcaccuuccaccuguccauccccaacuucaaccaguacgaggccaugagcugcgacuucaacgggggcaagaucuccgugcaguacaaccucagccacaccuacgcgguggacgccgccaaccacugcgggaccaucgccaacggcguccugcagacguucaugcggauggcguggggcggguccuacaucgcccuggacagcggcaagggguccugggacugcaucaugaccagcuaccaguaccucaucauccagaacaccaccugggaggaccacugccaguucucccgccccagccccaucggcuaccuggggcugcucagccagcggacgcgcgacaucuacaucucccggcgccugcugggcaccuucaccuggacccucagcgacuccgagggcaacgagacgcccgggggcuacugccugacccgguggaugcugaucgaggccgagcucaagugcuucgggaacaccgccguggccaagugcaacgagaagcacgacgaggaguucugcgacaugcugcgccuguucgacuucaacaagcaggcgauccggcgccucaaggccccggcccagaugagcauccagcugaucaacaaggccgugaacgcccugaucaacgaccagcucaucaugaagaaccaccuccgggacaucaugggcauccccuacugcaacuacuccaaguacugcuaccugaaccacaccgucacggggcgcaccagccugccccggugcugccugguguccaacggcagcuaccugaacgagacccacuucuccgacgacaucgagcagcaggcggacaacaugaucaccgagcuccugcagaaggaguacaucgaccgccagggcaagacgccgcuggggcugguggaccucuucgucuucagcaccuccuucuaccugaucagcaucuuccugcaccucgugaagauccccacccaccggcacaucaucggcaagcccugccccaagccgcaccgccugaaccacauggggaucugcuccugcggccuguacaagcaccccggggugcccgucaaguggaagcggugaggacuagucccuguucccagagcccacuuuuuuuucuuuuuuugaaauaaaauagccugucuuucagaucucaaaggcucuuuucagagccaccaaaaaaaaaaaaaaaaaaaaaaaaaaaaaaaaaaaaaaaaaaaaaaaaaaaaaaaaaaaaaaaaagaauu

SEQ ID NO: 32025 - RNA, 1733 nt, Artificial Sequence
  mRNA product Design a-2 (hSL-A64-N5) comprising derived and/or modified sequence from LASV(LASV254-NIG-2011;Clade II)__AIT17674__GPCmut7 (opt1)
aggagaguccgcucagccagguugcagaagcggcuuagcguguguccuaaucuucucucugcguguagguaggccugugccgcaaacaagcuuaccaugggccagaucaucaccuucuuccaggaggugccccacgucaucgaggaggugaugaacaucgugcugaucgcccucagccugcuggccauccucaaggggaucuacaacgucgcgaccugcggccuguucgggcugguguccuuccuccugcugugcggccgcagcugcuccacgaccuacaaggggguguacgagcuccagacccuggagcuggacaugaccaaccucaacaugacgaugccgcugagcugcaccaagaacaacucccaccacuacaucauggucggcaacgagaccggccuggagcucacccugacgaacaccagcaucaucaaccacaaguucugcaaccuguccgacgcccacaagaagaaccucuacaaccacgcccugaugagcaucaucuccaccuuccaccugagcauccccaacuucaaccaguacgaggccauguccugcgacuucaacgggggcaagaucagcgugcaguacaaccucucccacagcuacgccguggacgcggccaaccacugcgggaccaucgccaacggcguccugcagacguucaugcggauggccuggggcggguccuacaucgcgcuggacagcggcaaggggaacugggacugcaucaugaccuccuaccaguaccucaucauccagaacaccaccugggaggaccacugccaguucagccgccccucccccaucggcuaccuggggcugcucagccagcggacgcgcgacaucuacaucagccggcgccugcugggcaccuucaccuggacccucuccgacagcgagggcaacgagacgcccgggggcuacugccugacccgguggaugcugaucgaggccgagcucaagugcuucgggaacaccgccguggccaagugcaacgagaagcacgacgaggaguucugcgacaugcugcgccuguucgacuucaacaagcaggccauccggcgccucaagaccccggcgcaggccaacauccagcugaucaacaaggccgugaacgcccugaucaacgaccagcucaucaugaagaaccaccuccgggacaucaugggcauccccuacugcaacuacuccaaguacugcuaccugaaccacacggucaccgggaagaccagccugccccgcugcugccugguguccaacggcagcuaccugaacgagacccacuucuccgacgacaucgagcagcaggccgacaacaugaucacggagcuccugcagaaggaguacauggaccggcagggcaagaccccgcuggggcugguggaccucuucgucuucagcaccuccuucuaccugaucagcaucuuccugcaccucgugaagauccccacccaccgccacgugaucggcaagcccugccccaagccgcaccggcugaaccacauggggaucugcuccugcggccuguacaagcaccccgggguccccgugaaguggaagcgcugaggacuagucccuguucccagagcccacuuuuuuuucuuuuuuugaaauaaaauagccugucuuucagaucucaaaggcucuuuucagagccaccaaaaaaaaaaaaaaaaaaaaaaaaaaaaaaaaaaaaaaaaaaaaaaaaaaaaaaaaaaaaaaaaagaauu

SEQ ID NO: 32026 - RNA, 1733 nt, Artificial Sequence
  mRNA product Design a-2 (hSL-A64-N5) comprising derived and/or modified sequence from LASV(Nig08-A19;Clade III)__ADU56618__GPCmut7 (opt1)
aggagaguccgcucagccagguugcagaagcggcuuagcguguguccuaaucuucucucugcguguagguaggccugugccgcaaacaagcuuaccaugggccagaucgugaccuucuuccaggaggucccccacgugaucgaggaggugaugaacaucguccugaucgcccucagcauccuggccauccugaaggggcucuacaacaucgcgaccugcggccugaucgggcuggugacguuccuccugcuguccggccgcagcugcuccaugaccuacaaggggguguacgagcuccagacccuggagcugaacaugaacacccucaacaugacgaugccgcugagcugcaccaagaacaacucccaccacuacaucauggucggcaacgagaccggccuggagcucacccugacgaacaccagccugcuccaccacaaguucugcaaccuguccgacgcccacaagaagaaccuguacgaccacacccucaugagcaucaucuccaccuuccaccugagcauccccaacuucaaccaguacgaggccauguccugcgacuucaacgggggcaagaucacggugcaguacaaccugagccacuccuacgccaucgacgccgcgaaccacugcgggaccguggccaacggcguccuccagaccuucaugcggauggccuggggcgggagcuacaucgcccuggacuccggccgcgggaagugggacugcaucaugaccagcuaccaguaccugaucauccagaacacgaccugggaggaccacugccaguucucccggcccagccccaucggcuaccucgggcugcugucccagcgcacccgggacaucuacaucagccgccggcuccugggcaccuucacguggacccugagcgacuccgagggcaacgagacccccgggggcuacugccucacccgcuggaugcugaucgaggcggagcugaagugcuucgggaacacggccguggccaagugcaacgagaagcacgacgaggaguucugcgacaugcuccggcuguucgacuucaacaagcaggccauccgccggcugaaggccccggcgcagaugagcauccagcucaucaacaaggccgugaacgcccugaucaacgaccagcugaucaugaagaaccaccuccgcgacaucaugggcauccccuacugcaacuacuccaaguacugcuaccugaaccacaccagcaccgggcggaccucccugccccgcugcugccucgucagcaacggcuccuaccugaacgagacgcacuucagcgacgacaucgagcagcaggccgacaacaugaucaccgagaugcugcagaaggaguaccuggaccggcagggcaagaccccgcucgggcugguggaccuguucguguucuccaccagcuucuaccucaucuccaucuuccugcaccuggucaagauccccacgcaccgccacaucgugggcaagcccugccccaagccgcaccggcucaaccacauggggaucugcagcugcggccuguacaagcagcccggggugcccguccgcuggaagcggugaggacuagucccuguucccagagcccacuuuuuuuucuuuuuuugaaauaaaauagccugucuuucagaucucaaaggcucuuuucagagccaccaaaaaaaaaaaaaaaaaaaaaaaaaaaaaaaaaaaaaaaaaaaaaaaaaaaaaaaaaaaaaaaaagaauu

SEQ ID NO: 32027 - RNA, 1736 nt, Artificial Sequence
  mRNA product Design a-2 (hSL-A64-N5) comprising derived and/or modified sequence from LASV(G1180-SLE-2010;Clade IV)__AIT17168__GPCmut7 (opt1)
aggagaguccgcucagccagguugcagaagcggcuuagcguguguccuaaucuucucucugcguguagguaggccugugccgcaaacaagcuuaccaugggccagaucgugaccuucuuccaggaggucccccacgugaucgaggaggugaugaacaucguccugaucgcccucagcauccuggccgugcugaaggggcucuacaacuucgcgaccugcggccugguggggcugcucacguuccugcugcucugcggccgcuccugcaccgccagccgguacaagggggucuacgagcugcagacccuggagcucaacauggagacccugaacaugacgaugccgcuguccugcaccaagaacaacagccaccacuacaucauggugggcaacgagaccggccucgagcugacccugacgaacaccuccaucaucaaccacaaguucugcaaccucagcgacgcccacaagaagaaccuguacgaccacgcccugauguccaucaucagcaccuuccaccucuccauccccaacuucaaccaguacgaggccaugagcugcgacuucaacgggggcaagaucuccgugcaguacaaccugagccacuccuacgcgggggacgccgccaaccacugcggcaccgucgccaacggggugcugcagacguucaugcgcauggcguggggcggcagcuacaucgcccucgacuccgggcacggcagcugggacugcaucaugaccuccuaccaguaccugaucauccagaacaccaccugggaggaccacugccaguucagccggcccucccccaucggguaccugggccuccugagccagcgcacgcgggacaucuacaucagccgccggcugcucggcaccuucaccuggacccuguccgacagcgaggggaaggacacgccgggcggguacugccugacccgcuggaugcucaucgaggccgagcugaagugcuucggcaacaccgccguggccaagugcaacgagaagcacgacgaggaguucugcgacaugcugcggcuguucgacuucaacaagcaggcgauccagcgccugaaggcccccgcccagauguccauccagcugaucaacaaggccgucaacgcccucaucaacgaccagcugaucaugaagaaccaccuccgggacaucauggggauccccuacugcaacuacagcaaguacugcuaccucaaccacaccacgaccggcaagaccucccugcccaagugcugccuggugagcaacggcuccuaccucaacgagacccacuucagcgacgacaucgagcagcaggcggacaacaugaucacggagaugcugcagaaggaguacauggagcgccaggggaagaccccgcugggccugguggaccucuucgucuucuccaccagcuucuaccugaucuccaucuuccugcaccucgugaagauccccacccaccggcacaucgugggcaagagcugccccaagccccaccgccugaaccacauggggaucugcuccugcgggcuguacaagcagccgggcguccccgugaaguggaagcggugaggacuagucccuguucccagagcccacuuuuuuuucuuuuuuugaaauaaaauagccugucuuucagaucucaaaggcucuuuucagagccaccaaaaaaaaaaaaaaaaaaaaaaaaaaaaaaaaaaaaaaaaaaaaaaaaaaaaaaaaaaaaaaaaagaauu

SEQ ID NO: 32028 - RNA, 1736 nt, Artificial Sequence
  mRNA product Design a-2 (hSL-A64-N5) comprising derived and/or modified sequence from LASV(G1442-SLE-2011;Clade IV)__AIT17180__GPCmut7 (opt1)
aggagaguccgcucagccagguugcagaagcggcuuagcguguguccuaaucuucucucugcguguagguaggccugugccgcaaacaagcuuaccaugggccagaucgugaccuucuuccaggaggucccccacgugaucgaggaggugaugaacaucguccugaucgcccucagcauccuggccgugcugaaggggcucuacaacguggcgaccugcggccugaucgggcuggucacguuccuccugcugugcggccgcuccugcaccaccacccucuacaaggggguguacgagcugcagacgcuggagcucaacauggagacccugaacaugaccaugccgcugagcugcaccaagaacaacucccaccacuacauccgggugggcaacgagacgggccucgagcugacccugaccaacaccagcaucaucaaccacaaguucugcaaccucuccgacgcccacaagaagaaccuguacgaccacgcccugaugagcaucaucuccacguuccaccucagcauccccaacuucaaccaguacgaggccauguccugcgacuucaacgggggcaagaucagcguccaguacaaccugucccacagcuacgccggggacgcggccaaccacugcggcaccguggccaacggggugcugcagaccuucaugcgcauggccuggggcggcuccuacaucgcgcucgacagcgggcggggcaacugggacugcaucaugaccuccuaccaguaccugaucauccagaacacgaccugggacgaccacugccaguucagccgccccucccccaucggguaccugggccuccugagccagcggacccgcgacgucuacaucucccggcgccugcucggcaccuucacguggacccugagcgacagcgaggggaaggacaccccgggcggguacugccugacccgguggaugcucaucgaggccgagcugaagugcuucggcaacacggccguggccaagugcaacgagaagcacgacgaggaguucugcgacaugcugcgccucuucgacuucaacaagcaggccauccagcggcugaaggcgcccgcccagauguccauccagcugaucaacaaggccgugaacgcccucaucaacgaccagcugaucaugaagaaccaccuccgcgacaucauggggauccccuacugcaacuacagcaaguacugcuaccugaacaacaccgccaccggcaagaccucccugcccaagugcugccugaucagcaacggcuccuaccucaacgagacgcacuucagcgacgacaucgagcaggaggcggacaacaugaucaccgagaugcugcagaaggaguacauggagcggcaggggaagaccccgcugggccuggucgaccucuucguguucuccaccagcuucuaccugaucuccaucuuccugcaccucgugaagauccccacgcaccgccacaucgucggcaagagcugccccaagccccaccggcugaaccacauggggaucugcuccugcgggcuguacaagcagccgggcgugcccgugcgcuggaagcggugaggacuagucccuguucccagagcccacuuuuuuuucuuuuuuugaaauaaaauagccugucuuucagaucucaaaggcucuuuucagagccaccaaaaaaaaaaaaaaaaaaaaaaaaaaaaaaaaaaaaaaaaaaaaaaaaaaaaaaaaaaaaaaaaagaauu

SEQ ID NO: 32029 - RNA, 1736 nt, Artificial Sequence
  mRNA product Design a-2 (hSL-A64-N5) comprising derived and/or modified sequence from LASV(G3010-SLE-2013;Clade IV)__AIT17344__GPCmut7 (opt1)
aggagaguccgcucagccagguugcagaagcggcuuagcguguguccuaaucuucucucugcguguagguaggccugugccgcaaacaagcuuaccaugggccagaucgugaccuucuuccaggaggucccccacgugaucgaggaggugaugaacaucguccugaucgcccucagcauccuggccgugcugaaggggcucuacaacuucgcgaccugcggccugguggggcuggucacguuccuccugcugugcggccgcuccugcaccaccagccucuacaaggggguguacgagcugcagacccuggagcucaacauggagacgcugaacaugaccaugccgcuguccugcaccaagaacaacagccaccacuacaucauggugggcaacgagaccggccucgagcugacgcugaccaacaccuccaucaucaaccacaaguucugcaaccucagcgacgcccacaagaagaaccuguacaaccacgcccugauguccaucaucagcaccuuccaccucuccauccccaacuucaaccaguacgaggccaugagcugcgacuucaacgggggcaagaucuccguccaguacaaccugagccacuccuacgccggggacgcggccagccacugcggcacgguggccaacggggugcugcagaccuucaugcggauggccuggggcggcuccuacaucgcgcucgacagcggguacggcaagugggacugcaucaugaccuccuaccaguaccugaucauccagaacaccacgugggaggaccacugccaguucagccgccccucccccaucggguaccugggccuccugagccagcggacccgcgacaucuacaucagccggcgccugcucggcaccuucaccuggacgcuguccgacagcgaggggaaggacaccccgggcggguacugccugacccgguggaugcucaucgaggccgagcugaagugcuucggcaacaccgccgucgccaagugcaacgagaagcacgacgaggaguucugcgacaugcugcgccucuucgacuucaacaagcaggccauccagcggcugaagacgcccgcgcagauguccauccagcugaucaacaaggccgugaacgcccucaucaacgaccagcugaucaugaagaaccaccuccgcgacaucauggggauccccuacugcaacuacagcaaguacugcuaccugaaccacaccaccaccggcaagacgucccugcccaagugcugccuggugagcaacggcuccuaccucaacgagacccacuucagcgacgacaucgagcagcaggccgacaacaugaucaccgagaugcugcagaaggaguacauggagcggcaggggaagaccccgcugggccuggucgaccucuucguguucuccacgagcuucuaccugaucuccaucuuccugcaccucgugaagauccccacccaccgccacaucgucggcaagagcugccccaagccccaccggcugaaccacauggggaucugcuccugcgggcuguacaagcagccgggcgugcccgugcgcuggaagcggugaggacuagucccuguucccagagcccacuuuuuuuucuuuuuuugaaauaaaauagccugucuuucagaucucaaaggcucuuuucagagccaccaaaaaaaaaaaaaaaaaaaaaaaaaaaaaaaaaaaaaaaaaaaaaaaaaaaaaaaaaaaaaaaaagaauu

SEQ ID NO: 32030 - RNA, 1736 nt, Artificial Sequence
  mRNA product Design a-2 (hSL-A64-N5) comprising derived and/or modified sequence from LASV(G502-SLE-2009;Clade IV)__AIT17126__GPCmut7 (opt1)
aggagaguccgcucagccagguugcagaagcggcuuagcguguguccuaaucuucucucugcguguagguaggccugugccgcaaacaagcuuaccaugggccagaucgugaccuucuuccaggaggucccccacgugaucgaggaggugaugaacaucguccugaucgcccucagcauccuggccgugcugaaggggcucuacaacuucgcgaccugcggccugguggggcugcucacguuccugcugcucugcggccgcuccugcaccaccgggcuguacaagggcgucuacgagcugcagacccucgagcugaacauggagacgcugaacaugaccaugccgcucagcugcaccaagaacaacucccaccacuacaucauggugggcaacgagaccgggcuggagcugacgcucaccaacaccagcaucaucaaccacaaguucugcaaccuguccgacgcccacaagaagaaccuguacgaccacgcccucaugagcaucaucuccaccuuccaccugagcauccccaacuucaaccaguacgaggccauguccugcgacuucaacggcgggaagaucagcgugcaguacaaccugucccacagcuacgccggcgacgcggccgaccacugcgggacggucgccaacggcgugcuccagaccuucaugcggauggccuggggcggguccuacaucgcgcuggacagcggccgcgggcggugggacugcaucaugaccuccuaccaguaccugaucauccagaacaccacgugggaggaccacugccaguucagccgccccucccccaucggcuaccucggccugcugagccagcggacccgcgacaucuacaucucccggcgccuccuggggaccuucaccuggacgcugagcgacagcgagggcaaggacacccccgggggcuacugccucacccgguggaugcugaucgaggccgagcugaagugcuucgggaacaccgccguggccaagugcaacgagaagcacgacgaggaguucugcgacaugcuccgccuguucgacuucaacaagcaggccauccagcggcugaaggcgccggcccagauguccauccagcucaucaacaaggccgucaacgcccugaucaacgaccagcuggugaugaagaaccaccuccgcgacaucaugggcauccccuacugcaacuacagccgguacugcuaccugaaccacacgaccaccggccgcaccucccugcccaagugcugccucgugagcaacggguccuaccugaacgagacgcacuucagcgacgacaucgagcagcaggccgacaacaugaucaccgagaugcugcagaaggaguacauggagcggcagggcaagaccccgcuggggcucgucgaccuguucguguucuccaccagcuucuaccugaucuccaucuuccuccaccuggugaagauccccacgcaccgccacaucgucggcaagagcugccccaagccccaccggcugaaccacauggggaucugcuccugcggccucuacaagcagccgggcgugcccgugaaguggaagcgcugaggacuagucccuguucccagagcccacuuuuuuuucuuuuuuugaaauaaaauagccugucuuucagaucucaaaggcucuuuucagagccaccaaaaaaaaaaaaaaaaaaaaaaaaaaaaaaaaaaaaaaaaaaaaaaaaaaaaaaaaaaaaaaaaagaauu

SEQ ID NO: 32031 - RNA, 1736 nt, Artificial Sequence
  mRNA product Design a-2 (hSL-A64-N5) comprising derived and/or modified sequence from LASV(G733-SLE-2010;Clade IV)__AIT17154__GPCmut7 (opt1)
aggagaguccgcucagccagguugcagaagcggcuuagcguguguccuaaucuucucucugcguguagguaggccugugccgcaaacaagcuuaccaugggccagaucgugaccuucuuccaggaggucccccacgugaucgaggaggugaugaacaucguccugaucgcccucagcauccuggccgugcugaaggggcucuacaacuucgcgaccugcggcaucguggggcuggucuccuuccugcuccugugcggccgcagcugcacgaccucccuguacaaggggguguacgagcuccagacccuggagcugaacauggagacccucaacaugacgaugccgcugagcugcaccaagaacaacucccaccacuacaucauggugggcaacgagaccggccuggagcucacccugacgaacaccagcaucaucaaccacaaguucugcaaccuguccgacgcccacaagaagaaccucuacgaccacgcccugaugagcaucaucuccaccuuccaccugagcauccccaacuucaaccaguacgaggccauguccugcgacuucaacgggggcaagaucagcguccaguacaaccucucccacagcuacgccggggacgcggccaaccacugcggcaccaucgccaacggggugcugcagacguucaugcggauggccuggggcggcuccuacaucgcgcuggacagcgggcgcgaccggugggacugcaucaugaccuccuaccaguaccucaucauccagaacaccaccugggaggaccacugccaguucagccgccccucccccaucggcuaccuggggcugcucagccagcggacgcgcgacaucuacaucagccggcgccugcugggcaccuucaccuggacccucuccgacagcgagggcaaggacacgcccgggggcuacugccugacccgguggaugcugaucgaggccgagcucaagugcuucgggaacaccgccguggccaagugcaacgagaagcacgacgaggaguucugcgacaugcugcgccuguucgacuucaacaagcaggccauccagcggcucaaggcgccggcccagauguccauccagcugaucaacaaggccgucaacgcccugaucaacgaccagcucaucaugaagaaccaccuccgcgacaucaugggcauccccuacugcaacuacagcaaguacugcuaccugaaccacaccacgaccgggaagaccucccugcccaagugcugccuggugagcaacggcuccuaccugaacgagacccacuucagcgacgacaucgagcagcaggccgacaacaugaucacggagaugcuccagaaggaguacauggagcggcagggcaagaccccgcuggggcugguggaccuguucgucuucuccaccagcuucuaccucaucuccaucuuccugcaccuggugaagauccccacccaccgccacguggucggcaagagcugccccaagccccaccggcucaaccacauggggaucugcuccugcggccuguacgggcagccgggcgugcccgugaaguggaagcgcugaggacuagucccuguucccagagcccacuuuuuuuucuuuuuuugaaauaaaauagccugucuuucagaucucaaaggcucuuuucagagccaccaaaaaaaaaaaaaaaaaaaaaaaaaaaaaaaaaaaaaaaaaaaaaaaaaaaaaaaaaaaaaaaaagaauu

SEQ ID NO: 32032 - RNA, 1736 nt, Artificial Sequence
  mRNA product Design a-2 (hSL-A64-N5) comprising derived and/or modified sequence from MOPV/LASV reassortant(IGS-1;Clade IV)__AFY05576__GPCmut7 (opt1)
aggagaguccgcucagccagguugcagaagcggcuuagcguguguccuaaucuucucucugcguguagguaggccugugccgcaaacaagcuuaccaugggccagaucgugaccuucuuccaggaggucccccacgugaucgaggaggugaugaacaucguccugaucgcccucagcgugcuggccgugcugaaggggcucuacaacuucgcgaccugcggccuggucgggcuggugacguuccuccugcugugcggccgcuccugcaccaccagccucuacaaggggguguacgagcugcagacccuggagcucaacauggagacgcugaacaugaccaugccgcuguccugcaccaagaacaacagccaccacuacaucauggucggcaacgagaccggccucgagcugacgcugaccaacaccuccaucaucaaccacaaguucugcaaccucagcgacgcccacaagaagaaccuguacgaccacgcccugauguccaucaucagcaccuuccaccucuccauccccaacuucaaccaguacgaggccaugagcugcgacuucaacgggggcaagaucuccgugcaguacaaccugagccacuccuacgccggggacgcggccaaccacugcggcacgguggccaacgggguccugcagaccuucaugcggauggccuggggcggcagcuacaucgcgcucgacuccgggcgcggcaacugggacugcaucaugaccagcuaccaguaccugaucauccagaacaccacgugggaggaccacugccaguucucccggcccagccccaucggguaccugggccuccugucccagcgcacccgggacaucuacaucagccgccggcugcucggcaccuucaccuggacgcugagcgacuccgagggggaggacaccccgggcggguacugccugacccgcuggaugcucaucgaggccgagcugaagugcuucggcaacaccgccguggccaagugcaacgagaagcacgacgaggaguucugcgacaugcugcggcuguucgacuucaacaagcaggccauccagcgccugaaggcgcccgcccagaugagcauccagcugaucaacaaggccgugaacgcccucaucaacgaccagcugaucaugaagaaccaccuccgggacaucauggggauccccuacugcaacuacuccaaguacugcuaccucaaccacacgaccaccggccgcaccagccugcccaagugcugccuggucuccaacggcagcuaccucaacgagacgcacuucuccgacgacaucgagcagcaggccgacaacaugaucaccgagaugcugcagaaggaguacauggagcggcaggggaagaccccgcugggccugguggaccucuucguguucagcaccuccuucuaccugaucagcaucuuccugcaccucgucaagauccccacgcaccgccacaucguggggaaguccugccccaagccccaccggcugaaccacaugggcaucugcagcugcgggcuguacaagcagccgggcgugcccgucaaguggaagcgcugaggacuagucccuguucccagagcccacuuuuuuuucuuuuuuugaaauaaaauagccugucuuucagaucucaaaggcucuuuucagagccaccaaaaaaaaaaaaaaaaaaaaaaaaaaaaaaaaaaaaaaaaaaaaaaaaaaaaaaaaaaaaaaaaagaauu

SEQ ID NO: 32033 - RNA, 1736 nt, Artificial Sequence
  mRNA product Design a-2 (hSL-A64-N5) comprising derived and/or modified sequence from LASV(LM765-SLE-2012;Clade IV)__AIT17814__GPCmut7 (opt1)
aggagaguccgcucagccagguugcagaagcggcuuagcguguguccuaaucuucucucugcguguagguaggccugugccgcaaacaagcuuaccaugggccagaucgugaccuucuuccaggaggucccccacgugaucgaggaggugaugaacaucguccugaucgcccucagcauccuggccgugcugaaggggcucuacaacuucgcgaccugcggccugguggggcuggucacguuccuccugcugugcggccgcuccugcaccaccagccucuacaaggggguguacgagcugcagacccuggagcucaacauggagacgcugaacaugaccaugccgcuguccugcaccaagaacaacagccaccacuacaucauggugggcaacgagaccggccucgagcugacgcugaccaacaccuccaucaucgaccacaaguucugcaaccucagcgacgcccaccggaagaaccuguacgaccacgcccugauguccaucaucagcaccuuccaccucuccauccccaacuucaaccaguacgaggccaugagcugcgacuucaacgggggcaagaucuccguccaguacaaccugagccacuccuacgccaaggacgcggccgaccacugcgggacgguggccaacggcgugcugcagaccuucaugcgcauggccuggggcgggagcuacaucgcgcucgacuccggccgggggcgcugggacugcaucaugaccagcuaccaguaccugaucauccagaacaccacgugggaggaccacugccaguucucccggcccagccccaucggcuaccuggggcuccugucccagcgcacccgggacaucuacaucagccgccggcugcucggcaccuucaccuggacgcugagcgacuccgagggcaaggacacccccgggggcuacugccugacccgcuggaugcucaucgaggccgagcugaagugcuucgggaacaccgccgucgccaagugcaacgagaagcacgacgaggaguucugcgacaugcugcggcuguucgacuucaacaagcaggccauccagcgccugaaggcgccggcccagaugagcauccagcugaucaacaaggccgugaacgcccucaucaacgaccagcugaucaugaagaaccaccuccgggacaucaugggcauccccuacugcaacuacuccaaguacugcuaccucaaccacacgaccaccgggaagaccagccugcccaagugcugccugguguccaacggcagcuaccucaacgagacgcacuucuccgacgacaucgagcagcaggccgacaacaugaucaccgagaugcugcagaaggaguacauggagcgccagggcaagaccccgcuggggcuggucgaccucuucguguucagcaccuccuucuaccugaucagcaucuuccugcaccucgugaagauccccacgcaccggcacaucgucggcaagcccugccccaagccgcaccgccugaaccacauggggaucugcuccugcggccuguacaagcagcccggggugcccgugaaguggaagcggugaggacuagucccuguucccagagcccacuuuuuuuucuuuuuuugaaauaaaauagccugucuuucagaucucaaaggcucuuuucagagccaccaaaaaaaaaaaaaaaaaaaaaaaaaaaaaaaaaaaaaaaaaaaaaaaaaaaaaaaaaaaaaaaaagaauu

SEQ ID NO: 32034 - RNA, 1736 nt, Artificial Sequence
  mRNA product Design a-2 (hSL-A64-N5) comprising derived and/or modified sequence from LASV(LM776-SLE-2012;Clade IV)__AIT17824__GPCmut7 (opt1)
aggagaguccgcucagccagguugcagaagcggcuuagcguguguccuaaucuucucucugcguguagguaggccugugccgcaaacaagcuuaccaugggccagaucgugaccuucuuccaggaggucccccacgugaucgaggaggugaugaacaucguccugaucgcccucagcauccuggccgugcugaaggggcucuacaacuucgcgaccugcggccugguggggcuggucacguuccuccugcugugcggccgcuccugcaccaccagcguguacaaggggguguacgagcuccagacccuggagcugaacauggagacgcucaacaugaccaugccgcuguccugcaccaagaacaacagccaccacuacaucauggucggcaacgagaccggccuggagcucacgcugaccaacaccuccaucaucaaccacaaguucugcaaccugagcgacgcccacaagaagaaccucuacgaccacgcccugauguccaucaucagcaccuuccaccuguccauccccaacuucaaccaguacgaggccaugagcugcgacuucaacgggggcaagaucuccgugcaguacaaccucagccacuccuacgccggggacgcggccaaccacugcggcacgguggccaacgggguccugcagaccuucaugcggauggccuggggcggcagcuacaucgcgcuggacuccgggcacggcaagugggacugcaucaugaccagcuaccaguaccucaucauccagaacaccacgugggaggaccacugccaguucucccgccccagccccaucggguaccugggccugcucucccagcggacccgcgacaucuacaucagccggcgccugcugggcaccuucaccuggacgcucagcgacuccgaggggaaggacaccccgggcggguacugccugacccgguggaugcugaucgaggccgagcucaagugcuucggcaacaccgccguggccaagugcaacgagaagcacgacgaggaguucugcgacaugcugcgccuguucgacuucaacaagcaggccauccagcggcucaaggcgcccgcccagaugagcauccagcugaucaacaaggccgugaacgcccugaucaacgaccagcucaucaugaagaaccaccuccgcgacaucauggggauccccuacugcaacuacuccaaguacugcuaccugaaccacacgaccaccggcaagaccagccugcccaagugcugccuggucuccaacggcagcuaccugaacgagacgcacuucuccgacgacaucgagcagcaggccgacaacaugaucaccgagaugcuccagaaggaguacauggagcggcaggggaagaccccgcugggccugguggaccuguucguguucagcaccuccuucuaccucaucagcaucuuccugcaccuggucaagauccccacgcaccgccacaucguggggaaguccugccccaagccccaccggcucaaccacaugggcaucugcagcugcgggcuguacaagcagccgggcgugcccguccgcuggaagcggugaggacuagucccuguucccagagcccacuuuuuuuucuuuuuuugaaauaaaauagccugucuuucagaucucaaaggcucuuuucagagccaccaaaaaaaaaaaaaaaaaaaaaaaaaaaaaaaaaaaaaaaaaaaaaaaaaaaaaaaaaaaaaaaaagaauu

SEQ ID NO: 32035 - RNA, 1736 nt, Artificial Sequence
  mRNA product Design a-2 (hSL-A64-N5) comprising derived and/or modified sequence from LASV(Mad39;Clade IV)__ANH09722__GPCmut7 (opt1)
aggagaguccgcucagccagguugcagaagcggcuuagcguguguccuaaucuucucucugcguguagguaggccugugccgcaaacaagcuuaccaugggccagaucgugaccuucuuccaggaggucccccacgugaucgaggaggugaugaacaucguccugaucgcccucagcauccuggccgugcugaaggggcucuacaacguggcgaccugcggccugaucgggcuggucacguuccuccugcugugcggccgcuccugcaccaccacccucuacaaggggguguacgagcugcaggcccuggagcucaacauggagacgcugaacaugaccaugccgcugagcugcaccaagaacaacucccaccacuacauccgggugggcaacgagaccggccucgagcugacgcugaccaacaccagccucaucaaccacaaguucugcaaccuguccgacgcccacaagaagaaccuguacgaccacgcccucaugagcaucaucuccaccuuccaccugagcauccccaacuucaaccaguacgaggccauguccugcgacuucaacgacgggaagaucagcguccaguacaaccugucccacacguacgcgggcgacaccgccaaccacugcgggaccguggccaacggcgugcuccagaccuucaugcgcauggccuggggcgggagcuacaucgcgcuggacuccggccgcgggggcugggacugcaucaugacgagcuaccaguaccugaucauccagaacaccaccugggaggaccacugccaguucucccggcccagccccaucggguaccucggccugcugucccagcggacccgcgacaucuacaucagccggcgccuccugggcacguucaccuggacccuguccgacagcgaggggaaggacaccccgggcggguacugccucacgcgguggaugcugaucgaggccgagcugaagugcuucggcaacaccgccgucgccaagugcaacgagaagcacgacgaggaguucugcgacaugcuccgccuguucgacuucaacaagcaggccauccagcggcugaaggcgcccgcccagaugagcauccagcucaucaacaaggccgugaacgcccugaucaacgaccagcugaucaugaagaaccaccuccgcgacaucauggggauccccuacugcaacuacuccaaguacugcuaccugaaccacaccgugaccggcaagacgagccugcccaagugcugccucgucuccaacggcagcuaccugaacgagacccacuucuccgacgacaucgagcagcaggccgacaacaugaucaccgagaugcugcagaaggaguacauggagcggcaggggaagaccccgcugggccucguggaccuguucguguucagcacguccuucuaccugaucagcaucuuccuccaccuggucaagauccccacccaccgccacgugguggggaagcccugccccaagccgcaccggcugaaccacaugggcaucugcuccugcggguucuacaagcagcccggcguccccgugcgcuggaagcggugaggacuagucccuguucccagagcccacuuuuuuuucuuuuuuugaaauaaaauagccugucuuucagaucucaaaggcucuuuucagagccaccaaaaaaaaaaaaaaaaaaaaaaaaaaaaaaaaaaaaaaaaaaaaaaaaaaaaaaaaaaaaaaaaagaauu

SEQ ID NO: 32036 - RNA, 1736 nt, Artificial Sequence
  mRNA product Design a-2 (hSL-A64-N5) comprising derived and/or modified sequence from LASV(Z0947-SLE-2011;Clade IV)__AIT17840__GPCmut7 (opt1)
aggagaguccgcucagccagguugcagaagcggcuuagcguguguccuaaucuucucucugcguguagguaggccugugccgcaaacaagcuuaccaugggccagaucgugaccuucuuccaggaggucccccacgugaucgaggaggugaugaacaucguccugaucgcccucagcauccuggccgugcugaaggggcucuacaacuucgcgaccugcggccugguggggcuggucacguuccuccugcugugcggccgcuccugcaccaucagccucuacaaggggguguacgagcugcagacccuggagcucaacauggagacccugaacaugacgaugccgcuguccugcaccaagaacaacagccaccacuacaucauggugggcaacgagaccggccucgagcugacccugacgaacaccuccaucaucaaccacaaguucugcaaccucagcgacgcccacaagaagaaccuguacgaccacgcccugauguccaucaucagcaccuuccaccucuccauccccaacuucaaccaguacgaggccaugagcugcgacuucaacgggggcaagaucuccguccaguacaaccugagccacuccuacgccggggacgcggccaaccacugcggcaccguggccaacggggugcugcagacguucaugcggauggccuggggcggcagcuacaucgcgcucgacuccgggcgcgaccggugggacugcaucaugaccagcuaccaguaccugaucauccagaacaccaccugggaggaccacugccaguucucccgccccagccccaucggcuaccuggggcuccugucccagcggacgcgcgacaucuacaucagccggcgccugcucggcaccuucaccuggacccugagcgacuccgagggcaaggacacgcccgggggcuacugccugacccgguggaugcucaucgaggccgagcugaagugcuucgggaacaccgccgucgccaagugcaacgagaagcacgacgaggaguucugcgacaugcugcgccucuucgacuucaacaagcaggccauccagcggcugaaggcgccggcccagaugagcauccagcugaucaacaaggccgugaacgcccucaucaacgaccagcugaucaugaagaaccaccuccgcgacaucaugggcauccccuacugcaacuacuccaaguacugcuaccugaaccacaccacgaccgggaagaccagccugcccaagugcugccugguguccaacggcagcuaccucaacgagacccacuucuccgacgacaucgagcagcaggccgacaacaugaucacggagaugcugcagaaggaguacauggagcggcagggcaagaccccgcuggggcuggucgaccucuucguguucagcaccuccuucuaccugaucagcaucuuccugcaccucgugaagauccccacccaccgccacaucgucggcaagcccugccccaagccgcaccggcugaaccacauggggaucugcuccugcggccuguacaagcagcccggggugcccgugaaguggaagcgcugaggacuagucccuguucccagagcccacuuuuuuuucuuuuuuugaaauaaaauagccugucuuucagaucucaaaggcucuuuucagagccaccaaaaaaaaaaaaaaaaaaaaaaaaaaaaaaaaaaaaaaaaaaaaaaaaaaaaaaaaaaaaaaaaagaauu

SEQ ID NO: 32037 - RNA, 1736 nt, Artificial Sequence
  mRNA product Design a-2 (hSL-A64-N5) comprising derived and/or modified sequence from LASV(Josiah;Clade IV)__NP_694870__GPCmut7 (opt4)
aggagaguccgcucagccagguugcagaagcggcuuagcguguguccuaaucuucucucugcguguagguaggccugugccgcaaacaagcuuaccaugggccagaucgugaccuucuuccaggaggugccccacgugaucgaggaggugaugaacaucgugcugaucgcccugagcgugcuggccgugcugaagggccuguacaacuucgccaccugcggccuggugggccuggugaccuuccugcugcugugcggcagaagcugcaccaccagccuguacaagggcguguacgagcugcagacccuggagcugaacauggagacccugaacaugaccaugccccugagcugcaccaagaacaacagccaccacuacaucauggugggcaacgagaccggccuggagcugacccugaccaacaccagcaucaucaaccacaaguucugcaaccugagcgacgcccacaagaagaaccuguacgaccacgcccugaugagcaucaucagcaccuuccaccugagcauccccaacuucaaccaguacgaggccaugagcugcgacuucaacggcggcaagaucagcgugcaguacaaccugagccacagcuacgccggcgacgccgccaaccacugcggcaccguggccaacggcgugcugcagaccuucaugagaauggccuggggcggcagcuacaucgcccuggacagcggcagaggcaacugggacugcaucaugaccagcuaccaguaccugaucauccagaacaccaccugggaggaccacugccaguucagcagacccagccccaucggcuaccugggccugcugagccagagaaccagagacaucuacaucagcagaagacugcugggcaccuucaccuggacccugagcgacagcgagggcaaggacacccccggcggcuacugccugaccagauggaugcugaucgaggccgagcugaagugcuucggcaacaccgccguggccaagugcaacgagaagcacgacgaggaguucugcgacaugcugagacuguucgacuucaacaagcaggccauccagagacugaaggcccccgcccagaugagcauccagcugaucaacaaggccgugaacgcccugaucaacgaccagcugaucaugaagaaccaccugagagacaucaugggcauccccuacugcaacuacagcaaguacugcuaccugaaccacaccaccaccggcagaaccagccugcccaagugcugccuggugagcaacggcagcuaccugaacgagacccacuucagcgacgacaucgagcagcaggccgacaacaugaucaccgagaugcugcagaaggaguacauggagagacagggcaagaccccccugggccugguggaccuguucguguucagcaccagcuucuaccugaucagcaucuuccugcaccuggugaagauccccacccacagacacaucgugggcaagagcugccccaagccccacagacugaaccacaugggcaucugcagcugcggccuguacaagcagcccggcgugcccgugaaguggaagagaugaggacuagucccuguucccagagcccacuuuuuuuucuuuuuuugaaauaaaauagccugucuuucagaucucaaaggcucuuuucagagccaccaaaaaaaaaaaaaaaaaaaaaaaaaaaaaaaaaaaaaaaaaaaaaaaaaaaaaaaaaaaaaaaaagaauu

SEQ ID NO: 32038 - RNA, 1733 nt, Artificial Sequence
  mRNA product Design a-2 (hSL-A64-N5) comprising derived and/or modified sequence from LASV(LP;Clade I)__AAF86701__GPCmut7 (opt4)
aggagaguccgcucagccagguugcagaagcggcuuagcguguguccuaaucuucucucugcguguagguaggccugugccgcaaacaagcuuaccaugggccagaucaucaccuucuuccaggaggugccccacgugaucgaggaggugaugaacaucgugcugaucgcccugagccugcuggccauccugaagggccuguacaacaucgccaccugcggcaucaucggccugguggccuuccuguuccugugcggcaagagcugcagccugacccugaagggcggcuacgagcugcagacccuggagcugaacauggagacccugaacaugaccaugccccugagcugcaccaagaacagcagccaccacuacaucagagugggcaacgagaccggccuggagcugacccugaccaacaccagcaucaucaaccacaaguucugcaaccugagcgacgcccacaagaagaaccuguacgaccacgcccugaugagcaucaucagcaccuuccaccugagcauccccaacuucaaccaguacgaggccaugagcugcgacuucaacggcggcaagaucagcgugcaguacaaccugagccacagcuacgccggcgacgccgccgagcacugcggcaccguggccaacggcgugcugcagaccuucaugagaauggccuggggcggcagauacaucgcccuggacagcggcaagggcaacugggacugcaucaugaccagcuaccaguaccugaucauccagaacaccaccugggaggaccacugccaguucagcagacccagccccaucggcuaccugggccugcugagccagagaaccagagacaucuacaucagcagaagacugcugggcaccuucaccuggacccugagcgacagcgagggcaacgagacccccggcggcuacugccugaccagauggaugcugaucgaggccgagcugaagugcuucggcaacaccgccguggccaagugcaacgagaagcacgacgaggaguucugcgacaugcugagacuguucgacuucaacaagcaggccaucagaagacugaaggcccccgcccagaugagcauccagcugaucaacaaggccgugaacgcccugaucaacgaccagcugaucaugaagaaccaccugagagacaucaugggcauccccuacugcaacuacagcaaguacugcuaccugaaccacaccagcagcggcagaaccagccugcccaagugcugccugaucagcaacggcagcuaccugaacgagacccaguucagcgacgacaucgagcagcaggccgacaacaugaucaccgagaugcugcagaaggaguacaucgagagacagggcaagaccccccugggccugguggacaucuucaucuucagcaccagcuucuaccugaucagcaucuuccugcaccugaucaagauccccacccacagacacaucgugggcaagcccugccccaagccccacagacugaaccacaugggcgugugcagcugcggccuguacaagcaccccggcgugcccaccaaguggaagagaugaggacuagucccuguucccagagcccacuuuuuuuucuuuuuuugaaauaaaauagccugucuuucagaucucaaaggcucuuuucagagccaccaaaaaaaaaaaaaaaaaaaaaaaaaaaaaaaaaaaaaaaaaaaaaaaaaaaaaaaaaaaaaaaaagaauu

SEQ ID NO: 32039 - RNA, 1733 nt, Artificial Sequence
  mRNA product Design a-2 (hSL-A64-N5) comprising derived and/or modified sequence from LASV(803213;Clade II)__AAF86703__GPCmut7 (opt4)
aggagaguccgcucagccagguugcagaagcggcuuagcguguguccuaaucuucucucugcguguagguaggccugugccgcaaacaagcuuaccaugggccagaucaucaccuucuuccaggaggugccccacgugaucgaggaggugaugaacaucgugcugaucgcccugagccugcuggccauccugaagggcaucuacaacguggccaccugcggccuguucggccugaucagcuuccugcugcugugcggcagaagcugcagcgugaccuacaagggcguguacgagcugcagacccuggagcugaacauggccaaccugaacaugaccaugccccugagcugcaccaagaacaacagccaccacuacaucauggugggcaacgagaccggccuggagcugacccugaccaacaccagcaucaucaaccacaaguucugcaaccugagcgacgcccacaagaagaaccuguacgaccacgcccugaugagcaucaucagcaccuuccaccugagcauccccaacuucaaccaguacgaggccaugagcugcgacuucaacggcggcaagaucagcgugcaguacaaccugagccacagcuucgccguggacgccgccaaccacugcggcaccaucgccaacggcgugcugcagaccuucaugagaauggccuggggcggcagcuacaucgcccuggacagcggcaagggcaacugggacugcaucaugaccagcuaccaguaccugaucauccagaacaccaccugggaggaccacugccaguucagcagacccagccccaucggcuaccugggccugcugagccagagaaccagagacaucuacaucagcagaagacugcugggcaccuucaccuggacccugagcgacagcgagggcaacgaggcccccggcggcuacugccugaccagauggaugcugaucgaggccgagcugaagugcuucggcaacaccgccguggccaagugcaacgagaagcacgacgaggaguucugcgacaugcugagacuguucgacuucaacaagcaggccaucaagagacugaagacccccgcccagaugagcauccagcugaucaacaaggccgugaacgcccugaucaacgaccagcugaucaugaagaaccaccugagagacaucaugggcauccccuacugcaacuacagcagauacugcuaccugaaccacaccgugaccggcaagaccagccugcccagaugcugccuggugagcaacggcagcuaccugaacgagacccacuucagcgacgacaucgagcagcaggccgacaacaugaucaccgagaugcugcagaaggaguacauggacagacagggcaagaccccccugggccugguggaccuguucguguucagcaccagcuucuaccugaucagcaucuuccugcaccuggugaagauccccacccacagacacaucgugggcaagcccugccccaagccccacagacugaaccacaugggcaucugcagcugcggccuguacaagcaccccggcgugcccgugaaguggaagagaugaggacuagucccuguucccagagcccacuuuuuuuucuuuuuuugaaauaaaauagccugucuuucagaucucaaaggcucuuuucagagccaccaaaaaaaaaaaaaaaaaaaaaaaaaaaaaaaaaaaaaaaaaaaaaaaaaaaaaaaaaaaaaaaaagaauu

SEQ ID NO: 32040 - RNA, 1733 nt, Artificial Sequence
  mRNA product Design a-2 (hSL-A64-N5) comprising derived and/or modified sequence from LASV(GA391;Clade III)__CAA36645__GPCmut7 (opt4)
aggagaguccgcucagccagguugcagaagcggcuuagcguguguccuaaucuucucucugcguguagguaggccugugccgcaaacaagcuuaccaugggccagaucgugaccuucuuccaggaggugccccacgugaucgaggaggugaugaacaucgugcugaucgcccugagcauccuggccauccugaagggccuguacaacguggccaccugcggccugaucggccuggugaccuuccugcugcugagcggcagaagcugcagccugaucuacaagggcaccuacgagcugcagacccuggagcugaacauggagacccugaacaugaccaugccccugagcugcaccaagaacaacagccaccacuacaucagagugggcaacgagaccggccuggagcugacccugaccaacaccagcauccugaaccacaaguucugcaaccugagcgacgcccacaagagaaaccuguacgaccacagccugaugagcaucaucagcaccuuccaccugagcauccccaacuucaaccaguacgaggccaugagcugcgacuucaacggcggcaagaucaccgugcaguacaaccugagccacagcuucgccguggacgccgccggccacugcggcacccuggccaacggcgugcugcagaccuucaugagaauggccuggggcggcagcuacaucgcccuggacagcggcagaggcaacugggacugcaucaugaccagcuaccaguaccugaucauccagaacaccaccugggacgaccacugccaguucagcagacccagccccaucggcuaccugggccugcugagccagagaaccagagacaucuacaucagcagaagacugcugggcaccuucaccuggacccugagcgacagcgagggcaacgagacccccggcggcuacugccugaccagauggaugcugaucgaggccgagcugaagugcuucggcaacaccgccguggccaagugcaacgagaagcacgacgaggaguucugcgacaugcugagacuguucgacuucaacaagcaggccaucagaagacugaagacccccgcccagaugagcauccagcugaucaacaaggccgugaacgcccugaucaacgaccagcugaucaugaagaaccaccugagagacaucaugggcauccccuacugcaacuacagcagauacugcuaccugaaccacaccagcaccggcaagaccagccugcccagaugcugccugaucagcaacggcagcuaccugaacgagaccaaguucagcgacgacaucgagcagcaggccgacaacaugaucaccgagaugcugcagaaggaguacaucgacagacagggcaagaccccccugggccugguggaccuguucguguucagcaccagcuucuaccugaucagcaucuuccugcaccuggugaagauccccacccacagacacaucgugggcaagcccugccccaagccccacagacugaaccacaugggcaucugcagcugcggccuguacaagcagcccggcgugcccgugagauggaagagaugaggacuagucccuguucccagagcccacuuuuuuuucuuuuuuugaaauaaaauagccugucuuucagaucucaaaggcucuuuucagagccaccaaaaaaaaaaaaaaaaaaaaaaaaaaaaaaaaaaaaaaaaaaaaaaaaaaaaaaaaaaaaaaaaagaauu

SEQ ID NO: 32041 - RNA, 1736 nt, Artificial Sequence
  mRNA product Design a-2 (hSL-A64-N5) comprising derived and/or modified sequence from LASV(AV;Clade V)__CCA30314__GPCmut7 (opt4)
aggagaguccgcucagccagguugcagaagcggcuuagcguguguccuaaucuucucucugcguguagguaggccugugccgcaaacaagcuuaccaugggccagaucgugaccuucuuccaggaggugccccacgugaucgaggaggugaugaacaucgugcugaucgcccugagcauccuggccgugcugaagggccuguacaacaucgccaccugcggccugaucggccugaucaccuuccugcugcugugcggcagaagcugcagcagcaaccuguacaagggcguguacgagcugcagagccuggaccugaacauggagacccugaacaugaccaugccccugagcugcaccaagaacaacagccaccacuacaucagagugggcaacgacaccggccuggagcugacccugaccaacaccagcauccugaaccacaaguucugcaaccugagcgacgcccacaagaaggaccuguacgaccacgcccugaugagcaucaucagcaccuuccaccugagcauccccaacuucaaccaguacgaggccaugagcugcgacuucaacggcggcaagaucagcgugcaguacaaccugagccacagcuacgccaucgacgccgccaaccacugcggcaccguggccaacggcauccugcagaccuucaugagaauggccuggggcggcagcuacaucgcccuggacagcggcagaggcaacugggacugcaucaugaccagcuaccaguaccugaucauccagaacaccaccugggagaaccacugccaguucagcagacccagccccaucggcuaccugggccugcugagccagagaaccagagacaucuacaucagcagaagacugcugggcaccuucaccuggacccugagcgacagcgagggcaacgccacccccggcggcuacugccugaccagauggaugcugaucgaggccgagcugaagugcuucggcaacaccgccguggccaagugcaacgagaagcacgacgaggaguucugcgacaugcugagacuguucgacuucaacaagcaggccaucagcagacugaagagccccgcccagaugagcauccagcugaucaacaaggccgugaacgcccugaucaacgaccagcugaucaugaagaaccaccugagagacaucaugggcauccccuacugcaacuacagcaaguacugcuaccugaaccacaccaucaccggcaagaccagccugcccaagugcugccuggugagcaacggcagcuaccugaacgagacccacuucagcgacgacaucgagcagcaggccgacaacaugaucaccgagaugcugcagaaggaguacauggagagacagggcaagaccccccugggccugguggaccuguucguguucagcaccagcuucuaccugaucagcaucuuccugagacuggugaagauccccacccacagacacaucgugggcaagcccugccccaagccccacagacugaaccacaugggcaucugcagcugcggccuguacaagcagcccggcgugcccgugagauggaagagaugaggacuagucccuguucccagagcccacuuuuuuuucuuuuuuugaaauaaaauagccugucuuucagaucucaaaggcucuuuucagagccaccaaaaaaaaaaaaaaaaaaaaaaaaaaaaaaaaaaaaaaaaaaaaaaaaaaaaaaaaaaaaaaaaagaauu

SEQ ID NO: 32042 - RNA, 1733 nt, Artificial Sequence
  mRNA product Design a-2 (hSL-A64-N5) comprising derived and/or modified sequence from LASV(Togo/2016/7082;Clade VI)__AMR44577__GPCmut7 (opt4)
aggagaguccgcucagccagguugcagaagcggcuuagcguguguccuaaucuucucucugcguguagguaggccugugccgcaaacaagcuuaccaugggccagaucaucaccuucuuccaggaggugccccacgugaucgaggaggugaugaacaucgugcugaucgcccugagccugcuggccauccugaagggcguguacaacguggccaccugcggcaucaucggccuggugaccuuccuguuccugugcggcagaagcugcagccugaucuacaagggcagcuacgagcugcagacccuggagcugaacauggagacccugaacaugaccaugccccugagcugcaccaagaacagcagccaccacuacaucagagugggcaacgagaccggccuggagcugacccugaccaacaccagcaucaucaaccacaaguucugcaaccugagcgacgcccacaagagaaaccuguacgaccacgcccugaugagcauccugagcaccuuccaccugagcauccccaacuucaaccaguacgaggccaugagcugcgacuucaacggcggcaagaucagcgugcaguacaaccugagccacgccuacgccguggacgccgccgagcacugcggcaccguggccaacggcgugcugcagaccuucaugagaauggccuggggcggcagcuacaucgcccuggacagcggcagaggcaacugggacugcaucaugaccagcuaccaguaccugaucauccagaacaccaccugggaggaccacugccaguucagcagacccagccccaucggcuaccugggccugcugagccagagaaccagagacaucuacaucagcagaagacugcugggcaccuucaccuggacccugagcgacagcgagggcaacgagacccccggcggcuacugccugaccagauggaugcugaucgaggccgagcugaagugcuucggcaacaccgccguggccaagugcaacgagaagcacgacgaggaguucugcgacaugcugagacuguucgacuucaacaagcaggccauccagagacugaagagccccgcccagaugagcauccagcugaucaacaaggccgugaacgcccugaucaacgaccagcugaucaugaagaaccaccugagagacaugaugggcauccccuacugcaacuacagcaaguacugcuaccugaaccacaccagcagcggcagaaccagccugcccaagugcugccuggugagcaacggcagcuaccugaacgagacccacuucagcgacgacaucgagcagcaggccgacaacaugaucaccgagaugcugcagaaggaguacaucgacagacagggcaagaccccccugggccugguggaccuguucguguucagcaccagcuucuaccugaucagcaucuuccugcaccugaucaagauccccacccacagacacaucgugggcaagcccugccccaagccccacagacugaaccacaugggcaucugcagcugcggccuguacaagcagcccggcgugcccaccagauggaagagaugaggacuagucccuguucccagagcccacuuuuuuuucuuuuuuugaaauaaaauagccugucuuucagaucucaaaggcucuuuucagagccaccaaaaaaaaaaaaaaaaaaaaaaaaaaaaaaaaaaaaaaaaaaaaaaaaaaaaaaaaaaaaaaaaagaauu

SEQ ID NO: 32043 - RNA, 1733 nt, Artificial Sequence
  mRNA product Design a-2 (hSL-A64-N5) comprising derived and/or modified sequence from LASV(KAK-428;Clade n.d. (VII))__ANH09740__GPCmut7 (opt4)
aggagaguccgcucagccagguugcagaagcggcuuagcguguguccuaaucuucucucugcguguagguaggccugugccgcaaacaagcuuaccaugggccagaucgugaccuucuuccaggaggugccccacgugaucgaggaggugaugaacaucgugcugaucgcccugagccugcuggccauccugaagggccuguacaacuucgccaccugcggcgugaucggccugaucaccuuccugcugcugugcggcagaagcugcagcgccaccuacaagggccaguacgagcugcagacccuggagcugaacauggagagccugaacaugaccaugccccugagcugcaccaagaacaacagccaccacuacaucagagccggcaacaacaccggccuggagcugacccugaccaacaccagcaucaucagccacaaguucugcaaccugagcgacgcccacaagaagaaccuguacgaccacacccugaugagcaucaucaccaccuuccaccugagcauccccaacuucaaccaguacgaggccaugagcugcgacuucaacggcggcaagaucagcauccaguacaaccugagccacagcuacgccggcgacgccgcccagcacugcggcaccguggccaacggcgugcugcagaccuucaugagaauggccuggggcggcagcuaccuggcccuggacagcggcagaagaggcugggacugcaucaucagcagcuaccaguaccugaucauccagaacaccaccugggacgaccacugccaguucagcagacccagccccaucggcuaccugggcuucgugagccagaagaccagagacaucuacaucagcagaagacugcugggcaccuucaccuggacccugagcgacagcgagggccacgacaugcccggcggcuacugccugaccagauggaugcugaucgaggccgaccugaagugcuucggcaacaccgccguggccaagugcaacgagaagcacgacgaggaguucugcgacauguggagacuguucgacuucaacaagcaggccauccagagacugaaggcccccgcccagaugaacauccagcugaucaacaaggccgugaacgcccugaucaacgaccagcugaugaugaagaaccaccugagagacaucaugggcauccccuacugcaacuacagcaaguucugcuaccugaacaacaccaccaccggcagaaccagccugcccagaugcugccugaucagcaacggcagcuaccugaacgagacccacuucagcgacgacaucgagcagcaggccgacaacaugaucaccgagaugcugcagaaggaguacauggacagacagggcaagaccccccugggccugguggaccuguucguguucagcaccagcuucuaccugaucaccaucuuccugcaccuggugaagauccccacccacagacacaucgugggcaagcccugccccaagccccacagacugaaccacaugggcaucugcagcugcggccuguacaagcagcccggcgugcccgugagauggaagagaugaggacuagucccuguucccagagcccacuuuuuuuucuuuuuuugaaauaaaauagccugucuuucagaucucaaaggcucuuuucagagccaccaaaaaaaaaaaaaaaaaaaaaaaaaaaaaaaaaaaaaaaaaaaaaaaaaaaaaaaaaaaaaaaaagaauu

SEQ ID NO: 32044 - RNA, 1733 nt, Artificial Sequence; identical to SEQ ID NO: 32038
  mRNA product Design a-2 (hSL-A64-N5) comprising derived and/or modified sequence from LASV(Pinneo-NIG-1969;Clade I)__AIT17836__GPCmut7 (opt4)

SEQ ID NO: 32045 - RNA, 1733 nt, Artificial Sequence
  mRNA product Design a-2 (hSL-A64-N5) comprising derived and/or modified sequence from LASV(ISTH0009-NIG-2011;Clade II)__AIT17404__GPCmut7 (opt4)
aggagaguccgcucagccagguugcagaagcggcuuagcguguguccuaaucuucucucugcguguagguaggccugugccgcaaacaagcuuaccaugggccagaucaucaccuucuuccaggaggugccccacgugaucgaggaggugaugaacaucgugcugaucgcccugagccugcuggccauccugaagggcaucuacaacguggccaccugcggccuguucggccuggugagcuuccugcugcugugcggcagaagcugcagcaccaccuacaagggcguguacgagcugcagacccuggagcuggacauggccagccugaacaugaccaugccccugagcugcaccaagaacaacagccaccacuacaucauggugggcaacgagaccggccuggagcugacccugaccaacaccagcaucaucaaccacaaguucugcaaccugagcgacgcccacaagaagaaccuguacgaccacgcccugaugagcaucaucagcaccuuccaccugagcauccccaacuucaaccaguacgaggccaugagcugcgacuucaacggcggcaagaucagcgugcaguacaaccugagccacgccuacgccguggacgccgccaaccacugcggcaccaucgccaacggcgugcugcagaccuucaugagaauggccuggggcggcagcuacaucgcccuggacagcggcaagggcagcugggacugcaucaugaccagcuaccaguaccugaucauccagaacaccaccugggaggaccacugccaguucagcagacccagccccaucggcuaccugggccugcugagccagagaaccagagacaucuacaucagcagaagacugcugggcaccuucaccuggacccugagcgacagcgagggcaacgagacccccggcggcuacugccugaccagauggaugcugaucgaggccgagcugaagugcuucggcaacaccgccguggccaagugcaacgagaagcacgacgaggaguucugcgacaugcugagacuguucgacuucaacaagcaggccaucagaagacugaagacccccgcccagaugagcauccagcugaucaacaaggccgugaacgcccugaucaacgaccagcugaucaugaagaaccaccugagagacaucaugggcauccccuacugcaacuacagcaaguacugcuaccugaaccacaccgugaccggcaagaccagccugcccagaugcugccuggugagcaacggcagcuaccugaacgagacccacuucagcgacgacaucgagcagcaggccgacaacaugaucaccgagcugcugcagaaggaguacauggacagacagggcaagaccccccugggccugguggaccuguucguguucagcaccagcuucuaccugaucagcaucuuccugcaccugaucaagauccccacccacagacacaucaccggcaagcccugccccaagccccacagacugaaccacaugggcaucugcagcugcggccuguacaagcaccccggcgugcccgugaaguggaagagaugaggacuagucccuguucccagagcccacuuuuuuuucuuuuuuugaaauaaaauagccugucuuucagaucucaaaggcucuuuucagagccaccaaaaaaaaaaaaaaaaaaaaaaaaaaaaaaaaaaaaaaaaaaaaaaaaaaaaaaaaaaaaaaaaagaauu

SEQ ID NO: 32046 - RNA, 1733 nt, Artificial Sequence
  mRNA product Design a-2 (hSL-A64-N5) comprising derived and/or modified sequence from LASV(ISTH2010-NIG-2012;Clade II)__AIT17482__GPCmut7 (opt4)
aggagaguccgcucagccagguugcagaagcggcuuagcguguguccuaaucuucucucugcguguagguaggccugugccgcaaacaagcuuaccaugggccagaucaucaccuucuuccaggaggugccccacgugaucgaggaggugaugaacaucgugcugaucgcccugagccugcuggccauccugaagggcaucuacaacguggccaccugcggccuguucggccuggugagcuuccugcugcugugcggcagaagcugcagcaccaccuacaagggcguguacgagcugcagacccuggagcuggacauggccagccugaacaugaccaugccccugagcugcaccaagaacaacagccaccacuacaucauggugggcaacgagaccggccuggagcugacccugaccaacaccagcaucaucaaccacaaguucugcaaccugagcgacgcccacaagaagaaccuguacgaccacgcccugaugagcaucaucagcaccuuccaccugagcauccccaacuucaaccaguacgaggccaugagcugcgacuucaacggcggcaagaucagcgugcaguacaaccugagccacgccuacgccguggacgccgccaaccacugcggcaccaucgccaacggcgugcugcagaccuucaugagaauggccuggggcggcagcuacaucgcccuggacagcggcaagggcagcugggacugcaucaugaccagcuaccaguaccugaucauccagaacaucaccugggaggaccacugccaguucagcagacccagccccaucggcuaccugggccugcugagccagagaaccagagacaucuacaucagcagaagacugcugggcaccuucaccuggacccugagcgacagcgagggcaacgagacccccggcggcuacugccugaccagauggaugcugaucgaggccgagcugaagugcuucggcaacaccgccguggccaagugcaacgagaagcacgacgaggaguucugcgacaugcugagacuguucgacuucaacaagcaggccaucagaagacugaagacccccgcccagaugagcauccagcugaucaacaaggccgugaacgcccugaucaacgaccagcugaucaugaagaaccaccugagagacaucaugggcauccccuacugcaacuacagcaaguacugcuaccugaaccacaccgugaccggcaagaccagccugcccagaugcugccuggugagcaacggcagcuaccugaacgagacccacuucagcgacgacaucgagcagcaggccgacaacaugaucaccgagcugcugcagaaggaguacaucgacagacagggcaagaccccccugggccugguggaccuguucguguucagcaccagcuucuaccugaucagcaucuuccugcaccuggugaagauccccacccacagacacguggugggcaagcccugccccaagccccacagacugaaccacaugggcaucugcagcugcggccuguacaagcaccccggcgugcccgugaaguggaagagaugaggacuagucccuguucccagagcccacuuuuuuuucuuuuuuugaaauaaaauagccugucuuucagaucucaaaggcucuuuucagagccaccaaaaaaaaaaaaaaaaaaaaaaaaaaaaaaaaaaaaaaaaaaaaaaaaaaaaaaaaaaaaaaaaagaauu

SEQ ID NO: 32047 - RNA, 1733 nt, Artificial Sequence
  mRNA product Design a-2 (hSL-A64-N5) comprising derived and/or modified sequence from LASV(Lassa virus/H.sapiens-wt/NGA/2015/ISTH_0543;Clade II)__AVO03639__GPCmut7 (opt4)
aggagaguccgcucagccagguugcagaagcggcuuagcguguguccuaaucuucucucugcguguagguaggccugugccgcaaacaagcuuaccaugggccagaucaucaccuucuuccaggaggugccccacgugaucgaggaggugaugaacaucgugcugaucgcccugagccugcuggccauccugaagggcaucuacaacguggccaccugcggccuguucggccuggugagcuuccugcugcugugcggcagaagcugcagcaccaccuacaagggcguguacgagcugcagacccuggagcuggacauggccaaccugaacaugaccaugccccugagcugcaccaagaacaacagccaccacuacaucauggugggcaacgagaccggccuggagcugacccugaccaacaccagcaucaucaaccacaaguucugcaaccugagcgacgcccacaagaagaaccuguacgaccacgcccugaugagcaucaucagcaccuuccaccugagcauccccaacuucaaccaguacgaggccaugagcugcgacuucaacggcggcaagaucagcgugcaguacaaccugagccacaccuacgccguggacgccgccaaccacugcggcaccaucgccaacggcgugcugcagaccuucaugagaauggccuggggcggcagcuacaucgcccuggacagcggcaagggcagcugggacugcaucaugaccagcuaccaguaccuggugauccagaacaccaccugggaggaccacugccaguucagcagacccagccccaucggcuaccugggccugcugagccagagaaccagagacaucuacaucagcagaagacugcugggcaccuucaccuggacccugagcgacagcgagggcaacgagacccccggcggcuacugccugaccagauggaugcugaucgaggccgagcugaagugcuucggcaacaccgccguggccaagugcaacgagaagcacgacgaggaguucugcgacaugcugagacuguucgacuucaacaagcaggccaucagaagacugaagacccccgcccagaugagcauccagcugaucaacaaggccgugaacgcccugaucaacgaccagcugaucaugaagaaccaccugagagacaucaugggcauccccuacugcaacuacagcaaguacugcuaccugaaccacaccgugaccggcaagaccagccugcccagaugcugccuggugagcaacggcagcuaccugaacgagacccacuucagcgacgacaucgagcagcaggccgacaacaugaucaccgagcugcugcagaaggaguacaucgacagacagggcaagaccccccugggccugguggaccuguucguguucagcaccagcuucuaccugaucagcaucuuccugcaccuggugaagauccccacccacagacacaucaccggcaagcccugccccaagccccacagacugaaccacaugggcaucugcagcugcggccuguacaagcaccccggcgugcccgugaaguggaagagaugaggacuagucccuguucccagagcccacuuuuuuuucuuuuuuugaaauaaaauagccugucuuucagaucucaaaggcucuuuucagagccaccaaaaaaaaaaaaaaaaaaaaaaaaaaaaaaaaaaaaaaaaaaaaaaaaaaaaaaaaaaaaaaaaagaauu

SEQ ID NO: 32048 - RNA, 1733 nt, Artificial Sequence
  mRNA product Design a-2 (hSL-A64-N5) comprising derived and/or modified sequence from LASV(Lassa virus/H.sapiens-wt/NGA/2016/ISTH_0009;Clade II)__AVO03571__GPCmut7 (opt4)
aggagaguccgcucagccagguugcagaagcggcuuagcguguguccuaaucuucucucugcguguagguaggccugugccgcaaacaagcuuaccaugggccagaucaucaccuucuuccaggaggugccccacgugaucgaggaggugaugaacaucgugcugaucgcccugagccugcuggccauccugaagggcaucuacaacguggccaccugcggccugcugggccuggugagcuuccugcugcugugcggcagaagcugcagcaccaccuacaagggcguguacgagcugcagacccuggagcuggacauggccagccugaacaugaccaugccccugagcugcaccaagaacaacagccaccacuacaucauggugggcaacgagaccggccuggagcugacccugaccaacaccagcaucaucaaccacaaguucugcaaccugagcgacgcccacaagaagaaccuguacgaccacgcccugaugagcaucaucagcaccuuccaccugagcauccccaacuucaaccaguacgaggccaugagcugcgacuucaacggcggcagaaucagcgugcaguacaaccugagccacagcuacgccguggacgccgccaaccacugcggcaccaucgccaacggcgugcugcagaccuucaugagaauggccuggggcggcagcuacaucgcccuggacagcggcaagggcagcugggacugcaucaugaccagcuaccaguaccugaucauccagaacaccaccugggaggaccacugccaguucagcagacccagccccaucggcuaccugggccugcugagccagagaaccagagacaucuacaucagcagaagacugcugggcaccuucaccuggacccugagcgacagcgagggcaacgagacccccggcggcuacugccugaccagauggaugcugaucgaggccgagcugaagugcuucggcaacaccgccguggccaagugcaacgagaagcacgacgaggaguucugcgacaugcugagacuguucgacuucaacaagcaggccaucagaagacugaagacccccgcccagaugagcauccagcugaucaacaaggccgugaacgcccugaucaacgaccagcugaucaugaagaaccaccugagagacaucaugggcauccccuacugcaacuacagcaaguacugcuaccugaaccacaccgugaccggcaagaccagccugcccagaugcugccuggugagcaacggcagcuaccugaacgagacccacuucagcgacgacaucgagcagcaggccgacaacaugaucaccgagcugcugcagaaggaguacaucgacagacagggcaagaccccccugggccugguggaccuguucguguucagcaccagcuucuaccugaucagcaucuuccugcaccuggugaagauccccacccacagacacaucaccggcaagcccugccccaagccccacagacugaaccacaugggcaucugcagcugcggccuguacaaccaccccggcgugcccgugaaguggaagagaugaggacuagucccuguucccagagcccacuuuuuuuucuuuuuuugaaauaaaauagccugucuuucagaucucaaaggcucuuuucagagccaccaaaaaaaaaaaaaaaaaaaaaaaaaaaaaaaaaaaaaaaaaaaaaaaaaaaaaaaaaaaaaaaaagaauu

SEQ ID NO: 32049 - RNA, 1733 nt, Artificial Sequence
  mRNA product Design a-2 (hSL-A64-N5) comprising derived and/or modified sequence from LASV(Lassa virus/H.sapiens-wt/NGA/2016/ISTH_0017;Clade II)__AVO03567__GPCmut7 (opt4)
aggagaguccgcucagccagguugcagaagcggcuuagcguguguccuaaucuucucucugcguguagguaggccugugccgcaaacaagcuuaccaugggccagaucaucaccuucuuccaggaggugccccacgugaucgaggaggugaugaacaucgugcugaucgcccugagccugcuggccauccugaagggcaucuacaacguggccaccugcggccuguucggccuggugagcuuccugcugcugugcggcagaagcugcagcaccaccuacaagggcguguacgagcugcagacccuggagcuggacauggccagccugaacaugaccaugccccugagcugcaccaagaacaacagccaccacuacaucauggugggcaacgagaccggccuggagcugacccugaccaacaccagcaucaucaaccacaaguucugcaaccugagcgacgcccacaagaagaaccuguacgaccacgcccugaugagcaucaucagcaccuuccaccugagcauccccaacuucaaccaguacgaggccaugagcugcgacuucaacggcggcaagaucagcgugcaguacaaccugagccacaccuacgccaucgacgccgccaaccacugcggcaccaucgccaacggcgugcugcagaccuucaugagaauggccuggggcggcagcuacaucgcccuggacagcggcaagggcagcugggacugcaucaugaccagcuaccaguaccugaucauccagaacaccaccugggaggaccacugccaguucagcagacccagccccaucggcuaccugggccugcugagccagagaaccagagacaucuacaucagcagaagacugcugggcaccuucaccuggacccugagcgacagcgagggcaacgagacccccggcggcuacugccugaccagauggaugcugaucgaggccgagcugaagugcuucggcaacaccgccguggccaagugcaacgagaagcacgacgaggaguucugcgacaugcugagacuguucgacuucaacaagcaggccaucagaagacugaagacccccgcccagaugagcauccagcugaucaacaaggccgugaacgcccugaucaacgaccagcugaucaugaagaaccaccugagagacaucaugggcauccccuacugcaacuacagcaaguacugcuaccugaaccacaccgugaccggcaagaccagccugcccagaugcugccuggugagcaacggcagcuaccugaacgagacccacuucagcgacgacaucgagcagcaggccgacaacaugaucaccgagcugcugcagaaggaguacauggacagacagggcaagaccccccugggccugguggaccuguucguguucagcaccagcuucuaccugaucagcaucuuccugcaccuggugagaauccccacccacagacacgugaucggcaagcccugccccaagccccacagacugaaccacaugggcaucugcagcugcggccuguacaagcaccccggcgugcccgugaaguggaagagaugaggacuagucccuguucccagagcccacuuuuuuuucuuuuuuugaaauaaaauagccugucuuucagaucucaaaggcucuuuucagagccaccaaaaaaaaaaaaaaaaaaaaaaaaaaaaaaaaaaaaaaaaaaaaaaaaaaaaaaaaaaaaaaaaagaauu

SEQ ID NO: 32050 - RNA, 1733 nt, Artificial Sequence
  mRNA product Design a-2 (hSL-A64-N5) comprising derived and/or modified sequence from LASV(Lassa virus/H.sapiens-wt/NGA/2018/ISTH_0959;Clade II)__AVV65099__GPCmut7 (opt4)
aggagaguccgcucagccagguugcagaagcggcuuagcguguguccuaaucuucucucugcguguagguaggccugugccgcaaacaagcuuaccaugggccagaucaucaccuucuuccaggaggugccccacgugaucgaggaggugaugaacaucgugcugaucgcccugagccugcuggccauccugaagggcaucuacaacguggugaccugcggccuguucggccuggugagcuuccugcugcugugcggcagaagcugcagcaccaccuacaagggcguguacgagcugcagacccuggagcuggacauggccagccugaacaugaccaugccccugagcugcaccaagaacaacagccaccacuacaucauggugggcaacgagaccggccuggagcugacccugaccaacaccagcaucaucaaccacaaguucugcaaccugagcgacgcccacaagaagaaccuguacgaccacgcccugaugagcaucaucagcaccuuccaccugagcauccccaacuucaaccaguacgaggccaugagcugcgacuucaacggcggcaagaucagcgugcaguacaaccugagccacgccuacgccaucgacgccgccaaccacugcggcaccaucgccaacggcgugcugcagaccuucaugagaauggccuggggcggcagcuacaucgcccuggacagcggcaagggcagcugggacugcaucaugaccagcuaccaguaccugaucauccagaacaccaccugggaggaccacugccaguucagcagacccagccccaucggcuaccugggccugcugagccagagaaccagagacaucuacaucagcagaagacugcugggcaccuucaccuggacccugagcgacagcgagggcaacgagacccccggcggcuacugccugaccagauggaugcugaucgaggccgagcugaagugcuucggcaacaccgccguggccaagugcaacgagaagcacgacgaggaguucugcgacaugcugagacuguucgacuucaacaagcaggccaucagaagacugaagacccccgcccagaugagcauccagcugaucaacaaggccgugaacgcccugaucaacgaccagcugaucaugaagaaccaccugagagacaucaugggcauccccuacugcaacuacagcaaguacugcuaccugaaccacaccgugaccggcaagaccagccugcccagaugcugccuggugagcaacggcagcuaccugaacgagacccacuucagcgacgacaucgagcagcaggccgacaacaugaucaccgagcugcugcagaaggaguacaucgacagacagggcaagaccccccugggccugguggaccuguucguguucagcaccagcuucuaccugaucagcaucuuccugcaccuggugaagauccccacccacagacacgugaucggcaagcccugccccaagccccacagacugaaccacaugggcaucugcagcugcggccuguacaagcaccccggcgugcccgugaaguggaagagaugaggacuagucccuguucccagagcccacuuuuuuuucuuuuuuugaaauaaaauagccugucuuucagaucucaaaggcucuuuucagagccaccaaaaaaaaaaaaaaaaaaaaaaaaaaaaaaaaaaaaaaaaaaaaaaaaaaaaaaaaaaaaaaaaagaauu

SEQ ID NO: 32051 - RNA, 1733 nt, Artificial Sequence
  mRNA product Design a-2 (hSL-A64-N5) comprising derived and/or modified sequence from LASV(LASV003-NIG-2008;Clade II)__AIT17580__GPCmut7 (opt4)
aggagaguccgcucagccagguugcagaagcggcuuagcguguguccuaaucuucucucugcguguagguaggccugugccgcaaacaagcuuaccaugggccagaucaucaccuucuuccaggaggugccccacgugaucgaggaggugaugaacaucgugcugaucgcccugagccugcuggccauccugaagggcaucuacaacguggccaccugcggccuguucggccuggugagcuuccugcugcugugcggcagaagcugcagcaccaccuacaagggcguguacgagcugcagacccuggagcuggacauggccagccugaacaugaccaugccccugagcugcaccaagaacaacagccaccacuacaucauggugggcaacgagaccggccuggagcugacccugaccaacaccagcaucaucaaccacaaguucugcaaccugagcgacgcccacaagaagaaccuguacgaccacgcccugaugagcaucaucagcaccuuccaccugagcauccccaacuucaaccaguacgaggccaugagcugcgacuucaacggcggcaagaucagcgugcaguacaaccugagccacaccuacgccguggacgccgccaaccacugcggcaccaucgccaacggcgugcugcagaccuucaugagaauggccuggggcggcagcuacaucgcccuggacagcggcaagggcagcugggacugcaucaugaccagcuaccaguaccugaucauccagaacaccaccugggaggaccacugccaguucagcagacccagccccaucggcuaccugggccugcugagccagagaaccagagacaucuacaucagcagaagacugcugggcaccuucaccuggacccugagcgacagcgagagcaacgagacccccggcggcuacugccugaccagauggaugcugaucgaggccgagcugaagugcuucggcaacaccgccguggccaagugcaacgagaagcacgacgaggaguucugcgacaugcugagacuguucgacuucaacaagcaggccaucagaagacugaaggcccccgcccagaugagcauccagcugaucaacaaggccgugaacgcccugaucaacgaccagcugaucaugaagaaccaccugagagacaucaugggcauccccuacugcaacuacagcaaguacugcuaccugaaccacaccgugaccggcagaaccagccugcccagaugcugccuggugagcaacggcagcuaccugaacgagacccacuucagcgacgacaucgagcagcaggccgacaacaugaucaccgagcugcugcagaaggaguacauggacagacagggcaagaccccccugggccugguggaccuguucguguucagcaccagcuucuaccugaucagcaucuuccugcaccuggugaagauccccacccacagacacgugaucggcaagcccugccccaagccccacagacugaaccacaugggcaucugcagcugcggccuguacaagcaccccggcgugcccgugaaguggaagagaugaggacuagucccuguucccagagcccacuuuuuuuucuuuuuuugaaauaaaauagccugucuuucagaucucaaaggcucuuuucagagccaccaaaaaaaaaaaaaaaaaaaaaaaaaaaaaaaaaaaaaaaaaaaaaaaaaaaaaaaaaaaaaaaaagaauu

SEQ ID NO: 32052 - RNA, 1733 nt, Artificial Sequence
  mRNA product Design a-2 (hSL-A64-N5) comprising derived and/or modified sequence from LASV(LASV035-NIG-2009;Clade II)__AIT17588__GPCmut7 (opt4)
aggagaguccgcucagccagguugcagaagcggcuuagcguguguccuaaucuucucucugcguguagguaggccugugccgcaaacaagcuuaccaugggccagaucaucaccuucuuccaggaggugccccacgugaucgaggaggugaugaacaucgugcugaucgcccugagccugcuggccauccugaagggcaucuacaacguggccaccugcggccuguucggccuggugagcuuccugcugcugugcggcagaagcugcagcaccaccuacaagggcguguacgagcugcagacccuggagcuggacauggccagccugaacaugaccaugccccugagcugcaccaagaacaacagccaccacuacaucauggugggcaacgagaccggccuggagcugacccugaccaacaccagcaucaucaaccacaaguucugcaaccugagcgacgcccacaagaagaaccuguacgaccacgcccugaugagcaucaucagcaccuuccaccugagcauccccaacuucaaccaguacgaggccaugagcugcgacuucaacggcggcaagaucagcgugcaguacaaccugagccacgccuacgccguggacgccgccaaccacugcggcaccaucgccaacggcgugcugcagaccuucaugagaauggccuggggcggcagcuacaucgcccuggacagcggcaagggcagcugggacugcaucaugaccagcuaccaguaccugaucauccagaacaccaccugggaggaccacugccaguucagcagacccagccccaucggcuaccugggccugcugagccagagaaccagagacaucuacaucagcagaagacugcugggcaccuucaccuggacccugagcgacagcgagggcaacgagacccccggcggcuacugccugaccagauggaugcugaucgaggccgagcugaagugcuucggcaacaccgccguggccaagugcaacgagaagcacgacgaggaguucugcgacaugcugagacuguucgacuucaacaagcaggccaucagaagacugaaggcccccgcccagaugagcauccagcugaucaacaaggccgugaacgcccugaucaacgaccagcugaucaugaagaaccaccugagagacaucaugggcauccccuacugcaacuacagcaaguacugcuaccugaaccacaccgugaccggcaagaccagccugcccagaugcugccuggugagcaacggcagcuaccugaacgagacccacuucagcgacgacaucgagcagcaggccgacaacaugaucaccgagcugcugcagaaggaguacaucgacagacagggcaagaccccccugggccugguggaccuguucguguucagcaccagcuucuaccugaucagcaucuuccugcaccuggugaagauccccacccacagacacgugaucggcaagcccugccccaagccccacagacugaaccacaugggcaucugcagcugcggccuguacaagcaccccggcgugcccgugaaguggaagagaugaggacuagucccuguucccagagcccacuuuuuuuucuuuuuuugaaauaaaauagccugucuuucagaucucaaaggcucuuuucagagccaccaaaaaaaaaaaaaaaaaaaaaaaaaaaaaaaaaaaaaaaaaaaaaaaaaaaaaaaaaaaaaaaaagaauu

SEQ ID NO: 32053 - RNA, 1733 nt, Artificial Sequence
  mRNA product Design a-2 (hSL-A64-N5) comprising derived and/or modified sequence from LASV(LASV1000-NIG-2009;Clade II)__AIT17782__GPCmut7 (opt4)
aggagaguccgcucagccagguugcagaagcggcuuagcguguguccuaaucuucucucugcguguagguaggccugugccgcaaacaagcuuaccaugggccagaucaucaccuucuuccaggaggugccccacgugaucgaggaggugaugaacaucgugcugaucgcccugagccugcuggccauccugaagggcaucuacaacguggccaccugcggccuguucggccuggugagcuuccugcugcugugcggcagaagcugcagcaccaccuacaagggcguguacgagcugcagacccuggagcuggacauggccagccugaacaugaccaugccccugagcugcaccaagaacaacagccaccacuacaucauggugggcaacgagaccggccuggagcugacccugaccaacaccagcaucaucaaccacaaguucugcaaccugagcgacgcccacaagaagaaccuguacgaccacgcccugaugagcaucaucagcaccuuccaccugagcauccccaacuucaaccaguacgaggccaugagcugcgacuucaacggcggcaagaucagcgugcaguacaaccugagccacaccuacgccguggacgccgccaaccacugcggcaccaucgccaacggcgugcugcagaccuucaugagaauggccuggggcggcagcuacaucgcccuggacagcggcaagggcagcugggacugcaucaugaccagcuaccaguaccugaucauccagaacaccaccugggaggaccacugccaguucagcagacccagccccaucggcuaccugggccugcugagccagagaaccagagacaucuacaucagcagaagacugcugggcaccuucaccuggacccugagcgacagcgagggcaacgagacccccggcggcuacugccugaccagauggaugcugaucgaggccgagcugaagugcuucggcaacaccgccguggccaagugcaacgagaagcacgacgaggaguucugcgacaugcugagacuguucgacuucaacaagcaggccaucaagagacugaagacccccgcccagaugagcauccagcugaucaacaaggccgugaacgcccugaucaacgaccagcugaucaugaagaaccaccugagagacaucaugggcauccccuacugcaacuacagcaaguacugcuaccugaaccacaccgugaccggcaagaccagccugcccagaugcugccuggugagcaacggcagcuaccugaacgagacccacuucagcgacgacaucgagcagcaggccgacaacaugaucaccgagcugcugcagaaggaguacaucgacagacagggcaagaccccccugggccugguggaccuguucguguucagcaccagcuucuaccugaucagcaucuuccugcaccuggugaagauccccacccacagacacguggugggcaagcccugccccaagccccacagacugaaccacaugggcaucugcagcugcggccuguacaagcaccccggcgugcccgugaaguggaagagaugaggacuagucccuguucccagagcccacuuuuuuuucuuuuuuugaaauaaaauagccugucuuucagaucucaaaggcucuuuucagagccaccaaaaaaaaaaaaaaaaaaaaaaaaaaaaaaaaaaaaaaaaaaaaaaaaaaaaaaaaaaaaaaaaagaauu

SEQ ID NO: 32054 - RNA, 1733 nt, Artificial Sequence
  mRNA product Design a-2 (hSL-A64-N5) comprising derived and/or modified sequence from LASV(LASV221-NIG-2010;Clade II)__AIT17624__GPCmut7 (opt4)
aggagaguccgcucagccagguugcagaagcggcuuagcguguguccuaaucuucucucugcguguagguaggccugugccgcaaacaagcuuaccaugggccagaucaucaccuucuuccaggaggugccccacgugaucgaggaggugaugaacaucgugcugaucgcccugagccugcuggccauccugaagggcaucuacaacguggccaccugcggccuguucggccuggugagcuuccugcugcugugcggcagaagcugcagcaccaccuacaagggcguguacgagcugcagacccuggagcuggacauggccagccugaacaugaccaugccccugagcugcaccaagaacaacagccaccacuacaucauggugggcaacgagaccggccuggagcugacccugaccaacaccagcaucaucaaccacaaguucugcaaccugagcgacgcccacaagaagaaccuguacgaccacgcccugaugagcaucaucagcaccuuccaccugagcauccccaacuucaaccaguacgaggccaugagcugcgacuucaacggcggcaagaucagcgugcaguacaaccugagccacaccuacgccaucgacgccgccaaccacugcggcaccaucgccaacggcgugcugcagaccuucaugagaauggccuggggcggcagcuacaucgcccuggacagcggcaagggcagcugggacugcaucaugaccagcuaccaguaccugaucauccagaacaccaccugggaggaccacugccaguucagcagacccagccccaucggcuaccugggccugcugagccagagaaccagagacaucuacaucagcagaagacugcugggcaccuucaccuggacccugagcgacagcgagggcaacgagacccccggcggcuacugccugaccagauggaugcugaucgaggccgagcugaagugcuucggcaacaccgccguggccaagugcaacgagaagcacgacgaggaguucugcgacaugcugagacuguucgacuucaacaagcaggccaucagaagacugaagacccccgcccagaugagcauccagcugaucaacaaggccgugaacgcccugaucaacgaccagcugaucaugaagaaccaccugagagacaucaugggcauccccuacugcaacuacagcaaguacugcuaccugaaccacaccgugaccggcaagaccagccugcccagaugcugccuggugagcaacggcagcuaccugaacgagacccacuucagcgacgacaucgagcagcaggccgacaacaugaucaccgagaugcugcagaaggaguacauggacagacagggcaagaccccccugggccugguggaccuguucguguucagcaccagcuucuaccugaucagcaucuuccugcaccuggugaagauccccacccacagacacgugaucggcaagcccugccccaagccccacagacugaaccacaugggcaucugcagcugcggccuguacaagcaccccggcgugcccgugaaguggaagagaugaggacuagucccuguucccagagcccacuuuuuuuucuuuuuuugaaauaaaauagccugucuuucagaucucaaaggcucuuuucagagccaccaaaaaaaaaaaaaaaaaaaaaaaaaaaaaaaaaaaaaaaaaaaaaaaaaaaaaaaaaaaaaaaaagaauu

SEQ ID NO: 32055 - RNA, 1733 nt, Artificial Sequence
  mRNA product Design a-2 (hSL-A64-N5) comprising derived and/or modified sequence from LASV(LASV237-NIG-2010;Clade II)__AIT17638__GPCmut7 (opt4)
aggagaguccgcucagccagguugcagaagcggcuuagcguguguccuaaucuucucucugcguguagguaggccugugccgcaaacaagcuuaccaugggccagaucaucaccuucuuccaggaggugccccacgugaucgaggaggugaugaacaucgugcugaucgcccugagccugcuggccauccugaagggcaucuacaacguggccaccugcggccuguucggccuggugagcuuccugcugcugugcggcagaagcugcagcaccaccuacaagggcguguacgagcugcagacccuggagcuggacauggccagccugaacaugaccaugccccugagcugcaccaagaacaacagccaccacuacaucauggugggcaacgagaccggccuggagcugacccugaccaacaccagcaucaucaaccacaaguucugcaaccugagcgacgcccacaagaaggaccuguacgaccacgcccugaugagcaucaucagcaccuuccaccugagcauccccaacuucaaccaguacgaggccaugagcugcgacuucaacggcggcaagaucagcgugcaguacaaccugagccacaccuacgccguggacgccgccaaccacugcggcaccaucgccaacggcgugcugcagaccuucaugagaauggccuggggcggcagcuacaucgcccuggacagcggcaagggcagcugggacugcaucaugaccagcuaccaguaccugaucauccagaacaccaccugggaggaccacugccaguucagcagacccagccccaucggcuaccugggccugcugagccagagaaccagagacaucuacaucagcagaagacugcugggcaccuucaccuggacccugagcgacagcgagggcaacgagacccccggcggcuacugccugaccagauggaugcugaucgaggccgagcugaagugcuucggcaacaccgccguggccaagugcaacgagaagcacgacgaggaguucugcgacaugcugagacuguucgacuucaacaagcaggccaucagaagacugaagacccccgcccagaugagcauccagcugaucaacaaggccgugaacgcccugaucaacgaccagcugaucaugaagaaccaccugagagacaucaugggcauccccuacugcaacuacagcaaguacugcuaccugaaccacaccgugaccggcaagaccagccugcccagaugcugccuggugagcaacggcagcuaccugaacgagacccacuucagcgacgacaucgagcagcaggccgacaacaugaucaccgagcugcugcagaaggaguacauggacagacagggcaagaccccccugggccugguggaccuguucguguucagcaccagcuucuaccugaucagcaucuuccugcaccugaucaagauccccacccacagacacaucaccggcaagcccugccccaagccccacagacugaaccacaugggcaucugcagcugcggccuguacaagcaccccggcgugcccgugaaguggaagagaugaggacuagucccuguucccagagcccacuuuuuuuucuuuuuuugaaauaaaauagccugucuuucagaucucaaaggcucuuuucagagccaccaaaaaaaaaaaaaaaaaaaaaaaaaaaaaaaaaaaaaaaaaaaaaaaaaaaaaaaaaaaaaaaaagaauu

SEQ ID NO: 32056 - RNA, 1733 nt, Artificial Sequence
  mRNA product Design a-2 (hSL-A64-N5) comprising derived and/or modified sequence from LASV(LASV253-NIG-2011;Clade II)__AIT17670__GPCmut7 (opt4)
aggagaguccgcucagccagguugcagaagcggcuuagcguguguccuaaucuucucucugcguguagguaggccugugccgcaaacaagcuuaccaugggccagaucaucaccuucuuccaggaggugccccacgugaucgaggaggugaugaacaucgugcugaucgcccugagccugcuggccauccugaagggcaucuacaacguggccaccugcggccuguucggccuggugagcuuccugcugcugugcggcagaagcugcagcaccaccuacaagggcguguacgagcugcagacccuggagcuggacauggccagccugaacaugaccaugccccugagcugcaccaagaacaacagccaccacuacaucauggugggcaacgagaccggccuggagcugacccugaccaacaccagcaucaucaaccacaaguucugcaaccugagcgacgcccacaagaagaaccuguacgaccacgcccugaugagcaucaucagcaccuuccaccugagcauccccaacuucaaccaguacgaggccaugagcugcgacuucaacggcggcaagaucagcgugcaguacaaccugagccacaccuacgccguggacgccgccaaccacugcggcaccaucgccaacggcgugcugcagaccuucaugagaauggccuggggcggcagcuacaucgcccuggacagcggcaagggcagcugggacugcaucaugaccagcuaccaguaccugaucauccagaacaccaccugggaggaccacugccaguucagcagacccagccccaucggcuaccugggccugcugagccagagaaccagagacaucuacaucagcagaagacugcugggcaccuucaccuggacccugagcgacagcgagggcaacgagacccccggcggcuacugccugaccagauggaugcugaucgaggccgagcugaagugcuucggcaacaccgccguggccaagugcaacgagaagcacgacgaggaguucugcgacaugcugagacuguucgacuucaacaagcaggccaucagaagacugaaggcccccgcccagaugagcauccagcugaucaacaaggccgugaacgcccugaucaacgaccagcugaucaugaagaaccaccugagagacaucaugggcauccccuacugcaacuacagcaaguacugcuaccugaaccacaccgugaccggcagaaccagccugcccagaugcugccuggugagcaacggcagcuaccugaacgagacccacuucagcgacgacaucgagcagcaggccgacaacaugaucaccgagcugcugcagaaggaguacaucgacagacagggcaagaccccccugggccugguggaccuguucguguucagcaccagcuucuaccugaucagcaucuuccugcaccuggugaagauccccacccacagacacaucaucggcaagcccugccccaagccccacagacugaaccacaugggcaucugcagcugcggccuguacaagcaccccggcgugcccgugaaguggaagagaugaggacuagucccuguucccagagcccacuuuuuuuucuuuuuuugaaauaaaauagccugucuuucagaucucaaaggcucuuuucagagccaccaaaaaaaaaaaaaaaaaaaaaaaaaaaaaaaaaaaaaaaaaaaaaaaaaaaaaaaaaaaaaaaaagaauu

SEQ ID NO: 32057 - RNA, 1733 nt, Artificial Sequence
  mRNA product Design a-2 (hSL-A64-N5) comprising derived and/or modified sequence from LASV(LASV254-NIG-2011;Clade II)__AIT17674__GPCmut7 (opt4)
aggagaguccgcucagccagguugcagaagcggcuuagcguguguccuaaucuucucucugcguguagguaggccugugccgcaaacaagcuuaccaugggccagaucaucaccuucuuccaggaggugccccacgugaucgaggaggugaugaacaucgugcugaucgcccugagccugcuggccauccugaagggcaucuacaacguggccaccugcggccuguucggccuggugagcuuccugcugcugugcggcagaagcugcagcaccaccuacaagggcguguacgagcugcagacccuggagcuggacaugaccaaccugaacaugaccaugccccugagcugcaccaagaacaacagccaccacuacaucauggugggcaacgagaccggccuggagcugacccugaccaacaccagcaucaucaaccacaaguucugcaaccugagcgacgcccacaagaagaaccuguacaaccacgcccugaugagcaucaucagcaccuuccaccugagcauccccaacuucaaccaguacgaggccaugagcugcgacuucaacggcggcaagaucagcgugcaguacaaccugagccacagcuacgccguggacgccgccaaccacugcggcaccaucgccaacggcgugcugcagaccuucaugagaauggccuggggcggcagcuacaucgcccuggacagcggcaagggcaacugggacugcaucaugaccagcuaccaguaccugaucauccagaacaccaccugggaggaccacugccaguucagcagacccagccccaucggcuaccugggccugcugagccagagaaccagagacaucuacaucagcagaagacugcugggcaccuucaccuggacccugagcgacagcgagggcaacgagacccccggcggcuacugccugaccagauggaugcugaucgaggccgagcugaagugcuucggcaacaccgccguggccaagugcaacgagaagcacgacgaggaguucugcgacaugcugagacuguucgacuucaacaagcaggccaucagaagacugaagacccccgcccaggccaacauccagcugaucaacaaggccgugaacgcccugaucaacgaccagcugaucaugaagaaccaccugagagacaucaugggcauccccuacugcaacuacagcaaguacugcuaccugaaccacaccgugaccggcaagaccagccugcccagaugcugccuggugagcaacggcagcuaccugaacgagacccacuucagcgacgacaucgagcagcaggccgacaacaugaucaccgagcugcugcagaaggaguacauggacagacagggcaagaccccccugggccugguggaccuguucguguucagcaccagcuucuaccugaucagcaucuuccugcaccuggugaagauccccacccacagacacgugaucggcaagcccugccccaagccccacagacugaaccacaugggcaucugcagcugcggccuguacaagcaccccggcgugcccgugaaguggaagagaugaggacuagucccuguucccagagcccacuuuuuuuucuuuuuuugaaauaaaauagccugucuuucagaucucaaaggcucuuuucagagccaccaaaaaaaaaaaaaaaaaaaaaaaaaaaaaaaaaaaaaaaaaaaaaaaaaaaaaaaaaaaaaaaaagaauu

SEQ ID NO: 32058 - RNA, 1733 nt, Artificial Sequence
  mRNA product Design a-2 (hSL-A64-N5) comprising derived and/or modified sequence from LASV(Nig08-A19;Clade III)__ADU56618__GPCmut7 (opt4)
aggagaguccgcucagccagguugcagaagcggcuuagcguguguccuaaucuucucucugcguguagguaggccugugccgcaaacaagcuuaccaugggccagaucgugaccuucuuccaggaggugccccacgugaucgaggaggugaugaacaucgugcugaucgcccugagcauccuggccauccugaagggccuguacaacaucgccaccugcggccugaucggccuggugaccuuccugcugcugagcggcagaagcugcagcaugaccuacaagggcguguacgagcugcagacccuggagcugaacaugaacacccugaacaugaccaugccccugagcugcaccaagaacaacagccaccacuacaucauggugggcaacgagaccggccuggagcugacccugaccaacaccagccugcugcaccacaaguucugcaaccugagcgacgcccacaagaagaaccuguacgaccacacccugaugagcaucaucagcaccuuccaccugagcauccccaacuucaaccaguacgaggccaugagcugcgacuucaacggcggcaagaucaccgugcaguacaaccugagccacagcuacgccaucgacgccgccaaccacugcggcaccguggccaacggcgugcugcagaccuucaugagaauggccuggggcggcagcuacaucgcccuggacagcggcagaggcaagugggacugcaucaugaccagcuaccaguaccugaucauccagaacaccaccugggaggaccacugccaguucagcagacccagccccaucggcuaccugggccugcugagccagagaaccagagacaucuacaucagcagaagacugcugggcaccuucaccuggacccugagcgacagcgagggcaacgagacccccggcggcuacugccugaccagauggaugcugaucgaggccgagcugaagugcuucggcaacaccgccguggccaagugcaacgagaagcacgacgaggaguucugcgacaugcugagacuguucgacuucaacaagcaggccaucagaagacugaaggcccccgcccagaugagcauccagcugaucaacaaggccgugaacgcccugaucaacgaccagcugaucaugaagaaccaccugagagacaucaugggcauccccuacugcaacuacagcaaguacugcuaccugaaccacaccagcaccggcagaaccagccugcccagaugcugccuggugagcaacggcagcuaccugaacgagacccacuucagcgacgacaucgagcagcaggccgacaacaugaucaccgagaugcugcagaaggaguaccuggacagacagggcaagaccccccugggccugguggaccuguucguguucagcaccagcuucuaccugaucagcaucuuccugcaccuggugaagauccccacccacagacacaucgugggcaagcccugccccaagccccacagacugaaccacaugggcaucugcagcugcggccuguacaagcagcccggcgugcccgugagauggaagagaugaggacuagucccuguucccagagcccacuuuuuuuucuuuuuuugaaauaaaauagccugucuuucagaucucaaaggcucuuuucagagccaccaaaaaaaaaaaaaaaaaaaaaaaaaaaaaaaaaaaaaaaaaaaaaaaaaaaaaaaaaaaaaaaaagaauu

SEQ ID NO: 32059 - RNA, 1736 nt, Artificial Sequence
  mRNA product Design a-2 (hSL-A64-N5) comprising derived and/or modified sequence from LASV(G1180-SLE-2010;Clade IV)__AIT17168__GPCmut7 (opt4)
aggagaguccgcucagccagguugcagaagcggcuuagcguguguccuaaucuucucucugcguguagguaggccugugccgcaaacaagcuuaccaugggccagaucgugaccuucuuccaggaggugccccacgugaucgaggaggugaugaacaucgugcugaucgcccugagcauccuggccgugcugaagggccuguacaacuucgccaccugcggccuggugggccugcugaccuuccugcugcugugcggcagaagcugcaccgccagcagauacaagggcguguacgagcugcagacccuggagcugaacauggagacccugaacaugaccaugccccugagcugcaccaagaacaacagccaccacuacaucauggugggcaacgagaccggccuggagcugacccugaccaacaccagcaucaucaaccacaaguucugcaaccugagcgacgcccacaagaagaaccuguacgaccacgcccugaugagcaucaucagcaccuuccaccugagcauccccaacuucaaccaguacgaggccaugagcugcgacuucaacggcggcaagaucagcgugcaguacaaccugagccacagcuacgccggcgacgccgccaaccacugcggcaccguggccaacggcgugcugcagaccuucaugagaauggccuggggcggcagcuacaucgcccuggacagcggccacggcagcugggacugcaucaugaccagcuaccaguaccugaucauccagaacaccaccugggaggaccacugccaguucagcagacccagccccaucggcuaccugggccugcugagccagagaaccagagacaucuacaucagcagaagacugcugggcaccuucaccuggacccugagcgacagcgagggcaaggacacccccggcggcuacugccugaccagauggaugcugaucgaggccgagcugaagugcuucggcaacaccgccguggccaagugcaacgagaagcacgacgaggaguucugcgacaugcugagacuguucgacuucaacaagcaggccauccagagacugaaggcccccgcccagaugagcauccagcugaucaacaaggccgugaacgcccugaucaacgaccagcugaucaugaagaaccaccugagagacaucaugggcauccccuacugcaacuacagcaaguacugcuaccugaaccacaccaccaccggcaagaccagccugcccaagugcugccuggugagcaacggcagcuaccugaacgagacccacuucagcgacgacaucgagcagcaggccgacaacaugaucaccgagaugcugcagaaggaguacauggagagacagggcaagaccccccugggccugguggaccuguucguguucagcaccagcuucuaccugaucagcaucuuccugcaccuggugaagauccccacccacagacacaucgugggcaagagcugccccaagccccacagacugaaccacaugggcaucugcagcugcggccuguacaagcagcccggcgugcccgugaaguggaagagaugaggacuagucccuguucccagagcccacuuuuuuuucuuuuuuugaaauaaaauagccugucuuucagaucucaaaggcucuuuucagagccaccaaaaaaaaaaaaaaaaaaaaaaaaaaaaaaaaaaaaaaaaaaaaaaaaaaaaaaaaaaaaaaaaagaauu

SEQ ID NO: 32060 - RNA, 1736 nt, Artificial Sequence
  mRNA product Design a-2 (hSL-A64-N5) comprising derived and/or modified sequence from LASV(G1442-SLE-2011;Clade IV)__AIT17180__GPCmut7 (opt4)
aggagaguccgcucagccagguugcagaagcggcuuagcguguguccuaaucuucucucugcguguagguaggccugugccgcaaacaagcuuaccaugggccagaucgugaccuucuuccaggaggugccccacgugaucgaggaggugaugaacaucgugcugaucgcccugagcauccuggccgugcugaagggccuguacaacguggccaccugcggccugaucggccuggugaccuuccugcugcugugcggcagaagcugcaccaccacccuguacaagggcguguacgagcugcagacccuggagcugaacauggagacccugaacaugaccaugccccugagcugcaccaagaacaacagccaccacuacaucagagugggcaacgagaccggccuggagcugacccugaccaacaccagcaucaucaaccacaaguucugcaaccugagcgacgcccacaagaagaaccuguacgaccacgcccugaugagcaucaucagcaccuuccaccugagcauccccaacuucaaccaguacgaggccaugagcugcgacuucaacggcggcaagaucagcgugcaguacaaccugagccacagcuacgccggcgacgccgccaaccacugcggcaccguggccaacggcgugcugcagaccuucaugagaauggccuggggcggcagcuacaucgcccuggacagcggcagaggcaacugggacugcaucaugaccagcuaccaguaccugaucauccagaacaccaccugggacgaccacugccaguucagcagacccagccccaucggcuaccugggccugcugagccagagaaccagagacguguacaucagcagaagacugcugggcaccuucaccuggacccugagcgacagcgagggcaaggacacccccggcggcuacugccugaccagauggaugcugaucgaggccgagcugaagugcuucggcaacaccgccguggccaagugcaacgagaagcacgacgaggaguucugcgacaugcugagacuguucgacuucaacaagcaggccauccagagacugaaggcccccgcccagaugagcauccagcugaucaacaaggccgugaacgcccugaucaacgaccagcugaucaugaagaaccaccugagagacaucaugggcauccccuacugcaacuacagcaaguacugcuaccugaacaacaccgccaccggcaagaccagccugcccaagugcugccugaucagcaacggcagcuaccugaacgagacccacuucagcgacgacaucgagcaggaggccgacaacaugaucaccgagaugcugcagaaggaguacauggagagacagggcaagaccccccugggccugguggaccuguucguguucagcaccagcuucuaccugaucagcaucuuccugcaccuggugaagauccccacccacagacacaucgugggcaagagcugccccaagccccacagacugaaccacaugggcaucugcagcugcggccuguacaagcagcccggcgugcccgugagauggaagagaugaggacuagucccuguucccagagcccacuuuuuuuucuuuuuuugaaauaaaauagccugucuuucagaucucaaaggcucuuuucagagccaccaaaaaaaaaaaaaaaaaaaaaaaaaaaaaaaaaaaaaaaaaaaaaaaaaaaaaaaaaaaaaaaaagaauu

SEQ ID NO: 32061 - RNA, 1736 nt, Artificial Sequence
  mRNA product Design a-2 (hSL-A64-N5) comprising derived and/or modified sequence from LASV(G3010-SLE-2013;Clade IV)__AIT17344__GPCmut7 (opt4)
aggagaguccgcucagccagguugcagaagcggcuuagcguguguccuaaucuucucucugcguguagguaggccugugccgcaaacaagcuuaccaugggccagaucgugaccuucuuccaggaggugccccacgugaucgaggaggugaugaacaucgugcugaucgcccugagcauccuggccgugcugaagggccuguacaacuucgccaccugcggccuggugggccuggugaccuuccugcugcugugcggcagaagcugcaccaccagccuguacaagggcguguacgagcugcagacccuggagcugaacauggagacccugaacaugaccaugccccugagcugcaccaagaacaacagccaccacuacaucauggugggcaacgagaccggccuggagcugacccugaccaacaccagcaucaucaaccacaaguucugcaaccugagcgacgcccacaagaagaaccuguacaaccacgcccugaugagcaucaucagcaccuuccaccugagcauccccaacuucaaccaguacgaggccaugagcugcgacuucaacggcggcaagaucagcgugcaguacaaccugagccacagcuacgccggcgacgccgccagccacugcggcaccguggccaacggcgugcugcagaccuucaugagaauggccuggggcggcagcuacaucgcccuggacagcggcuacggcaagugggacugcaucaugaccagcuaccaguaccugaucauccagaacaccaccugggaggaccacugccaguucagcagacccagccccaucggcuaccugggccugcugagccagagaaccagagacaucuacaucagcagaagacugcugggcaccuucaccuggacccugagcgacagcgagggcaaggacacccccggcggcuacugccugaccagauggaugcugaucgaggccgagcugaagugcuucggcaacaccgccguggccaagugcaacgagaagcacgacgaggaguucugcgacaugcugagacuguucgacuucaacaagcaggccauccagagacugaagacccccgcccagaugagcauccagcugaucaacaaggccgugaacgcccugaucaacgaccagcugaucaugaagaaccaccugagagacaucaugggcauccccuacugcaacuacagcaaguacugcuaccugaaccacaccaccaccggcaagaccagccugcccaagugcugccuggugagcaacggcagcuaccugaacgagacccacuucagcgacgacaucgagcagcaggccgacaacaugaucaccgagaugcugcagaaggaguacauggagagacagggcaagaccccccugggccugguggaccuguucguguucagcaccagcuucuaccugaucagcaucuuccugcaccuggugaagauccccacccacagacacaucgugggcaagagcugccccaagccccacagacugaaccacaugggcaucugcagcugcggccuguacaagcagcccggcgugcccgugagauggaagagaugaggacuagucccuguucccagagcccacuuuuuuuucuuuuuuugaaauaaaauagccugucuuucagaucucaaaggcucuuuucagagccaccaaaaaaaaaaaaaaaaaaaaaaaaaaaaaaaaaaaaaaaaaaaaaaaaaaaaaaaaaaaaaaaaagaauu

SEQ ID NO: 32062 - RNA, 1736 nt, Artificial Sequence
  mRNA product Design a-2 (hSL-A64-N5) comprising derived and/or modified sequence from LASV(G502-SLE-2009;Clade IV)__AIT17126__GPCmut7 (opt4)
aggagaguccgcucagccagguugcagaagcggcuuagcguguguccuaaucuucucucugcguguagguaggccugugccgcaaacaagcuuaccaugggccagaucgugaccuucuuccaggaggugccccacgugaucgaggaggugaugaacaucgugcugaucgcccugagcauccuggccgugcugaagggccuguacaacuucgccaccugcggccuggugggccugcugaccuuccugcugcugugcggcagaagcugcaccaccggccuguacaagggcguguacgagcugcagacccuggagcugaacauggagacccugaacaugaccaugccccugagcugcaccaagaacaacagccaccacuacaucauggugggcaacgagaccggccuggagcugacccugaccaacaccagcaucaucaaccacaaguucugcaaccugagcgacgcccacaagaagaaccuguacgaccacgcccugaugagcaucaucagcaccuuccaccugagcauccccaacuucaaccaguacgaggccaugagcugcgacuucaacggcggcaagaucagcgugcaguacaaccugagccacagcuacgccggcgacgccgccgaccacugcggcaccguggccaacggcgugcugcagaccuucaugagaauggccuggggcggcagcuacaucgcccuggacagcggcagaggcagaugggacugcaucaugaccagcuaccaguaccugaucauccagaacaccaccugggaggaccacugccaguucagcagacccagccccaucggcuaccugggccugcugagccagagaaccagagacaucuacaucagcagaagacugcugggcaccuucaccuggacccugagcgacagcgagggcaaggacacccccggcggcuacugccugaccagauggaugcugaucgaggccgagcugaagugcuucggcaacaccgccguggccaagugcaacgagaagcacgacgaggaguucugcgacaugcugagacuguucgacuucaacaagcaggccauccagagacugaaggcccccgcccagaugagcauccagcugaucaacaaggccgugaacgcccugaucaacgaccagcuggugaugaagaaccaccugagagacaucaugggcauccccuacugcaacuacagcagauacugcuaccugaaccacaccaccaccggcagaaccagccugcccaagugcugccuggugagcaacggcagcuaccugaacgagacccacuucagcgacgacaucgagcagcaggccgacaacaugaucaccgagaugcugcagaaggaguacauggagagacagggcaagaccccccugggccugguggaccuguucguguucagcaccagcuucuaccugaucagcaucuuccugcaccuggugaagauccccacccacagacacaucgugggcaagagcugccccaagccccacagacugaaccacaugggcaucugcagcugcggccuguacaagcagcccggcgugcccgugaaguggaagagaugaggacuagucccuguucccagagcccacuuuuuuuucuuuuuuugaaauaaaauagccugucuuucagaucucaaaggcucuuuucagagccaccaaaaaaaaaaaaaaaaaaaaaaaaaaaaaaaaaaaaaaaaaaaaaaaaaaaaaaaaaaaaaaaaagaauu

SEQ ID NO: 32063 - RNA, 1736 nt, Artificial Sequence
  mRNA product Design a-2 (hSL-A64-N5) comprising derived and/or modified sequence from LASV(G733-SLE-2010;Clade IV)__AIT17154__GPCmut7 (opt4)
aggagaguccgcucagccagguugcagaagcggcuuagcguguguccuaaucuucucucugcguguagguaggccugugccgcaaacaagcuuaccaugggccagaucgugaccuucuuccaggaggugccccacgugaucgaggaggugaugaacaucgugcugaucgcccugagcauccuggccgugcugaagggccuguacaacuucgccaccugcggcaucgugggccuggugagcuuccugcugcugugcggcagaagcugcaccaccagccuguacaagggcguguacgagcugcagacccuggagcugaacauggagacccugaacaugaccaugccccugagcugcaccaagaacaacagccaccacuacaucauggugggcaacgagaccggccuggagcugacccugaccaacaccagcaucaucaaccacaaguucugcaaccugagcgacgcccacaagaagaaccuguacgaccacgcccugaugagcaucaucagcaccuuccaccugagcauccccaacuucaaccaguacgaggccaugagcugcgacuucaacggcggcaagaucagcgugcaguacaaccugagccacagcuacgccggcgacgccgccaaccacugcggcaccaucgccaacggcgugcugcagaccuucaugagaauggccuggggcggcagcuacaucgcccuggacagcggcagagacagaugggacugcaucaugaccagcuaccaguaccugaucauccagaacaccaccugggaggaccacugccaguucagcagacccagccccaucggcuaccugggccugcugagccagagaaccagagacaucuacaucagcagaagacugcugggcaccuucaccuggacccugagcgacagcgagggcaaggacacccccggcggcuacugccugaccagauggaugcugaucgaggccgagcugaagugcuucggcaacaccgccguggccaagugcaacgagaagcacgacgaggaguucugcgacaugcugagacuguucgacuucaacaagcaggccauccagagacugaaggcccccgcccagaugagcauccagcugaucaacaaggccgugaacgcccugaucaacgaccagcugaucaugaagaaccaccugagagacaucaugggcauccccuacugcaacuacagcaaguacugcuaccugaaccacaccaccaccggcaagaccagccugcccaagugcugccuggugagcaacggcagcuaccugaacgagacccacuucagcgacgacaucgagcagcaggccgacaacaugaucaccgagaugcugcagaaggaguacauggagagacagggcaagaccccccugggccugguggaccuguucguguucagcaccagcuucuaccugaucagcaucuuccugcaccuggugaagauccccacccacagacacguggugggcaagagcugccccaagccccacagacugaaccacaugggcaucugcagcugcggccuguacggccagcccggcgugcccgugaaguggaagagaugaggacuagucccuguucccagagcccacuuuuuuuucuuuuuuugaaauaaaauagccugucuuucagaucucaaaggcucuuuucagagccaccaaaaaaaaaaaaaaaaaaaaaaaaaaaaaaaaaaaaaaaaaaaaaaaaaaaaaaaaaaaaaaaaagaauu

SEQ ID NO: 32064 - RNA, 1736 nt, Artificial Sequence
  mRNA product Design a-2 (hSL-A64-N5) comprising derived and/or modified sequence from MOPV/LASV reassortant(IGS-1;Clade IV)__AFY05576__GPCmut7 (opt4)
aggagaguccgcucagccagguugcagaagcggcuuagcguguguccuaaucuucucucugcguguagguaggccugugccgcaaacaagcuuaccaugggccagaucgugaccuucuuccaggaggugccccacgugaucgaggaggugaugaacaucgugcugaucgcccugagcgugcuggccgugcugaagggccuguacaacuucgccaccugcggccuggugggccuggugaccuuccugcugcugugcggcagaagcugcaccaccagccuguacaagggcguguacgagcugcagacccuggagcugaacauggagacccugaacaugaccaugccccugagcugcaccaagaacaacagccaccacuacaucauggugggcaacgagaccggccuggagcugacccugaccaacaccagcaucaucaaccacaaguucugcaaccugagcgacgcccacaagaagaaccuguacgaccacgcccugaugagcaucaucagcaccuuccaccugagcauccccaacuucaaccaguacgaggccaugagcugcgacuucaacggcggcaagaucagcgugcaguacaaccugagccacagcuacgccggcgacgccgccaaccacugcggcaccguggccaacggcgugcugcagaccuucaugagaauggccuggggcggcagcuacaucgcccuggacagcggcagaggcaacugggacugcaucaugaccagcuaccaguaccugaucauccagaacaccaccugggaggaccacugccaguucagcagacccagccccaucggcuaccugggccugcugagccagagaaccagagacaucuacaucagcagaagacugcugggcaccuucaccuggacccugagcgacagcgagggcgaggacacccccggcggcuacugccugaccagauggaugcugaucgaggccgagcugaagugcuucggcaacaccgccguggccaagugcaacgagaagcacgacgaggaguucugcgacaugcugagacuguucgacuucaacaagcaggccauccagagacugaaggcccccgcccagaugagcauccagcugaucaacaaggccgugaacgcccugaucaacgaccagcugaucaugaagaaccaccugagagacaucaugggcauccccuacugcaacuacagcaaguacugcuaccugaaccacaccaccaccggcagaaccagccugcccaagugcugccuggugagcaacggcagcuaccugaacgagacccacuucagcgacgacaucgagcagcaggccgacaacaugaucaccgagaugcugcagaaggaguacauggagagacagggcaagaccccccugggccugguggaccuguucguguucagcaccagcuucuaccugaucagcaucuuccugcaccuggugaagauccccacccacagacacaucgugggcaagagcugccccaagccccacagacugaaccacaugggcaucugcagcugcggccuguacaagcagcccggcgugcccgugaaguggaagagaugaggacuagucccuguucccagagcccacuuuuuuuucuuuuuuugaaauaaaauagccugucuuucagaucucaaaggcucuuuucagagccaccaaaaaaaaaaaaaaaaaaaaaaaaaaaaaaaaaaaaaaaaaaaaaaaaaaaaaaaaaaaaaaaaagaauu

SEQ ID NO: 32065 - RNA, 1736 nt, Artificial Sequence
  mRNA product Design a-2 (hSL-A64-N5) comprising derived and/or modified sequence from LASV(LM765-SLE-2012;Clade IV)__AIT17814__GPCmut7 (opt4)
aggagaguccgcucagccagguugcagaagcggcuuagcguguguccuaaucuucucucugcguguagguaggccugugccgcaaacaagcuuaccaugggccagaucgugaccuucuuccaggaggugccccacgugaucgaggaggugaugaacaucgugcugaucgcccugagcauccuggccgugcugaagggccuguacaacuucgccaccugcggccuggugggccuggugaccuuccugcugcugugcggcagaagcugcaccaccagccuguacaagggcguguacgagcugcagacccuggagcugaacauggagacccugaacaugaccaugccccugagcugcaccaagaacaacagccaccacuacaucauggugggcaacgagaccggccuggagcugacccugaccaacaccagcaucaucgaccacaaguucugcaaccugagcgacgcccacagaaagaaccuguacgaccacgcccugaugagcaucaucagcaccuuccaccugagcauccccaacuucaaccaguacgaggccaugagcugcgacuucaacggcggcaagaucagcgugcaguacaaccugagccacagcuacgccaaggacgccgccgaccacugcggcaccguggccaacggcgugcugcagaccuucaugagaauggccuggggcggcagcuacaucgcccuggacagcggcagaggcagaugggacugcaucaugaccagcuaccaguaccugaucauccagaacaccaccugggaggaccacugccaguucagcagacccagccccaucggcuaccugggccugcugagccagagaaccagagacaucuacaucagcagaagacugcugggcaccuucaccuggacccugagcgacagcgagggcaaggacacccccggcggcuacugccugaccagauggaugcugaucgaggccgagcugaagugcuucggcaacaccgccguggccaagugcaacgagaagcacgacgaggaguucugcgacaugcugagacuguucgacuucaacaagcaggccauccagagacugaaggcccccgcccagaugagcauccagcugaucaacaaggccgugaacgcccugaucaacgaccagcugaucaugaagaaccaccugagagacaucaugggcauccccuacugcaacuacagcaaguacugcuaccugaaccacaccaccaccggcaagaccagccugcccaagugcugccuggugagcaacggcagcuaccugaacgagacccacuucagcgacgacaucgagcagcaggccgacaacaugaucaccgagaugcugcagaaggaguacauggagagacagggcaagaccccccugggccugguggaccuguucguguucagcaccagcuucuaccugaucagcaucuuccugcaccuggugaagauccccacccacagacacaucgugggcaagcccugccccaagccccacagacugaaccacaugggcaucugcagcugcggccuguacaagcagcccggcgugcccgugaaguggaagagaugaggacuagucccuguucccagagcccacuuuuuuuucuuuuuuugaaauaaaauagccugucuuucagaucucaaaggcucuuuucagagccaccaaaaaaaaaaaaaaaaaaaaaaaaaaaaaaaaaaaaaaaaaaaaaaaaaaaaaaaaaaaaaaaaagaauu

SEQ ID NO: 32066 - RNA, 1736 nt, Artificial Sequence
  mRNA product Design a-2 (hSL-A64-N5) comprising derived and/or modified sequence from LASV(LM776-SLE-2012;Clade IV)__AIT17824__GPCmut7 (opt4)
aggagaguccgcucagccagguugcagaagcggcuuagcguguguccuaaucuucucucugcguguagguaggccugugccgcaaacaagcuuaccaugggccagaucgugaccuucuuccaggaggugccccacgugaucgaggaggugaugaacaucgugcugaucgcccugagcauccuggccgugcugaagggccuguacaacuucgccaccugcggccuggugggccuggugaccuuccugcugcugugcggcagaagcugcaccaccagcguguacaagggcguguacgagcugcagacccuggagcugaacauggagacccugaacaugaccaugccccugagcugcaccaagaacaacagccaccacuacaucauggugggcaacgagaccggccuggagcugacccugaccaacaccagcaucaucaaccacaaguucugcaaccugagcgacgcccacaagaagaaccuguacgaccacgcccugaugagcaucaucagcaccuuccaccugagcauccccaacuucaaccaguacgaggccaugagcugcgacuucaacggcggcaagaucagcgugcaguacaaccugagccacagcuacgccggcgacgccgccaaccacugcggcaccguggccaacggcgugcugcagaccuucaugagaauggccuggggcggcagcuacaucgcccuggacagcggccacggcaagugggacugcaucaugaccagcuaccaguaccugaucauccagaacaccaccugggaggaccacugccaguucagcagacccagccccaucggcuaccugggccugcugagccagagaaccagagacaucuacaucagcagaagacugcugggcaccuucaccuggacccugagcgacagcgagggcaaggacacccccggcggcuacugccugaccagauggaugcugaucgaggccgagcugaagugcuucggcaacaccgccguggccaagugcaacgagaagcacgacgaggaguucugcgacaugcugagacuguucgacuucaacaagcaggccauccagagacugaaggcccccgcccagaugagcauccagcugaucaacaaggccgugaacgcccugaucaacgaccagcugaucaugaagaaccaccugagagacaucaugggcauccccuacugcaacuacagcaaguacugcuaccugaaccacaccaccaccggcaagaccagccugcccaagugcugccuggugagcaacggcagcuaccugaacgagacccacuucagcgacgacaucgagcagcaggccgacaacaugaucaccgagaugcugcagaaggaguacauggagagacagggcaagaccccccugggccugguggaccuguucguguucagcaccagcuucuaccugaucagcaucuuccugcaccuggugaagauccccacccacagacacaucgugggcaagagcugccccaagccccacagacugaaccacaugggcaucugcagcugcggccuguacaagcagcccggcgugcccgugagauggaagagaugaggacuagucccuguucccagagcccacuuuuuuuucuuuuuuugaaauaaaauagccugucuuucagaucucaaaggcucuuuucagagccaccaaaaaaaaaaaaaaaaaaaaaaaaaaaaaaaaaaaaaaaaaaaaaaaaaaaaaaaaaaaaaaaaagaauu

SEQ ID NO: 32067 - RNA, 1736 nt, Artificial Sequence
  mRNA product Design a-2 (hSL-A64-N5) comprising derived and/or modified sequence from LASV(Mad39;Clade IV)__ANH09722__GPCmut7 (opt4)
aggagaguccgcucagccagguugcagaagcggcuuagcguguguccuaaucuucucucugcguguagguaggccugugccgcaaacaagcuuaccaugggccagaucgugaccuucuuccaggaggugccccacgugaucgaggaggugaugaacaucgugcugaucgcccugagcauccuggccgugcugaagggccuguacaacguggccaccugcggccugaucggccuggugaccuuccugcugcugugcggcagaagcugcaccaccacccuguacaagggcguguacgagcugcaggcccuggagcugaacauggagacccugaacaugaccaugccccugagcugcaccaagaacaacagccaccacuacaucagagugggcaacgagaccggccuggagcugacccugaccaacaccagccugaucaaccacaaguucugcaaccugagcgacgcccacaagaagaaccuguacgaccacgcccugaugagcaucaucagcaccuuccaccugagcauccccaacuucaaccaguacgaggccaugagcugcgacuucaacgacggcaagaucagcgugcaguacaaccugagccacaccuacgccggcgacaccgccaaccacugcggcaccguggccaacggcgugcugcagaccuucaugagaauggccuggggcggcagcuacaucgcccuggacagcggcagaggcggcugggacugcaucaugaccagcuaccaguaccugaucauccagaacaccaccugggaggaccacugccaguucagcagacccagccccaucggcuaccugggccugcugagccagagaaccagagacaucuacaucagcagaagacugcugggcaccuucaccuggacccugagcgacagcgagggcaaggacacccccggcggcuacugccugaccagauggaugcugaucgaggccgagcugaagugcuucggcaacaccgccguggccaagugcaacgagaagcacgacgaggaguucugcgacaugcugagacuguucgacuucaacaagcaggccauccagagacugaaggcccccgcccagaugagcauccagcugaucaacaaggccgugaacgcccugaucaacgaccagcugaucaugaagaaccaccugagagacaucaugggcauccccuacugcaacuacagcaaguacugcuaccugaaccacaccgugaccggcaagaccagccugcccaagugcugccuggugagcaacggcagcuaccugaacgagacccacuucagcgacgacaucgagcagcaggccgacaacaugaucaccgagaugcugcagaaggaguacauggagagacagggcaagaccccccugggccugguggaccuguucguguucagcaccagcuucuaccugaucagcaucuuccugcaccuggugaagauccccacccacagacacguggugggcaagcccugccccaagccccacagacugaaccacaugggcaucugcagcugcggcuucuacaagcagcccggcgugcccgugagauggaagagaugaggacuagucccuguucccagagcccacuuuuuuuucuuuuuuugaaauaaaauagccugucuuucagaucucaaaggcucuuuucagagccaccaaaaaaaaaaaaaaaaaaaaaaaaaaaaaaaaaaaaaaaaaaaaaaaaaaaaaaaaaaaaaaaaagaauu

SEQ ID NO: 32068 - RNA, 1736 nt, Artificial Sequence
  mRNA product Design a-2 (hSL-A64-N5) comprising derived and/or modified sequence from LASV(Z0947-SLE-2011;Clade IV)__AIT17840__GPCmut7 (opt4)
aggagaguccgcucagccagguugcagaagcggcuuagcguguguccuaaucuucucucugcguguagguaggccugugccgcaaacaagcuuaccaugggccagaucgugaccuucuuccaggaggugccccacgugaucgaggaggugaugaacaucgugcugaucgcccugagcauccuggccgugcugaagggccuguacaacuucgccaccugcggccuggugggccuggugaccuuccugcugcugugcggcagaagcugcaccaucagccuguacaagggcguguacgagcugcagacccuggagcugaacauggagacccugaacaugaccaugccccugagcugcaccaagaacaacagccaccacuacaucauggugggcaacgagaccggccuggagcugacccugaccaacaccagcaucaucaaccacaaguucugcaaccugagcgacgcccacaagaagaaccuguacgaccacgcccugaugagcaucaucagcaccuuccaccugagcauccccaacuucaaccaguacgaggccaugagcugcgacuucaacggcggcaagaucagcgugcaguacaaccugagccacagcuacgccggcgacgccgccaaccacugcggcaccguggccaacggcgugcugcagaccuucaugagaauggccuggggcggcagcuacaucgcccuggacagcggcagagacagaugggacugcaucaugaccagcuaccaguaccugaucauccagaacaccaccugggaggaccacugccaguucagcagacccagccccaucggcuaccugggccugcugagccagagaaccagagacaucuacaucagcagaagacugcugggcaccuucaccuggacccugagcgacagcgagggcaaggacacccccggcggcuacugccugaccagauggaugcugaucgaggccgagcugaagugcuucggcaacaccgccguggccaagugcaacgagaagcacgacgaggaguucugcgacaugcugagacuguucgacuucaacaagcaggccauccagagacugaaggcccccgcccagaugagcauccagcugaucaacaaggccgugaacgcccugaucaacgaccagcugaucaugaagaaccaccugagagacaucaugggcauccccuacugcaacuacagcaaguacugcuaccugaaccacaccaccaccggcaagaccagccugcccaagugcugccuggugagcaacggcagcuaccugaacgagacccacuucagcgacgacaucgagcagcaggccgacaacaugaucaccgagaugcugcagaaggaguacauggagagacagggcaagaccccccugggccugguggaccuguucguguucagcaccagcuucuaccugaucagcaucuuccugcaccuggugaagauccccacccacagacacaucgugggcaagcccugccccaagccccacagacugaaccacaugggcaucugcagcugcggccuguacaagcagcccggcgugcccgugaaguggaagagaugaggacuagucccuguucccagagcccacuuuuuuuucuuuuuuugaaauaaaauagccugucuuucagaucucaaaggcucuuuucagagccaccaaaaaaaaaaaaaaaaaaaaaaaaaaaaaaaaaaaaaaaaaaaaaaaaaaaaaaaaaaaaaaaaagaauu

SEQ ID NO: 32069 - RNA, 1736 nt, Artificial Sequence
  mRNA product Design a-2 (hSL-A64-N5) comprising derived and/or modified sequence from LASV(Josiah;Clade IV)__NP_694870__GPCmut7 (opt5)
aggagaguccgcucagccagguugcagaagcggcuuagcguguguccuaaucuucucucugcguguagguaggccugugccgcaaacaagcuuaccaugggccagaucgugaccuucuuucaagaggucccccacguuauugaagaggugaugaacaucgugcugauugcccucagcguccuggcugugcuuaaggggcuguacaauuucgccacaugcggacucguuggccuggugacguuucuucugcucugugggagauccugcaccacaucucuguauaaaggagucuacgaacugcagacccucgagcugaacauggaaacacuuaauaugaccaugccucugagcuguacaaagaacaauucccaucacuauaucauggugggcaacgagaccgggcucgagcugacgcuuaccaauacaucuauuaucaaccauaaauucugcaaucugagcgacgcgcacaagaaaaaccucuacgaucaugcucugauguccaucauuucuaccuuucaccugagcaucccgaauuucaaccaguaugaagccauguccugugacuuuaauggaggcaagauuagcguucaguacaaccucucucacuccuaugccggcgaugcugccaaucauugcgggacaguggcuaacggaguccugcaaaccuucaugcggauggccuggggcgggagcuacaucgcgcuugacucuggacgcggcaacugggauuguauuaugacguccuaccaguaucugaucauucagaauacaaccugggaggaccacugccaguuuagcagacccucuccuaucggguaccucggacugcuuucccaacggacacgcgauaucuauauuagcagacggcugcucggcaccuucaccuggacacuguccgacucugaaggcaaggauacgcccgggggauacugucugacccgcuggaugcucaucgaggccgagcugaaaugcuuuggcaacacagcuguggccaaguguaaugaaaaacaugacgaggaguucugcgauaugcuuagacuguuugacuucaacaagcaggcuauucagcggcucaaagccccugcgcagaugagcauccaacugauuaauaaggccgugaacgcucuuaucaaugaucagcugaucaugaagaaccaccuccgcgacauuauggggauccccuauugcaauuacuccaaauauuguuaccugaaccacaccacaaccggaagaacgagccugccuaagugcugucucgucucuaauggcuccuaccugaacgaaacacauuucagcgacgauauugaacagcaagccgacaauaugaucaccgagaugcuucagaaagaguauauggaacggcaggggaagaccccgcugggacucguugaucuguuuguguucucuaccagcuuuuaccugauuuccaucuuccuucaccucgugaaaauccccacacaucgccacauugucggcaagucuugcccuaaaccccauagacugaaccacaugggcaucuguagcugcgggcuguauaagcagccuggagugcccguuaaguggaaacggugaggacuagucccuguucccagagcccacuuuuuuuucuuuuuuugaaauaaaauagccugucuuucagaucucaaaggcucuuuucagagccaccaaaaaaaaaaaaaaaaaaaaaaaaaaaaaaaaaaaaaaaaaaaaaaaaaaaaaaaaaaaaaaaaagaauu

SEQ ID NO: 32070 - RNA, 1733 nt, Artificial Sequence
  mRNA product Design a-2 (hSL-A64-N5) comprising derived and/or modified sequence from LASV(LP;Clade I)__AAF86701__GPCmut7 (opt5)
aggagaguccgcucagccagguugcagaagcggcuuagcguguguccuaaucuucucucugcguguagguaggccugugccgcaaacaagcuuaccaugggccagaucauuaccuucuuucaagaggugccccacgucaucgaagagguuaugaacauugugcugaucgcccucagccugcuugcuauucugaaggggcucuacaauaucgccacaugcggaaucauuggccugguggcguuccuuuuucugugugggaaauccugcucucucacgcugaagggaggcuaugaacugcagacccucgagcugaacauggaaacacuuaauaugaccaugccucugagcuguaccaaaaacuccucucaucacuacaucagagucgggaaugagacaggacucgagcugacacuuaccaacacgagcauuaucaaucauaaguucugcaaccuguccgacgcucacaaaaagaaucucuaugaucaugcccugaugucuauuaucagcaccuuucaccuguccauuccgaacuucaaucaguacgaagccaugagcugugacuuuaacggcggcaagaucucugugcaguauaaucucucccacagcuacgcuggggaugccgcugagcauugcggaacaguugccaacggcgugcugcaaaccuucaugcggauggcguggggagggcgcuauaucgcccuugacucuggcaaagggaauugggauuguauuaugacauccuaccaguaccugaucauucagaacaccacgugggaagaccacugccaguuuagcagacccucuccuaucggauaucucggccugcuuucccaacggacacgcgauauuuacaucagcagacggcugcucggcaccuucacauggacccuguccgacucugaggggaacgagacccccggaggcuauugucugacacgcuggaugcucaucgaagcugagcugaagugcuuugggaauacggccgucgcuaaauguaacgaaaagcaugaugaggaguucugcgacaugcuuagacuguuugauuucaauaaacaggccauucggcgccucaaggcgccugcccagaugagcauccagcugauuaacaaggcugugaaugcccuuaucaacgaccaacugauuaugaaaaaucaccucagagauaucaugggaauccccuacugcaacuauuccaaguacuguuaucugaaucacaccagcucuggccggacaucccugccuaaaugcugucucauuagcaacgggucuuaccugaaugaaacccaguucagcgacgacaucgagcagcaagcugauaacaugauuacagaaaugcuucagaaggaguacaucgaacgccagggaaaaaccccgcugggccucguugacauuuuuaucuucuccacgucuuuuuaucugauuagcaucuuccugcaucuuaucaagauucccacacacagacauaucgugggcaaaccuugccccaagccucaccggcucaaucauaugggggucuguuccugcggacuguacaagcaccccggcgugccgaccaaauggaagcgcugaggacuagucccuguucccagagcccacuuuuuuuucuuuuuuugaaauaaaauagccugucuuucagaucucaaaggcucuuuucagagccaccaaaaaaaaaaaaaaaaaaaaaaaaaaaaaaaaaaaaaaaaaaaaaaaaaaaaaaaaaaaaaaaaagaauu

SEQ ID NO: 32071 - RNA, 1733 nt, Artificial Sequence
  mRNA product Design a-2 (hSL-A64-N5) comprising derived and/or modified sequence from LASV(803213;Clade II)__AAF86703__GPCmut7 (opt5)
aggagaguccgcucagccagguugcagaagcggcuuagcguguguccuaaucuucucucugcguguagguaggccugugccgcaaacaagcuuaccaugggccagaucauuaccuucuuucaagaggugccccacgucaucgaagagguuaugaacauugugcugaucgcccucagccugcuugcuauucugaaggggaucuacaauguggccacaugcggacucuucggccugaucuccuuucuucugcucugugggagaucuugcagcgucacguauaaaggaguguacgaacugcagacccuggagcucaacauggcgaaucugaacaugacaaugccucuuuccuguaccaagaauaacucucaucacuauauuaugguuggcaaugaaacagggcuggagcucacccugacaaacaccagcaucauuaaucauaaauucugcaaccuuuccgacgcucacaagaaaaaucuguacgaucaugcccucaugucuaucauuagcacguuucaccuguccaucccgaacuucaaucaguaugaggccaugagcugugacuuuaacggaggcaagauuucugugcaguacaaucugucccacagcuucgcugucgaugccgcuaaccauugcggcaccaucgccaacggggugcuccaaacauuuaugcggauggcguggggaggcucuuauaucgcccuggacuccgggaagggaaauugggauuguauuaugaccagcuaccaguaccuuaucauucagaacacaaccugggaagaccacugccaguucucucgccccuccccuaucggcuaucuggggcuccugagccaaagaacgcgggauauuuacaucucccgcagacuucugggaacauuuaccuggacacucucugacagcgagggcaaugaagcucccggcggguauugucugacccgguggaugcugaucgaggccgagcucaaaugcuucggaaacaccgcuguugccaaguguaaugaaaaacaugaugaggaauuuugcgacaugcugcgccuuuucgauuucaacaagcaggcgauuaaaagacugaagacgccugcccagauguccauccagcucauuaauaaggcugugaacgcccugaucaaugaccaacuuauuaugaaaaaccaucugcgggauaucaugggcauccccuacugcaauuauagccgcuacuguuaucucaaccacacagucaccgggaagacaucucugccuagaugcugucugguguccaauggaagcuaccucaacgagacccacuuuucugacgacauugaacagcaggcugauaauaugaucacagagaugcugcaaaaagaguacauggaccggcagggcaagaccccgcuugggcugguggaucucuucgucuuuagcacguccuucuaucugauuucuaucuuucugcaccuuguuaaaauucccacacaucgccacaucgugggaaagccuugccccaaaccucauagacucaaccacaugggcauuuguagcugcggccuguacaagcaccccggggugccggucaaguggaaacggugaggacuagucccuguucccagagcccacuuuuuuuucuuuuuuugaaauaaaauagccugucuuucagaucucaaaggcucuuuucagagccaccaaaaaaaaaaaaaaaaaaaaaaaaaaaaaaaaaaaaaaaaaaaaaaaaaaaaaaaaaaaaaaaaagaauu

SEQ ID NO: 32072 - RNA, 1733 nt, Artificial Sequence
  mRNA product Design a-2 (hSL-A64-N5) comprising derived and/or modified sequence from LASV(GA391;Clade III)__CAA36645__GPCmut7 (opt5)
aggagaguccgcucagccagguugcagaagcggcuuagcguguguccuaaucuucucucugcguguagguaggccugugccgcaaacaagcuuaccaugggccagaucgugaccuucuuucaagaggucccccacguuauugaagaggugaugaacaucgugcugauugcccucagcauccuggcuauucuuaaggggcuguacaaugucgccacaugcggacucaucggccuggugacguuccuucugcucuccgggagaucuuguagccugaucuauaaaggaaccuacgaacugcagacacucgagcugaacauggaaacccuuaauaugacaaugccucuguccugcaccaagaacaauucucaucacuauauucggguuggcaacgagacagggcucgagcugacccuuacgaauaccagcauccugaaccauaaauuuuguaaucucuccgacgcgcacaagcgcaaccuguacgaucauucucugaugagcauuaucuccacauuccaccucagcauuccgaauuuuaaccaguaugaagcuaugucuugcgacuucaauggaggcaaaaucaccgugcaguacaaccugucccacagcuuugccgucgaugccgcuggccauugugggacacuugccaauggagugcugcaaaccuucaugagaauggcuuggggcgggucuuauauugcccucgacuccggacggggcaacugggauugcaucaugacgagcuaccaguaccugaucauucagaacacaaccugggacgaucacugucaguuuucucgccccuccccuaucggguaucuuggacugcucagccaaagaacacgggacauuuacaucucccgcagacugcugggcaccuucaccuggacacucucugauagcgagggcaaugaaacgcccgggggauauugccugacccgguggaugcuuauugaggcggagcugaaguguuuuggcaacacagccguugcuaagugcaaugaaaaacaugacgaggaguucugugauaugcuccgccuguuugacuucaacaagcaggccaucagacggcuuaaaaccccugcucagauguccauccagcugauuaauaaggccgugaacgcgcucaucaaugaucaacugauuaugaaaaaccaucugcgcgacaucauggggauucccuacugcaauuauagcagauacugcuaucucaaccacacaucuaccggaaagacgucccugccucgguguugccuuaucagcaauggcucuuaccugaacgaaacaaaguucagcgacgauaucgaacagcaggccgacaauaugauuaccgagaugcuccaaaaagaguacaucgaucgccaggggaagaccccgcugggacuggucgaccuuuuuguguucuccacaucuuuuuaucucauuagcaucuuccugcaccuggugaaaauucccacccacagacauaucgucggcaagccuugucccaaaccucaccggcucaaccauaugggcauuugcuccugugggcuguacaagcagcccggaguuccggugagauggaaacgcugaggacuagucccuguucccagagcccacuuuuuuuucuuuuuuugaaauaaaauagccugucuuucagaucucaaaggcucuuuucagagccaccaaaaaaaaaaaaaaaaaaaaaaaaaaaaaaaaaaaaaaaaaaaaaaaaaaaaaaaaaaaaaaaaagaauu

SEQ ID NO: 32073 - RNA, 1736 nt, Artificial Sequence
  mRNA product Design a-2 (hSL-A64-N5) comprising derived and/or modified sequence from LASV(AV;Clade V)__CCA30314__GPCmut7 (opt5)
aggagaguccgcucagccagguugcagaagcggcuuagcguguguccuaaucuucucucugcguguagguaggccugugccgcaaacaagcuuaccaugggccagaucgugaccuucuuucaagaggucccccacguuauugaagaggugaugaacaucgugcugauugcccucagcauccuggcuguccuuaaggggcuguacaauauugccacaugcggacucaucggccugaucacguuccuucugcucugugggagauccugcucuagcaaccuguauaaaggaguguacgaacugcagucccucgaccugaauauggagacccuuaacaugacaaugccucugucuuguaccaagaauaacagccaucacuauauucggguuggcaaugauacagggcucgaacugacccuuacaaacaccuccauccugaaucauaaauuuugcaaccucucugacgcgcacaagaaagaucuguacgaccaugcucugaugagcauuaucuccacguuccaccucagcauuccgaauuuuaaccaguaugaggccaugucuugugauuucaauggaggcaagaucuccgugcaguacaaccugagccacucuuaugccauugacgcugccaaucauugcggcaccgucgcuaacgggauccuucaaacauuuaugcgcauggccuggggaggcuccuacaucgcgcuggauagcgggagaggaaacugggacuguauuaugaccucuuaccaguaucucaucauucagaauacaaccugggagaaccacugccaguucucccggcccagcccuaucggcuaccuggggcuucugucccaacgcacgagagauauuuauaucucucggcgccuccugggaacauuuaccuggacacugagcgacuccgaaggcaaugccacccccggcggguacugucucaccagauggaugcugaucgaggcugaacuuaagugcuucggaaacacagccguggcuaaauguaaugagaagcaugaugaggaauuuugcgacaugcugcgccucuucgauuuuaacaaacaggccauuagccggcugaagucuccugcgcagauguccauccagcuuauuaauaaagccguuaacgcucugaucaaugaccaacucauuaugaagaaccaccugagagacaucaugggcauccccuauugcaauuacagcaaguauuguuaccugaaccacacgauuaccgggaaaacaucucucccuaagugcugucuggugagcaauggauccuaccuuaacgagacccauuucucugaugacaucgaacagcaggccgauaauaugauuacagagaugcugcaaaaagaauauauggagcggcagggcaagaccccgcucgggcuggucgaccuguucguguuuagcacguccuucuaccuuaucagcauuuuucuccgccuggugaaaauccccacacacagacauauugucggaaagccuugccccaaaccucaccggcugaaccauaugggcaucuguucuugcggccucuauaagcagcccgggguuccggugcgcuggaagagaugaggacuagucccuguucccagagcccacuuuuuuuucuuuuuuugaaauaaaauagccugucuuucagaucucaaaggcucuuuucagagccaccaaaaaaaaaaaaaaaaaaaaaaaaaaaaaaaaaaaaaaaaaaaaaaaaaaaaaaaaaaaaaaaaagaauu

SEQ ID NO: 32074 - RNA, 1733 nt, Artificial Sequence
  mRNA product Design a-2 (hSL-A64-N5) comprising derived and/or modified sequence from LASV(Togo/2016/7082;Clade VI)__AMR44577__GPCmut7 (opt5)
aggagaguccgcucagccagguugcagaagcggcuuagcguguguccuaaucuucucucugcguguagguaggccugugccgcaaacaagcuuaccaugggccagaucauuaccuucuuucaagaggugccccacgucaucgaagagguuaugaacauugugcugaucgcccucagccugcuugcuauucugaaggggguguacaaugucgccacaugcggaaucaucggccucgugacguuccuguuucuuugugggagauccugcucucugauuuauaaaggaagcuacgaacuccagacccuggagcugaacauggaaacacucaauaugaccaugccucuguccuguacaaagaacucuagccaucacuauauccggguuggcaaugagaccgggcuugagcugacacucaccaacacguccauuaucaaucauaaauucugcaaccugucugacgcgcacaagcgcaaucuuuacgaucaugcucugaugagcauucucuccaccuuucaccugagcaucccgaacuucaaucaguaugaagccaugucuugugacuuuaacggaggcaaaauuuccgugcaguacaaucugagccacgccuaugcugucgaugccgcugagcauugcggcacaguggccaacgggguucuccaaaccuucaugagaauggcguggggaggcucuuacaucgcccuggacuccgggcggggaaauugggauuguaucaugacaagcuaccaguaucuuauuauccagaacaccacgugggaagaccacugccaguuuucucgccccuccccuauuggcuaccuggggcuccugagccaaagaacacgggauaucuauauuucccgcagacuucugggaaccuucacauggacccucucugacagcgagggcaacgagacccccggcggguacugucugacacgguggaugcugaucgaagcugagcucaagugcuuuggaaauacggccguggcuaaguguaacgaaaaacaugaugaggaguucugcgacaugcugcgccuuuuugauuucaauaagcaggccauccagagacugaaauccccugcgcagaugagcauucaacucaucaacaaggccgucaaugcucugauuaacgaccagcuuaucaugaaaaaucaucugcgggauaugaugggcauucccuauugcaacuacucuaaguauuguuaccucaaucacaccuccagcgggcgcacaucucugccuaagugcugucuggugagcaacggauccuaccucaaugaaacccacuucucugacgacaucgagcagcaagccgauaacaugaucacagaaaugcugcagaaagaguauauugacagacagggcaagaccccgcuugggcugguggaucucuuugucuucagcacguccuuuuaccugaucagcauuuuccugcaccuuaucaaaauucccacacaucggcacaucguuggaaagccuugccccaaaccucaucgccucaaucacaugggcauuuguucuugcggccuguauaagcagcccggggugccgaccagauggaaacggugaggacuagucccuguucccagagcccacuuuuuuuucuuuuuuugaaauaaaauagccugucuuucagaucucaaaggcucuuuucagagccaccaaaaaaaaaaaaaaaaaaaaaaaaaaaaaaaaaaaaaaaaaaaaaaaaaaaaaaaaaaaaaaaaagaauu

SEQ ID NO: 32075 - RNA, 1733 nt, Artificial Sequence
  mRNA product Design a-2 (hSL-A64-N5) comprising derived and/or modified sequence from LASV(KAK-428;Clade n.d. (VII))__ANH09740__GPCmut7 (opt5)
aggagaguccgcucagccagguugcagaagcggcuuagcguguguccuaaucuucucucugcguguagguaggccugugccgcaaacaagcuuaccaugggccagaucgugaccuucuuucaagaggucccccacguuauugaagaggugaugaacaucgugcugauugcccucagccugcuugcuauccugaaggggcucuacaauuucgccacaugcggagucauuggccugaucacguuucuucugcucugugggagauccugcucugcgaccuauaaaggacaguacgaacugcagacacuggagcucaacauggaaagccugaauaugaccaugccucuuuccuguacaaagaacaauucucaucacuauauccgggcuggcaacaauaccgggcuggagcucacacugaccaacacgagcauuaucucccauaaauucugcaaucuuucugacgcccacaagaaaaaccuguacgaucauacccucaugagcauuaucacaaccuuucaccuguccauuccgaauuucaaccaguaugaggccaugagcugugacuuuaauggaggcaagaucucuauucaauacaaccugucccacagcuaugcuggcgaugccgcucagcauugcgggacaguggccaauggaguucuccagaccuucaugcgcauggcguggggcgggucuuaccuggcccuugacuccggaagacggggcugggauuguaucaucagcucuuaccaguaucugauuauccaaaacacgacaugggacgaucacugccaguuuucccgccccagcccuauuggguaccucggauucgugucccagaagaccagagacaucuauauuucucggcgccugcuuggcacauuuaccuggacccugagcgauuccgaaggccaugacaugcccgggggauacugucucacaagauggaugcugaucgaggcugaucugaaaugcuucggcaacacggccgucgcuaaguguaaugaaaaacacgacgaggaguuuugcgauauguggcgccucuucgacuucaacaagcaggccauccaacggcugaaagcgccugcccagaugaauauucagcuuaucaacaaggcugugaaugcccugauuaacgaccaacucaugaugaagaaucaccugagagauaucauggggauucccuauugcaacuacagcaaauuuuguuaucuuaauaacaccacaaccggacggacaucucugccucgcugcugucucaucuccaauggcagcuaccugaacgaaacccauuucucugacgauaucgagcagcaggcugacaauaugauuacggaaaugcugcagaaggaguacauggauagacaagggaaaacaccgcucggacugguugaccuuuuuguguucagcaccuccuuuuaucugaucaccauuuuccuccaccuggucaagauccccacacaucggcacauugugggcaaaccuugccccaagccucaucgccugaaccacaugggcaucuguucuugcgggcuuuacaaacagcccggagugccggucagauggaagcggugaggacuagucccuguucccagagcccacuuuuuuuucuuuuuuugaaauaaaauagccugucuuucagaucucaaaggcucuuuucagagccaccaaaaaaaaaaaaaaaaaaaaaaaaaaaaaaaaaaaaaaaaaaaaaaaaaaaaaaaaaaaaaaaaagaauu

SEQ ID NO: 32076 - RNA, 1733 nt, Artificial Sequence; identical to SEQ ID NO: 32070
  mRNA product Design a-2 (hSL-A64-N5) comprising derived and/or modified sequence from LASV(Pinneo-NIG-1969;Clade I)__AIT17836__GPCmut7 (opt5)

SEQ ID NO: 32077 - RNA, 1733 nt, Artificial Sequence
  mRNA product Design a-2 (hSL-A64-N5) comprising derived and/or modified sequence from LASV(ISTH0009-NIG-2011;Clade II)__AIT17404__GPCmut7 (opt5)
aggagaguccgcucagccagguugcagaagcggcuuagcguguguccuaaucuucucucugcguguagguaggccugugccgcaaacaagcuuaccaugggccagaucauuaccuucuuucaagaggugccccacgucaucgaagagguuaugaacauugugcugaucgcccucagccugcuugcuauucugaaggggaucuacaauguggccacaugcggacucuucggccuggucuccuuucuucugcucugugggagaucuugcagcacgaccuauaaaggaguguacgaacugcagacacuggagcucgacauggcgucccugaacaugaccaugccucuuucuuguacaaagaauaacagccaucacuauaucaugguuggcaaugaaaccgggcuggagcucacacugaccaacacguccauuaucaaucauaaauucugcaaccuuucugaugcucacaagaaaaaucuguacgaccaugcccucaugagcauuaucuccaccuuucaccugagcauuccgaacuucaaucaguaugaggccaugucuugugauuuuaacggaggcaagaucuccgugcaguacaaucugagccacgcuuaugccgucgacgcugccaaccauugcggcacaauugcgaauggggugcuccaaaccuucaugcggauggccuggggaggcucuuacaucgcucuggauuccgggaagggaagcugggacuguaucaugacaucuuaccaguaucuuauuauccagaacaccacgugggaagaucacugccaguuuucccgccccagcccuauuggcuaccuggggcuccugucccaaagaacacgggacaucuauauuucucgcagacuucugggaaccuucacauggacccucagcgauuccgagggcaacgaaacccccggcggguacugucugacacgguggaugcugaucgaggccgagcucaaaugcuuuggaaauacggcuguugccaaguguaacgaaaaacaugacgaggaguucugcgauaugcugcgccuuuuugacuucaauaagcaggcgaucagacggcugaaaaccccugcccagaugagcauucagcucaucaacaaggcugugaaugcccugauuaacgaucaacuuaucaugaagaaucaucugcgcgacauuaugggcauccccuauugcaacuacucuaaauauuguuaccucaaucacacagucaccgggaagacaucccugccuagaugcugucuggugagcaacggaucuuaccucaaugaaacccacuucagcgacgauaucgaacagcaggcugacaacaugauuacggagcugcuucaaaaagaguauauggaucggcagggcaagacaccgcuggggcucguggaccuguuugucuucuccaccucuuuuuaccugaucagcauuuuccuucaccucaucaaaauucccacccaucgccacaucacaggaaagccuugccccaaaccucauagacugaaucacaugggcauuuguuccugcggccuguauaagcaccccgggguuccggugaaguggaaacggugaggacuagucccuguucccagagcccacuuuuuuuucuuuuuuugaaauaaaauagccugucuuucagaucucaaaggcucuuuucagagccaccaaaaaaaaaaaaaaaaaaaaaaaaaaaaaaaaaaaaaaaaaaaaaaaaaaaaaaaaaaaaaaaaagaauu

SEQ ID NO: 32078 - RNA, 1733 nt, Artificial Sequence
  mRNA product Design a-2 (hSL-A64-N5) comprising derived and/or modified sequence from LASV(ISTH2010-NIG-2012;Clade II)__AIT17482__GPCmut7 (opt5)
aggagaguccgcucagccagguugcagaagcggcuuagcguguguccuaaucuucucucugcguguagguaggccugugccgcaaacaagcuuaccaugggccagaucauuaccuucuuucaagaggugccccacgucaucgaagagguuaugaacauugugcugaucgcccucagccugcuugcuauucugaaggggaucuacaauguggccacaugcggacucuucggccuggucuccuuucuucugcucugugggagaucuugcagcacgaccuauaaaggaguguacgaacugcagacacuggagcucgacauggcgucccugaacaugaccaugccucuuucuuguacaaagaauaacagccaucacuauaucaugguuggcaaugaaaccgggcuggagcucacacugaccaacacguccauuaucaaucauaaauucugcaaccuuucugaugcucacaagaaaaaucuguacgaccaugcccucaugagcauuaucuccaccuuucaccugagcauuccgaacuucaaucaguaugaggccaugucuugugauuuuaacggaggcaagaucuccgugcaguacaaucugagccacgcuuaugccgucgacgcugccaaccauugcggcacaauugcgaauggggugcuccaaaccuucaugcggauggccuggggaggcucuuacaucgcucuggauuccgggaagggaagcugggacuguaucaugacaucuuaccaguaucuuauuauccagaacauuaccugggaagaucacugccaguuuucccgccccagcccuaucggcuaccuggggcuccugucccaaagaacgcgggacauuuauaucucucgcagacuucugggaacauucaccuggacacucagcgauuccgagggcaacgaaacccccggcggguacugucugacccgguggaugcugaucgaggccgagcucaaaugcuuuggaaauacagcuguugccaaguguaacgaaaaacaugacgaggaguucugcgauaugcugcgccuuuuugacuucaauaagcaggcgauuagacggcugaaaacgccugcccagaugagcauccagcucauuaacaaggcugugaaugcccugaucaacgaucaacuuauuaugaagaaucaucugcgcgacaucaugggcauccccuauugcaacuacucuaaauauuguuaccucaaucacaccgucacagggaagaccucccugccuagaugcugucuggugagcaacggaucuuaccucaaugaaacacacuucagcgacgauauugaacagcaggcugacaacaugaucaccgagcugcuucaaaaagaguauauugaucggcagggcaagacgccgcuggggcucguggaccuguuugucuucuccacaucuuuuuaccugaucagcauuuuccuucaccucguuaaaauccccacccaucgccacguggugggaaagccuugccccaaaccucauagacugaaucacaugggcauuuguuccugcggccuguauaagcaccccggggucccggugaaguggaaacggugaggacuagucccuguucccagagcccacuuuuuuuucuuuuuuugaaauaaaauagccugucuuucagaucucaaaggcucuuuucagagccaccaaaaaaaaaaaaaaaaaaaaaaaaaaaaaaaaaaaaaaaaaaaaaaaaaaaaaaaaaaaaaaaaagaauu

SEQ ID NO: 32079 - RNA, 1733 nt, Artificial Sequence
  mRNA product Design a-2 (hSL-A64-N5) comprising derived and/or modified sequence from LASV(Lassa virus/H.sapiens-wt/NGA/2015/ISTH_0543;Clade II)__AVO03639__GPCmut7 (opt5)
aggagaguccgcucagccagguugcagaagcggcuuagcguguguccuaaucuucucucugcguguagguaggccugugccgcaaacaagcuuaccaugggccagaucauuaccuucuuucaagaggugccccacgucaucgaagagguuaugaacauugugcugaucgcccucagccugcuugcuauucugaaggggaucuacaauguggccacaugcggacucuucggccuggucuccuuucuucugcucugugggagaucuugcagcacgaccuauaaaggaguguacgaacugcagacacuggagcucgacauggcgaaccugaauaugaccaugccucuuuccuguacaaagaacaauucucaucacuauaucaugguuggcaacgaaaccgggcuggagcucacacugaccaauacgagcauuaucaaccauaaauucugcaaucuuuccgaugcucacaagaaaaaccuguacgaccaugcccucaugucuauuaucagcaccuuucaccuguccauuccgaauuucaaccaguaugaggccaugagcugugauuuuaauggaggcaagaucucugugcaguacaaccugucccacacauaugcugucgacgccgcuaaucauugcggcaccauugccaacggggugcuccaaacauucaugcggauggcguggggaggcagcuacaucgcccuggauucugggaagggauccugggacuguaucaugaccagcuaccaguaucuuguuauucagaacacgacaugggaagaucacugccaguuuucucgccccuccccuaucggcuaccuggggcuccugagccaaagaacccgggacauuuauaucucccgcagacuucugggaacauucaccuggacccucucugauagcgagggcaaugaaacacccggcggguacugucugacgcgguggaugcugauugaggcugagcucaaaugcuuuggaaacaccgccguggcuaaguguaaugaaaaacaugacgaggaguucugcgauaugcugcgccuuuuugacuucaacaagcaggccaucagacggcugaaaaccccugcgcagauguccauccagcucauuaauaaggccgucaacgcucugaucaaugaucaacuuauuaugaagaaccaucugcgcgacaucaugggcauucccuauugcaauuacagcaaauauuguuaccucaaccacacagugacagggaagaccucucugccuagaugcugucugguguccaauggaagcuaccucaacgaaacgcacuucucugacgauaucgaacagcaggccgacaauaugaucacagagcugcuucaaaaagaguauauugaucggcagggcaagaccccgcuggggcucgucgaccuguuuguuuucagcaccuccuuuuaccugaucucuauuuuccuucaccucgugaaaauccccacacaucgccacauuaccggaaagccuugccccaaaccucauagacugaaccacaugggcaucuguagcugcggccuguauaagcaccccggggugccggucaaguggaaacggugaggacuagucccuguucccagagcccacuuuuuuuucuuuuuuugaaauaaaauagccugucuuucagaucucaaaggcucuuuucagagccaccaaaaaaaaaaaaaaaaaaaaaaaaaaaaaaaaaaaaaaaaaaaaaaaaaaaaaaaaaaaaaaaaagaauu

SEQ ID NO: 32080 - RNA, 1733 nt, Artificial Sequence
  mRNA product Design a-2 (hSL-A64-N5) comprising derived and/or modified sequence from LASV(Lassa virus/H.sapiens-wt/NGA/2016/ISTH_0009;Clade II)__AVO03571__GPCmut7 (opt5)
aggagaguccgcucagccagguugcagaagcggcuuagcguguguccuaaucuucucucugcguguagguaggccugugccgcaaacaagcuuaccaugggccagaucauuaccuucuuucaagaggugccccacgucaucgaagagguuaugaacauugugcugaucgcccucagccugcuugcuauucugaaggggaucuacaauguggccacaugcggacuccugggccuugucuccuuccugcuccugugugggagaucuugcagcacgaccuauaaaggaguguacgaacugcagacacucgagcuggacauggcgucccuuaacaugaccaugccucugucuuguacaaagaauaacagccaucacuauaucaugguuggcaaugaaaccgggcucgagcugacacuuaccaacacguccauuaucaaucauaaauuuugcaaccugucugaugcucacaagaaaaaucucuacgaccaugcccugaugagcauuaucuccaccuuccaccugagcauuccgaacuuuaaucaguaugaggccaugucuugugauuucaacggaggccggaucuccgugcaguacaaucucagccacucuuaugcugucgacgccgcuaaccauugcggcacaauugccaauggggugcugcaaaccuuuaugcgcauggcguggggaggcuccuacaucgcccuugauagcgggaagggaucuugggacuguaucaugacauccuaccaguaucugauuauccagaacaccacgugggaagaucacugccaguucagcagacccuccccuauuggcuaccucgggcugcuuucucaacggacacgcgacaucuauauuagcagacggcugcucggaaccuuuacauggacccuguccgauagcgagggcaacgaaacccccggcggguacugucugacacgcuggaugcucaucgaggcugagcugaagugcuucggaaauacggccguugcuaaauguaacgaaaagcaugacgaggaauuuugcgauaugcuuagacuguucgacuuuaauaaacaggccauccggcgccucaagaccccugcgcagaugucuauucagcugaucaacaaagccgugaaugcucuuauuaacgaucaacugaucaugaagaaucaccucagagacauuaugggcauccccuauugcaacuacuccaaguauuguuaccugaaucacacagucaccgggaaaacaagccugccucggugcugucucgugucuaacggaagcuaccugaaugagacccauuucuccgacgauaucgaacagcaggccgacaacaugauuacggagcuucugcaaaaggaguauaucgaucgccagggcaaaacaccgcucgggcugguggaccuguucgucuuuucuaccagcuucuaccuuauuuccaucuuucuccaccugguuaagauucccacccauagacacaucacaggaaaaccuugccccaagccucaucggcugaaucacaugggcauuuguagcugcggccucuauaaccaccccggggugccggugaaauggaagcgcugaggacuagucccuguucccagagcccacuuuuuuuucuuuuuuugaaauaaaauagccugucuuucagaucucaaaggcucuuuucagagccaccaaaaaaaaaaaaaaaaaaaaaaaaaaaaaaaaaaaaaaaaaaaaaaaaaaaaaaaaaaaaaaaaagaauu

SEQ ID NO: 32081 - RNA, 1733 nt, Artificial Sequence
  mRNA product Design a-2 (hSL-A64-N5) comprising derived and/or modified sequence from LASV(Lassa virus/H.sapiens-wt/NGA/2016/ISTH_0017;Clade II)__AVO03567__GPCmut7 (opt5)
aggagaguccgcucagccagguugcagaagcggcuuagcguguguccuaaucuucucucugcguguagguaggccugugccgcaaacaagcuuaccaugggccagaucauuaccuucuuucaagaggugccccacgucaucgaagagguuaugaacauugugcugaucgcccucagccugcuugcuauucugaaggggaucuacaauguggccacaugcggacucuucggccuggucuccuuucuucugcucugugggagaucuugcagcacgaccuauaaaggaguguacgaacugcagacacuggagcucgacauggcgucccugaacaugaccaugccucuuucuuguacaaagaauaacagccaucacuauaucaugguuggcaaugaaaccgggcuggagcucacacugaccaacacguccauuaucaaucauaaauucugcaaccuuucugaugcucacaagaaaaaucuguacgaccaugcccucaugagcauuaucuccaccuuucaccugagcauuccgaacuucaaucaguaugaggccaugucuugugauuuuaacggaggcaagaucuccgugcaguacaaucugagccacacauaugcuauugacgccgcuaaccauugcggcaccaucgccaaugggguccuccaaacauucaugcggauggcguggggaggcucuuacaucgcccuggauuccgggaagggaagcugggacuguauuaugaccucuuaccaguaucuuaucauucagaacacgacaugggaagaucacugccaguuuucccgccccagcccuaucggcuaccuggggcuccugucccaaagaacccgggacauuuauaucucucgcagacuucugggaacauucaccuggacccucagcgauuccgagggcaacgaaacacccggcggguacugucugacgcgguggaugcugaucgaggcugagcucaaaugcuuuggaaauaccgccguggcuaaguguaacgaaaaacaugacgaggaguucugcgauaugcugcgccuuuuugacuucaauaagcaggccauuagacggcugaaaaccccugcgcagaugagcauccagcucauuaacaaggccguuaaugcucugaucaacgaucaacuuauuaugaagaaucaucugcgcgacaucaugggcauccccuauugcaacuacucuaaauauuguuaccucaaucacacagugacagggaagaccucccugccuagaugcugucuggucagcaacggaucuuaccucaaugaaacgcacuucagcgacgauauugaacagcaggccgacaacaugaucacagagcugcuucaaaaagaguauauggaucggcagggcaagaccccgcuggggcucguggaccuguuuguguucuccaccucuuuuuaccugauuagcaucuuccuucaccucguccgcauucccacacauagacacguuaucggaaaaccuugccccaagccucaucggcugaaucacaugggcauuuguuccugcggccuguauaaacaccccggggugccggugaaguggaagcgcugaggacuagucccuguucccagagcccacuuuuuuuucuuuuuuugaaauaaaauagccugucuuucagaucucaaaggcucuuuucagagccaccaaaaaaaaaaaaaaaaaaaaaaaaaaaaaaaaaaaaaaaaaaaaaaaaaaaaaaaaaaaaaaaaagaauu

SEQ ID NO: 32082 - RNA, 1733 nt, Artificial Sequence
  mRNA product Design a-2 (hSL-A64-N5) comprising derived and/or modified sequence from LASV(Lassa virus/H.sapiens-wt/NGA/2018/ISTH_0959;Clade II)__AVV65099__GPCmut7 (opt5)
aggagaguccgcucagccagguugcagaagcggcuuagcguguguccuaaucuucucucugcguguagguaggccugugccgcaaacaagcuuaccaugggccagaucauuaccuucuuucaagaggugccccacgucaucgaagagguuaugaacauugugcugaucgcccucagccugcuugcuauucugaaggggaucuacaauguggucacaugcggacucuucggccugguguccuuucuucugcucugugggagaucuugcagcacgaccuauaaaggaguuuacgaacugcagacacuggagcucgacauggccucccugaacaugaccaugccucuuucuuguacaaagaauaacagccaucacuauaucauggugggcaaugaaaccgggcuggagcucacacugaccaacacguccauuaucaaucauaaauucugcaaccuuucugaugcgcacaagaaaaaucuguacgaccaugcucucaugagcauuaucuccaccuuucaccugagcauuccgaacuucaaucaguaugaggccaugucuugugauuuuaacggaggcaagaucuccguccaguacaaucugagccacgccuaugcuauugacgccgcuaaccauugcggcacaaucgccaauggggugcuccaaaccuucaugcggauggcguggggaggcucuuacaucgcccuggauuccgggaagggaagcugggacuguauuaugacaucuuaccaguaucuuaucauucagaacaccacgugggaagaucacugccaguuuucccgccccagcccuaucggcuaccuggggcuccugucccaaagaacacgggacauuuauaucucucgcagacuucugggaaccuucacauggacccucagcgauuccgagggcaacgaaacccccggcggguacugucugacacgguggaugcugaucgaggcugagcucaaaugcuuuggaaauacggccguugcuaaguguaacgaaaaacaugacgaggaguucugcgauaugcugcgccuuuuugacuucaauaagcaggccauuagacggcugaaaaccccugcgcagaugagcauccagcucauuaacaaggccgugaaugcucugaucaacgaucaacuuauuaugaagaaucaucugcgcgacaucaugggcauccccuauugcaacuacucuaaauauuguuaccucaaucacacagucaccgggaagacaucccugccuagaugcugucuggugagcaacggaucuuaccucaaugaaacccacuucagcgacgauauugaacagcaggccgacaacaugaucacggagcugcuucaaaaagaguauauugaucggcagggcaagacaccgcuggggcucguggaccuguuugucuucuccaccucuuuuuaccugaucagcauuuuccuucaccucguuaaaauccccacccaucgccacgugauuggaaagccuugccccaaaccucauagacugaaucacaugggcaucuguuccugcggccuguauaagcaccccggggugccggucaaguggaaacggugaggacuagucccuguucccagagcccacuuuuuuuucuuuuuuugaaauaaaauagccugucuuucagaucucaaaggcucuuuucagagccaccaaaaaaaaaaaaaaaaaaaaaaaaaaaaaaaaaaaaaaaaaaaaaaaaaaaaaaaaaaaaaaaaagaauu

SEQ ID NO: 32083 - RNA, 1733 nt, Artificial Sequence
  mRNA product Design a-2 (hSL-A64-N5) comprising derived and/or modified sequence from LASV(LASV003-NIG-2008;Clade II)__AIT17580__GPCmut7 (opt5)
aggagaguccgcucagccagguugcagaagcggcuuagcguguguccuaaucuucucucugcguguagguaggccugugccgcaaacaagcuuaccaugggccagaucauuaccuucuuucaagaggugccccacgucaucgaagagguuaugaacauugugcugaucgcccucagccugcuugcuauucugaaggggaucuacaauguggccacaugcggacucuucggccuggucuccuuucuucugcucugugggagaucuugcagcacgaccuauaaaggaguguacgaacugcagacacuggagcucgacauggcgucccugaacaugaccaugccucuuucuuguacaaagaauaacagccaucacuauaucaugguuggcaaugaaaccgggcuggagcucacacugaccaacacguccauuaucaaucauaaauucugcaaccuuucugaugcucacaagaaaaaucuguacgaccaugcccucaugagcauuaucuccaccuuucaccugagcauuccgaacuucaaucaguaugaggccaugucuugugauuuuaacggaggcaagaucuccgugcaguacaaucugagccacacauaugcugucgacgccgcuaaccauugcggcaccauugccaauggggugcuccaaacauucaugcggauggcguggggaggcucuuacaucgcccuggauuccgggaagggaagcugggacuguaucaugaccucuuaccaguaucuuauuauccagaacacgacaugggaagaucacugccaguuuucccgccccagcccuauuggcuaccuggggcuccugucccaaagaacccgggacaucuauauuucucgcagacuucugggaacauucaccuggacccucagcgauuccgagagcaacgaaacacccggcggcuacugucugacgcgguggaugcugaucgaggcugagcucaaaugcuuugggaauaccgccguugcuaaguguaacgaaaaacaugacgaggaguucugcgauaugcugcgccuuuuugacuucaauaagcaggccaucagacggcugaaagcgccugcccagaugucuauucagcucaucaacaaggcugugaaugcccugauuaacgaucaacuuaucaugaagaaucaucugcgcgacauuaugggaauccccuauugcaacuacuccaaauauuguuaccucaaucacacagucaccggcagaacaagccugccucggugcugucuggugucuaacgggagcuaccucaaugaaacccacuucuccgacgauaucgaacagcaggcugacaacaugauuacggagcugcuucaaaaggaguauauggaucgccagggaaaaacaccgcugggccucguggaccuguuugucuucucuaccagcuuuuaccugaucuccauuuuccuucaccucguuaagauccccacccauagacacgugauugggaaaccuugccccaagccucaucggcugaaucacaugggaaucuguagcugcggccuguauaaacaccccggcgugccggucaaguggaagcgcugaggacuagucccuguucccagagcccacuuuuuuuucuuuuuuugaaauaaaauagccugucuuucagaucucaaaggcucuuuucagagccaccaaaaaaaaaaaaaaaaaaaaaaaaaaaaaaaaaaaaaaaaaaaaaaaaaaaaaaaaaaaaaaaaagaauu

SEQ ID NO: 32084 - RNA, 1733 nt, Artificial Sequence
  mRNA product Design a-2 (hSL-A64-N5) comprising derived and/or modified sequence from LASV(LASV035-NIG-2009;Clade II)__AIT17588__GPCmut7 (opt5)
aggagaguccgcucagccagguugcagaagcggcuuagcguguguccuaaucuucucucugcguguagguaggccugugccgcaaacaagcuuaccaugggccagaucauuaccuucuuucaagaggugccccacgucaucgaagagguuaugaacauugugcugaucgcccucagccugcuugcuauucugaaggggaucuacaauguggccacaugcggacucuucggccuggucuccuuucuucugcucugugggagaucuugcagcacgaccuauaaaggaguguacgaacugcagacacuggagcucgacauggcgucccugaacaugaccaugccucuuucuuguacaaagaauaacagccaucacuauaucaugguuggcaaugaaaccgggcuggagcucacacugaccaacacguccauuaucaaucauaaauucugcaaccuuucugaugcucacaagaaaaaucuguacgaccaugcccucaugagcauuaucuccaccuuucaccugagcauuccgaacuucaaucaguaugaggccaugucuugugauuuuaacggaggcaagaucuccgugcaguacaaucugagccacgcuuaugccgucgacgcugccaaccauugcggcacaauugcgaauggggugcuccaaaccuucaugcggauggccuggggaggcucuuacaucgcucuggauuccgggaagggaagcugggacuguaucaugacaucuuaccaguaucuuauuauccagaacaccacgugggaagaucacugccaguuuucccgccccagcccuauuggcuaccuggggcuccugucccaaagaacacgggacaucuauauuucucgcagacuucugggaaccuucacauggacccucagcgauuccgagggcaacgaaacccccggcggguacugucugacacgguggaugcugaucgaggccgagcucaaaugcuuuggaaauacggcuguugccaaguguaacgaaaaacaugacgaggaguucugcgauaugcugcgccuuuuugacuucaauaagcaggcgaucagacggcugaaagccccugcucagaugagcauucagcucaucaacaaggccgugaaugcucugauuaacgaucaacuuaucaugaagaaucaucugcgcgacauuaugggcauccccuauugcaacuacucuaaauauuguuaccucaaucacaccgucacagggaagaccucccugccuagaugcugucuggugagcaacggaucuuaccucaaugaaacacacuucagcgacgauaucgaacagcaggccgacaacaugauuaccgagcugcuucaaaaagaguauaucgaucggcagggcaagacgccgcuggggcucguggaccuguuugucuucuccacaucuuuuuaccugauuagcaucuuccuucaccucguuaaaauucccacccaucgccacgugaucggaaagccuugccccaaaccucauagacugaaucacaugggcauuuguuccugcggccuguauaagcaccccggggugccggucaaguggaaacggugaggacuagucccuguucccagagcccacuuuuuuuucuuuuuuugaaauaaaauagccugucuuucagaucucaaaggcucuuuucagagccaccaaaaaaaaaaaaaaaaaaaaaaaaaaaaaaaaaaaaaaaaaaaaaaaaaaaaaaaaaaaaaaaaagaauu

SEQ ID NO: 32085 - RNA, 1733 nt, Artificial Sequence
  mRNA product Design a-2 (hSL-A64-N5) comprising derived and/or modified sequence from LASV(LASV1000-NIG-2009;Clade II)__AIT17782__GPCmut7 (opt5)
aggagaguccgcucagccagguugcagaagcggcuuagcguguguccuaaucuucucucugcguguagguaggccugugccgcaaacaagcuuaccaugggccagaucauuaccuucuuucaagaggugccccacgucaucgaagagguuaugaacauugugcugaucgcccucagccugcuugcuauucugaaggggaucuacaauguggccacaugcggacucuucggccuggucuccuuucuucugcucugugggagaucuugcagcacgaccuauaaaggaguguacgaacugcagacacuggagcucgacauggcgucccugaacaugaccaugccucuuucuuguacaaagaauaacagccaucacuauaucaugguuggcaaugaaaccgggcuggagcucacacugaccaacacguccauuaucaaucauaaauucugcaaccuuucugaugcucacaagaaaaaucuguacgaccaugcccucaugagcauuaucuccaccuuucaccugagcauuccgaacuucaaucaguaugaggccaugucuugugauuuuaacggaggcaagaucuccgugcaguacaaucugagccacacauaugcugucgacgccgcuaaccauugcggcaccauugccaauggggugcuccaaacauucaugcggauggcguggggaggcucuuacaucgcccuggauuccgggaagggaagcugggacuguaucaugaccucuuaccaguaucuuauuauccagaacacgacaugggaagaucacugccaguuuucccgccccagcccuauuggcuaccuggggcuccugucccaaagaacccgggacaucuauauuucucgcagacuucugggaacauucaccuggacccucagcgauuccgagggcaacgaaacacccggcggguacugucugacgcgguggaugcugaucgaggcugagcucaaaugcuuuggaaauaccgccguugcuaaguguaacgaaaaacaugacgaggaguucugcgauaugcugcgccuuuuugacuucaauaagcaggccaucaaaagacugaagaccccugcgcagaugagcauucagcucaucaacaaggccgugaaugcucugauuaacgaucaacuuaucaugaaaaaucaucugcgggacauuaugggcauccccuauugcaacuacucuaaguauuguuaccucaaucacacagucacagggaaaaccucccugccucgcugcugucuggugagcaacggaucuuaccucaaugaaacgcacuucagcgacgauaucgaacagcaggccgacaacaugauuacagagcugcuucaaaaggaguauaucgauagacagggcaaaaccccgcuggggcucguggaccuguuugucuucuccaccucuuuuuaccugauuagcaucuuccuucaccucguuaagauucccacacaucggcacguggugggaaaaccuugccccaagccucaucgccugaaucacaugggcaucuguuccugcggccuguauaagcaccccggggucccggugaaauggaagagaugaggacuagucccuguucccagagcccacuuuuuuuucuuuuuuugaaauaaaauagccugucuuucagaucucaaaggcucuuuucagagccaccaaaaaaaaaaaaaaaaaaaaaaaaaaaaaaaaaaaaaaaaaaaaaaaaaaaaaaaaaaaaaaaaagaauu

SEQ ID NO: 32086 - RNA, 1733 nt, Artificial Sequence
  mRNA product Design a-2 (hSL-A64-N5) comprising derived and/or modified sequence from LASV(LASV221-NIG-2010;Clade II)__AIT17624__GPCmut7 (opt5)
aggagaguccgcucagccagguugcagaagcggcuuagcguguguccuaaucuucucucugcguguagguaggccugugccgcaaacaagcuuaccaugggccagaucauuaccuucuuucaagaggugccccacgucaucgaagagguuaugaacauugugcugaucgcccucagccugcuugcuauucugaaggggaucuacaauguggccacaugcggacucuucggccuggucuccuuucuucugcucugugggagaucuugcagcacgaccuauaaaggaguguacgaacugcagacacuggagcucgacauggcgucccugaacaugaccaugccucuuucuuguacaaagaauaacagccaucacuauaucaugguuggcaaugaaaccgggcuggagcucacacugaccaacacguccauuaucaaucauaaauucugcaaccuuucugaugcucacaagaaaaaucuguacgaccaugcccucaugagcauuaucuccaccuuucaccugagcauuccgaacuucaaucaguaugaggccaugucuugugauuuuaacggaggcaagaucuccgugcaguacaaucugagccacacauaugcuauugacgccgcuaaccauugcggcaccaucgccaaugggguccuccaaacauucaugcggauggcguggggaggcucuuacaucgcccuggauuccgggaagggaagcugggacuguauuaugaccucuuaccaguaucuuaucauucagaacacgacaugggaagaucacugccaguuuucccgccccagcccuaucggcuaccuggggcuccugucccaaagaacccgggacauuuauaucucucgcagacuucugggaacauucaccuggacccucagcgauuccgagggcaacgaaacacccggcggguacugucugacgcgguggaugcugaucgaggcugagcucaaaugcuuuggaaauaccgccguggcuaaguguaacgaaaaacaugacgaggaguucugcgauaugcugcgccuuuuugacuucaauaagcaggccauuagacggcugaaaaccccugcgcagaugagcauccagcucauuaacaaggccguuaaugcucugaucaacgaucaacuuauuaugaagaaucaucugcgcgacaucaugggcauccccuauugcaacuacucuaaauauuguuaccucaaucacacagugacagggaagaccucccugccuagaugcugucuggucagcaacggaucuuaccucaaugaaacgcacuucagcgacgauauugaacagcaggccgacaacaugaucacagagaugcugcaaaaagaguauauggaucggcagggcaagaccccgcuugggcugguggaccucuuuguguucuccaccucuuuuuaccugauuagcaucuuccugcaccuugucaaaauucccacacaucgccacguuaucggaaagccuugccccaaaccucauagacucaaucacaugggcauuuguuccugcggccuguauaagcaccccggggugccggugaaguggaaacggugaggacuagucccuguucccagagcccacuuuuuuuucuuuuuuugaaauaaaauagccugucuuucagaucucaaaggcucuuuucagagccaccaaaaaaaaaaaaaaaaaaaaaaaaaaaaaaaaaaaaaaaaaaaaaaaaaaaaaaaaaaaaaaaaagaauu

SEQ ID NO: 32087 - RNA, 1733 nt, Artificial Sequence
  mRNA product Design a-2 (hSL-A64-N5) comprising derived and/or modified sequence from LASV(LASV237-NIG-2010;Clade II)__AIT17638__GPCmut7 (opt5)
aggagaguccgcucagccagguugcagaagcggcuuagcguguguccuaaucuucucucugcguguagguaggccugugccgcaaacaagcuuaccaugggccagaucauuaccuucuuucaagaggugccccacgucaucgaagagguuaugaacauugugcugaucgcccucagccugcuugcuauucugaaggggaucuacaauguggccacaugcggacucuucggccuggucuccuuucuucugcucugugggagaucuugcagcacgaccuauaaaggaguguacgaacugcagacacuggagcucgacauggcgucccugaacaugaccaugccucuuucuuguacaaagaauaacagccaucacuauaucaugguuggcaaugaaaccgggcuggagcucacacugaccaacacguccauuaucaaucauaaauucugcaaccuuucugaugcucacaagaaagaccuguacgaucaugcccucaugagcauuaucuccaccuuucaccugagcauuccgaauuucaaccaguaugaggccaugucuugugacuuuaauggaggcaagaucuccgugcaguacaaccugagccacacauaugcugucgaugccgcuaaucauugcggcaccauugccaacggggugcuccaaacauucaugcggauggcguggggaggcucuuacaucgcccuggacuccgggaagggaagcugggauuguaucaugaccucuuaccaguaucuuauuauccagaauacgacaugggaagaccacugccaguuuucccgccccagcccuauuggcuaccuggggcuccugucccaaagaacccgggauaucuauauuucucgcagacuucugggaacauucaccuggacccucagcgacuccgagggcaacgaaacacccggcggguacugucugacgcgguggaugcugaucgaggcugagcucaaaugcuuuggaaacaccgccguugcuaaguguaaugaaaaacaugaugaggaguucugcgacaugcugcgccuuuuugauuucaacaagcaggccaucagacggcugaaaaccccugcgcagaugagcauucagcucaucaauaaggccgugaacgcucugauuaaugaccaacuuaucaugaagaaccaucugcgcgacauuaugggcauccccuauugcaauuacucuaaauauuguuaccucaaccacacagucacagggaagaccucccugccuagaugcugucuggugagcaauggaucuuaccucaacgaaacgcacuucagcgaugacaucgaacagcaggccgauaauaugauuacagagcugcuucaaaaagaguauauggaccggcagggcaagaccccgcuggggcucguggaucuguuugucuucuccaccucuuuuuaccugaucagcauuuuccuucaccucaucaaaauucccacacaucgccacaucaccggaaagccuugccccaaaccucauagacugaaccacaugggcauuuguuccugcggccuguauaagcaccccgggguuccggugaaguggaaacggugaggacuagucccuguucccagagcccacuuuuuuuucuuuuuuugaaauaaaauagccugucuuucagaucucaaaggcucuuuucagagccaccaaaaaaaaaaaaaaaaaaaaaaaaaaaaaaaaaaaaaaaaaaaaaaaaaaaaaaaaaaaaaaaaagaauu

SEQ ID NO: 32088 - RNA, 1733 nt, Artificial Sequence
  mRNA product Design a-2 (hSL-A64-N5) comprising derived and/or modified sequence from LASV(LASV253-NIG-2011;Clade II)__AIT17670__GPCmut7 (opt5)
aggagaguccgcucagccagguugcagaagcggcuuagcguguguccuaaucuucucucugcguguagguaggccugugccgcaaacaagcuuaccaugggccagaucauuaccuucuuucaagaggugccccacgucaucgaagagguuaugaacauugugcugaucgcccucagccugcuugcuauucugaaggggaucuacaauguggccacaugcggacucuucggccuggucuccuuucuucugcucugugggagaucuugcagcacgaccuauaaaggaguguacgaacugcagacacuggagcucgacauggcgucccugaacaugaccaugccucuuucuuguacaaagaauaacagccaucacuauaucaugguuggcaaugaaaccgggcuggagcucacacugaccaacacguccauuaucaaucauaaauucugcaaccuuucugaugcucacaagaaaaaucuguacgaccaugcccucaugagcauuaucuccaccuuucaccugagcauuccgaacuucaaucaguaugaggccaugucuugugauuuuaacggaggcaagaucuccgugcaguacaaucugagccacacauaugcugucgacgccgcuaaccauugcggcaccauugccaauggggugcuccaaacauucaugcggauggcguggggaggcucuuacaucgcccuggauuccgggaagggaagcugggacuguaucaugaccucuuaccaguaucuuauuauccagaacacgacaugggaagaucacugccaguuuucccgccccagcccuauuggcuaccuggggcuccugucccaaagaacccgggacaucuauauuucucgcagacuucugggaacauucaccuggacccucagcgauuccgagggcaacgaaacacccggcggguacugucugacgcgguggaugcugaucgaggcugagcucaaaugcuuuggaaauaccgccguugcuaaguguaacgaaaaacaugacgaggaguucugcgauaugcugcgccuuuuugacuucaauaagcaggccaucagacggcugaaagcgccugcccagaugagcauucagcucaucaacaaggcugugaaugcccugauuaacgaucaacuuaucaugaagaaucaucugcgcgacauuaugggcauccccuauugcaacuacucuaaauauuguuaccucaaucacacagucaccgggagaacaucccugccucggugcugucuggugagcaacggaucuuaccucaaugaaacccacuucagcgacgauaucgaacagcaggcugacaacaugauuacggagcugcuucaaaaggaguauaucgaucgccagggcaaaacaccgcuggggcucguggaccuguuugucuucuccaccucuuuuuaccugauuagcaucuuccuucaccucguuaagauucccacccauagacacaucauuggaaaaccuugccccaagccucaucggcugaaucacaugggcaucuguuccugcggccuguauaaacaccccggggugccggugaaguggaagcgcugaggacuagucccuguucccagagcccacuuuuuuuucuuuuuuugaaauaaaauagccugucuuucagaucucaaaggcucuuuucagagccaccaaaaaaaaaaaaaaaaaaaaaaaaaaaaaaaaaaaaaaaaaaaaaaaaaaaaaaaaaaaaaaaaagaauu

SEQ ID NO: 32089 - RNA, 1733 nt, Artificial Sequence
  mRNA product Design a-2 (hSL-A64-N5) comprising derived and/or modified sequence from LASV(LASV254-NIG-2011;Clade II)__AIT17674__GPCmut7 (opt5)
aggagaguccgcucagccagguugcagaagcggcuuagcguguguccuaaucuucucucugcguguagguaggccugugccgcaaacaagcuuaccaugggccagaucauuaccuucuuucaagaggugccccacgucaucgaagagguuaugaacauugugcugaucgcccucagccugcuugcuauucugaaggggaucuacaauguggccacaugcggacucuucggccuggucuccuuucuucugcucugugggagaucuugcagcacgaccuauaaaggaguguacgaacugcagacacuggagcucgacaugaccaaccugaauaugacaaugccucuuuccuguaccaagaacaauucucaucacuauaucaugguuggcaacgaaacagggcuggagcucacccugacgaauaccagcauuaucaaccauaaauucugcaaucuuuccgaugcgcacaagaaaaaccuguacaaucaugcucucaugucuauuaucagcacauuucaccuguccauuccgaacuucaaucaguaugaggccaugagcugugacuuuaacggaggcaagaucucugugcaguacaaucugucccacagcuaugccgucgaugcugccaaccauugcggcaccauugcuaacggggugcuccaaacauucaugcggauggccuggggaggcucuuacaucgcgcuggacuccgggaagggaaauugggauuguaucaugaccagcuaccaguaucuuauuauccagaacacgacaugggaagaccacugccaguuuucucgccccuccccuauuggcuaccuggggcuccugagccaaagaacccgggauaucuauauuucccgcagacuucugggaacauucaccuggacccucucugacagcgagggcaaugaaacacccggcggguacugucugacgcgguggaugcugaucgaggccgagcucaaaugcuuuggaaacaccgcuguugccaaguguaaugaaaaacaugaugaggaguucugcgacaugcugcgccuuuuugauuucaacaagcaggcuaucagacggcugaaaaccccugcccaggcgaauauucagcucaucaacaaggccgugaaugcucugauuaacgaccaacuuaucaugaagaaucaucugcgcgauauuaugggcauccccuauugcaacuacuccaaauauuguuaccucaaucacacagucacagggaagaccagccugccuagaugcugucuggugucuaacggauccuaccucaaugaaacgcacuucagcgacgacaucgaacagcaggccgauaacaugauuacagagcugcuucaaaaagaguauauggaccggcagggcaagaccccgcuggggcucguggaucuguuugucuucucuaccagcuuuuaccugaucuccauuuuccuucaccucguuaaaauccccacacaucgccacgugauuggaaagccuugccccaaaccucauagacugaaccacaugggcaucuguucuugcggccuguauaagcaccccggggugccggucaaguggaaacggugaggacuagucccuguucccagagcccacuuuuuuuucuuuuuuugaaauaaaauagccugucuuucagaucucaaaggcucuuuucagagccaccaaaaaaaaaaaaaaaaaaaaaaaaaaaaaaaaaaaaaaaaaaaaaaaaaaaaaaaaaaaaaaaaagaauu

SEQ ID NO: 32090 - RNA, 1733 nt, Artificial Sequence
  mRNA product Design a-2 (hSL-A64-N5) comprising derived and/or modified sequence from LASV(Nig08-A19;Clade III)__ADU56618__GPCmut7 (opt5)
aggagaguccgcucagccagguugcagaagcggcuuagcguguguccuaaucuucucucugcguguagguaggccugugccgcaaacaagcuuaccaugggccagaucgugaccuucuuucaagaggucccccacguuauugaagaggugaugaacaucgugcugauugcccucagcauccuggcuauucuuaaggggcuguacaauaucgccacaugcggacucaucggccuggucacguuccuucugcucuccgggagaucuuguagcaugaccuauaaaggaguguacgaacugcagacacuggagcucaacaugaauacccugaacaugacaaugccucuuuccugcaccaagaauaacucucaucacuauauuaugguuggcaaugaaacagggcuggagcucacccugacgaacaccagccuucugcaucacaaauuuuguaaucucuccgacgcgcauaagaaaaaccuguacgaucacacacugaugucuaucauuagcaccuuccaccucuccaucccgaauuuuaaccaguaugaggcuaugagcugcgacuucaauggaggcaagauuacagugcaguacaaccugucucauuccuaugccaucgaugccgcuaaucacuguggcaccgucgccaacggggugcuucaaacguuuaugcggauggcuuggggaggcagcuacauugcccuggacucugggcgcggaaagugggauugcaucaugacauccuaccaguaucucaucauucagaacaccacaugggaagaccauugucaguucagcagacccucuccuaucggcuaccuggggcuucugucccaacggacccgcgauauuuauaucagcagacggcuccugggaaccuuuacauggacgcuguccgacucugagggcaaugaaacccccggcggguacugccucacacgcuggaugcugauugaggcggagcuuaaauguuucggaaacaccgccguugcuaagugcaaugaaaaacacgaugaggaauuuugugacaugcugagacucuucgauuuuaacaagcaggccauccggcgccugaaagcuccugcccagaugagcauccagcuuauuaauaaggcggugaacgcccugaucaaugaccaacucauuaugaagaaccaccugagagauaucaugggcauucccuauugcaauuacuccaaauauugcuaccugaaccauacaagcaccgggcggacgucucucccucgcuguugccuggucuccaauggaagcuaccuuaacgagacacacuucucugacgacaucgaacagcaggcugauaauaugaucaccgagaugcugcaaaaggaguaucucgacagacagggcaaaaccccgcuggggcugguggaucuuuucguguuuagcacauccuucuaccucauuucuaucuuucugcaucuggucaagauucccacccaccggcauaucguuggaaaaccuugucccaagccucaccgccucaaccacaugggcauuugcagcuguggccuguauaaacagcccggggugccggugagauggaagcggugaggacuagucccuguucccagagcccacuuuuuuuucuuuuuuugaaauaaaauagccugucuuucagaucucaaaggcucuuuucagagccaccaaaaaaaaaaaaaaaaaaaaaaaaaaaaaaaaaaaaaaaaaaaaaaaaaaaaaaaaaaaaaaaaagaauu

SEQ ID NO: 32091 - RNA, 1736 nt, Artificial Sequence
  mRNA product Design a-2 (hSL-A64-N5) comprising derived and/or modified sequence from LASV(G1180-SLE-2010;Clade IV)__AIT17168__GPCmut7 (opt5)
aggagaguccgcucagccagguugcagaagcggcuuagcguguguccuaaucuucucucugcguguagguaggccugugccgcaaacaagcuuaccaugggccagaucgugaccuucuuucaagaggucccccacguuauugaagaggugaugaacaucgugcugauugcccucagcauccuggcuguccuuaaggggcuguacaauuucgccacaugcggacucgugggccugcuuacguuucugcuccugugugggagauccugcaccgcgucucgguauaaaggaguuuacgaacugcagacacucgagcugaacauggaaacccuuaauaugacaaugccucugagcuguaccaagaacaauucccaucacuauauuauggugggcaacgagacagggcucgagcugacccuuacgaauaccucuaucaucaaccauaaauucugcaaucugagcgacgcucacaagaaaaaccucuacgaucaugcccugauguccauuaucucuacauuucaccugagcauuccgaauuucaaccaguaugaagccauguccugugacuuuaauggaggcaagaucagcguccaguacaaccucucucacuccuaugcuggcgaugccgcuaaucauugcgggaccguggccaacggaguucugcaaacauucaugcgcauggcguggggcgggagcuacauugcccuugacucuggacacggcuccugggauuguaucaugaccagcuaccaguaucugauuauccagaacacgacaugggaggaccauugccaguuuucuagacccuccccuaucggguaccucggacugcuuagccaacggacccgcgauauuuauaucuccagacggcugcucggcacauucaccuggacccugucugacagcgaaggcaaggauacacccgggggauacugucugacgcgcuggaugcucauugaggcugagcugaaaugcuuuggcaauaccgccguggcuaaguguaacgaaaaacacgacgaggaguucugcgauaugcuuagacuguuugacuucaauaagcaggccauccagcggcucaaagcgccugcccagauguccauucaacugaucaacaaggcugucaaugcccuuaucaacgaucagcugauuaugaagaaucaccuccgcgacaucauggggauucccuauugcaacuacagcaaauauuguuaccugaaucauacaaccacaggaaagaccucucugccuaaaugcugucucguguccaacggcagcuaccugaaugaaacgcacuucucugacgauaucgaacagcaagcugacaacaugauuacagagaugcuucagaaggaguauauggaaagacaggggaaaaccccgcugggacucguggaucuguuugucuucagcaccuccuuuuaccugaucucuaucuuccuucaucucguuaagauucccacacaccggcauaucgugggcaaaagcugcccuaagccccaccgccugaaucacaugggcauuuguuccugcgggcuguauaagcagccuggagugcccgucaaauggaagagaugaggacuagucccuguucccagagcccacuuuuuuuucuuuuuuugaaauaaaauagccugucuuucagaucucaaaggcucuuuucagagccaccaaaaaaaaaaaaaaaaaaaaaaaaaaaaaaaaaaaaaaaaaaaaaaaaaaaaaaaaaaaaaaaaagaauu

SEQ ID NO: 32092 - RNA, 1736 nt, Artificial Sequence
  mRNA product Design a-2 (hSL-A64-N5) comprising derived and/or modified sequence from LASV(G1442-SLE-2011;Clade IV)__AIT17180__GPCmut7 (opt5)
aggagaguccgcucagccagguugcagaagcggcuuagcguguguccuaaucuucucucugcguguagguaggccugugccgcaaacaagcuuaccaugggccagaucgugaccuucuuucaagaggucccccacguuauugaagaggugaugaacaucgugcugauugcccucagcauccuggcuguccuuaaggggcuguacaauguggccacaugcggacucauuggccugguuacguuccuucugcucugugggagauccugcaccacaacccuguauaaaggaguguacgaacugcagacacucgagcugaacauggaaacccuuaauaugacaaugccucugucuuguaccaagaacaauagccaucacuauauccgggucggcaacgagacggggcucgagcugacccuuacaaauaccuccaucauuaaccauaaauuuugcaaucugucugacgcgcacaagaaaaaccucuacgaucaugcucugaugagcaucauuuccacauuccaccugucuaucccgaauuuuaaccaguaugaagccaugagcugugacuucaauggaggcaagauuuccgugcaguacaaccucagccacucuuaugccggcgaugcugccaaucauugcgggaccguugcuaacggagugcugcaaacguuuaugcgcauggccuggggcggguccuacaucgcgcuugacagcggaagaggcaacugggauuguauuaugacaucuuaccaguaucugaucauccagaauaccacaugggacgaucacugccaguucucccggcccagcccuauuggguaccucggacugcuuucucaacgcaccagagacgucuauaucucccggcgccugcucggcaccuuuacauggacgcugagcgauuccgagggcaaggacacccccgggggauacugucugacaagauggaugcucauugaagccgagcugaaaugcuucggcaacaccgcuguggccaaguguaaugagaaacaugaugaagaguuuugcgacaugcuucggcuguucgauuuuaacaagcaggcuauccagcgccucaaagccccugcgcagaugucuauucaacugaucaauaaggccgugaacgcucuuaucaaugaccagcugauuaugaagaaccaccucagagacaucauggggauucccuauugcaauuacagcaaauauuguuaccugaacaauacagccaccggaaagacgucccugccuaaaugcugucucaucagcaacggcucuuaccugaaugaaacacacuucuccgaugacauugagcaggaagcugauaacaugaucaccgagaugcuucaaaaggaguauauggaacggcaggggaaaaccccgcugggacucgucgaccuguucguuuuuagcacaucuuucuaccugaucagcauuuuucuucaucucgugaagauccccacccaccgccauauugugggcaaauccugcccuaagccccacagacugaaucauaugggcaucuguucuugcgggcuguauaagcagccuggaguccccgugcgguggaaacgcugaggacuagucccuguucccagagcccacuuuuuuuucuuuuuuugaaauaaaauagccugucuuucagaucucaaaggcucuuuucagagccaccaaaaaaaaaaaaaaaaaaaaaaaaaaaaaaaaaaaaaaaaaaaaaaaaaaaaaaaaaaaaaaaaagaauu

SEQ ID NO: 32093 - RNA, 1736 nt, Artificial Sequence
  mRNA product Design a-2 (hSL-A64-N5) comprising derived and/or modified sequence from LASV(G3010-SLE-2013;Clade IV)__AIT17344__GPCmut7 (opt5)
aggagaguccgcucagccagguugcagaagcggcuuagcguguguccuaaucuucucucugcguguagguaggccugugccgcaaacaagcuuaccaugggccagaucgugaccuucuuucaagaggucccccacguuauugaagaggugaugaacaucgugcugauugcccucagcauccuggcuguccuuaaggggcuguacaauuucgccacaugcggacucgugggccugguuacguuucuucugcucugugggagauccugcaccacaucucuguauaaaggaguguacgaacugcagacccucgagcugaacauggaaacacuuaauaugaccaugccucugagcuguacaaagaacaauucccaucacuauauuauggucggcaacgagaccgggcucgagcugacgcuuaccaauacaucuaucaucaaccauaaauucugcaaucugagcgacgcgcacaagaaaaaccucuacaaucaugcucugauguccauuaucucuaccuuucaccugagcauuccgaacuucaaucaguaugaagccauguccugugauuuuaacggaggcaagaucagcgugcaguacaaucucucucacuccuaugccggcgacgcugccagccauugcgggacaguugcuaacggagugcugcaaaccuucaugcggauggccuggggcgggucuuacauugcgcuugauuccggauacggcaagugggacuguaucaugacgagcuaucaguaccugauuauccagaacacaaccugggaggaucacugccaguuuucucgccccuccccuaucggguaucucggacugcuuagccaaagaacacgggacauuuacaucucccgcagacugcucggcaccuucaccuggacacugucugauagcgaaggcaaagacacgcccgggggauauugucugacccgguggaugcucauugaggccgagcugaagugcuuuggcaauacagcugucgccaaauguaacgaaaagcaugaugaggaguucugcgacaugcuucgccuguuugauuucaauaaacaggcuauccagagacucaagaccccugcccagauguccauucaacugaucaacaaggcggugaaugcccuuaucaacgaccagcugauuaugaaaaaucaccuccgggauaucauggggauucccuacugcaacuauagcaaguacuguuaccugaaucacacaaccacgggaaaaacaucucugccuaagugcugucucguguccaacggcagcuaucugaaugaaacccauuucucugacgacaucgaacagcaagcugauaacaugauuaccgagaugcuucagaaagaguacauggaacgccaggggaagacaccgcugggacucgucgaccuguuuguuuucagcaccuccuuuuaucugaucucuaucuuccuucaccucgugaaaauucccacacauagacacaucgugggcaagagcugcccuaagccccaucggcugaaucacaugggcauuuguuccugcgggcuguacaaacagccuggaguccccgugcgcuggaagagaugaggacuagucccuguucccagagcccacuuuuuuuucuuuuuuugaaauaaaauagccugucuuucagaucucaaaggcucuuuucagagccaccaaaaaaaaaaaaaaaaaaaaaaaaaaaaaaaaaaaaaaaaaaaaaaaaaaaaaaaaaaaaaaaaagaauu

SEQ ID NO: 32094 - RNA, 1736 nt, Artificial Sequence
  mRNA product Design a-2 (hSL-A64-N5) comprising derived and/or modified sequence from LASV(G502-SLE-2009;Clade IV)__AIT17126__GPCmut7 (opt5)
aggagaguccgcucagccagguugcagaagcggcuuagcguguguccuaaucuucucucugcguguagguaggccugugccgcaaacaagcuuaccaugggccagaucgugaccuucuuucaagaggucccccacguuauugaagaggugaugaacaucgugcugauugcccucagcauccuggcuguccuuaaggggcuguacaauuucgccacaugcggacucgugggccugcuuacguuucugcuccugugugggagauccugcaccacaggacuguauaaaggcguuuacgaacuccagacccuggagcuuaacauggaaacacugaauaugaccaugccucucucuuguacaaagaacaauagccaucacuauauuaugguggggaacgagaccggacuggagcuuacgcugaccaauacauccaucaucaaccauaaauucugcaaucucucugacgcgcacaagaaaaaccuguacgaucaugcucugaugagcauuaucuccaccuuucaccucucuauuccgaauuucaaccaguaugaagccaugagcugugacuuuaauggcggcaagaucuccguccaguacaaccugagccacucuuaugccggggaugcugccgaccauugcggaacaguggcuaauggcguucuucaaaccuucaugcggauggccuggggaggguccuacauugcgcuggauagcggccgcgggagaugggacuguaucaugacgucuuaccaguaucucauuauccagaacacaaccugggaggaucacugccaguuuucccggcccagcccuaucggauaccugggccuucugucucaacgcacaagagacauuuauaucucccggcgccuccugggcaccuucaccuggacacugagcgauuccgaagggaaggacacgcccggaggcuacugucucaccagauggaugcugauugaggccgagcuuaaaugcuuugggaacacagcuguggccaaguguaaugaaaaacaugaugaggaguucugcgacaugcugcggcucuuugauuucaacaagcaggcuauccagcgccugaaagccccugcgcagaugucuauucaacuuaucaauaaggccgucaacgcucugaucaaugaccagcucgugaugaagaaccaccugagagacauuaugggaauccccuauugcaauuacagccgguauuguuaccugaaccacaccacaaccggccgcacgucccucccuaaaugcugucuggugagcaaugggucuuaccuuaacgaaacacauuucuccgaugacauugaacagcaagccgauaauaugaucaccgagaugcugcagaaggaguauauggaaagacagggaaaaaccccgcucggccuggucgaccuguuuguuuucagcacaucuuuuuaccuuauuagcaucuuccuccaccuggugaagauccccacccaucggcacauugugggcaaauccugcccuaagccccaucgccugaaccacauggggaucuguucuugcggacucuauaaacagccuggcguccccgugaaguggaagagaugaggacuagucccuguucccagagcccacuuuuuuuucuuuuuuugaaauaaaauagccugucuuucagaucucaaaggcucuuuucagagccaccaaaaaaaaaaaaaaaaaaaaaaaaaaaaaaaaaaaaaaaaaaaaaaaaaaaaaaaaaaaaaaaaagaauu

SEQ ID NO: 32095 - RNA, 1736 nt, Artificial Sequence
  mRNA product Design a-2 (hSL-A64-N5) comprising derived and/or modified sequence from LASV(G733-SLE-2010;Clade IV)__AIT17154__GPCmut7 (opt5)
aggagaguccgcucagccagguugcagaagcggcuuagcguguguccuaaucuucucucugcguguagguaggccugugccgcaaacaagcuuaccaugggccagaucgugaccuucuuucaagaggucccccacguuauugaagaggugaugaacaucgugcugauugcccucagcauccuggcuguccuuaaggggcuguacaauuucgccacaugcggaauugugggccucguuuccuuucugcuucugugugggagaucuugcacgaccagccucuauaaaggaguguacgaacugcagacacuggagcucaacauggaaacccugaauaugacaaugccucuuuccuguaccaagaacaauucucaucacuauaucauggucggcaacgagacagggcuggagcucacccugacgaauaccagcaucauuaaccauaaauucugcaaucuuuccgacgcgcacaagaaaaaccuguacgaucaugcucucaugucuaucauuagcacauuucaccuguccaucccgaauuucaaccaguaugaagccaugagcugugacuuuaauggaggcaagauuucugugcaguacaaccugucccacagcuaugccggcgaugcugccaaucauugcgggaccaucgcuaacggaguucuccaaacauucaugcggauggccuggggcgggucuuacauugcgcuggacuccggacgcgauagaugggacuguaucaugaccagcuaccaguaucuuaucauucagaacacgacaugggaggaucacugccaguuuucucggcccuccccuaucggcuaccuggggcuccugagccaacgcaccagagacauuuauaucucccggcgccuucugggaacauucaccuggacccucucugauagcgaaggcaaggacacacccggcggguacugucugacgagauggaugcugauugaggccgagcucaaaugcuuuggaaauaccgcuguggccaaguguaacgaaaaacaugaugaggaguucugcgacaugcugcggcuuuuugauuucaauaagcaggcuauccagcgccugaaagccccugcgcagauguccauccaacucauuaacaaggccgucaaugcucugaucaacgaccagcuuauuaugaagaaucaccugagagacaucaugggcauucccuauugcaacuacagcaaauauuguuaccucaaucacacaaccacagggaagaccucucugccuaaaugcugucugguguccaacggaagcuaccucaaugaaacgcauuucucugaugacaucgaacagcaagccgauaacaugaucacagagaugcugcagaaggaguauauggaacggcagggcaaaaccccgcuugggcugguggaccucuuugucuucagcaccuccuuuuaccugauuucuaucuuccugcaccuuguuaagauucccacacaucgccacguggugggaaaaagcugcccuaagccccauagacucaaucacaugggcaucuguuccugcggccuguaugggcagccuggaguccccgugaaguggaaacggugaggacuagucccuguucccagagcccacuuuuuuuucuuuuuuugaaauaaaauagccugucuuucagaucucaaaggcucuuuucagagccaccaaaaaaaaaaaaaaaaaaaaaaaaaaaaaaaaaaaaaaaaaaaaaaaaaaaaaaaaaaaaaaaaagaauu

SEQ ID NO: 32096 - RNA, 1736 nt, Artificial Sequence
  mRNA product Design a-2 (hSL-A64-N5) comprising derived and/or modified sequence from MOPV/LASV reassortant(IGS-1;Clade IV)__AFY05576__GPCmut7 (opt5)
aggagaguccgcucagccagguugcagaagcggcuuagcguguguccuaaucuucucucugcguguagguaggccugugccgcaaacaagcuuaccaugggccagaucgugaccuucuuucaagaggucccccacguuauugaagaggugaugaacaucgugcugauugcccucagcguccuggcugugcuuaaggggcuguacaauuucgccacaugcggacucguuggccuggugacguuucuucugcucugugggagauccugcaccacaucucuguauaaaggagucuacgaacugcagacccucgagcugaacauggaaacacuuaauaugaccaugccucugagcuguacaaagaacaauucccaucacuauaucauggugggcaacgagaccgggcucgagcugacgcuuaccaauacaucuauuaucaaccauaaauucugcaaucugagcgacgcgcacaagaaaaaccucuacgaucaugcucugauguccaucauuucuaccuuucaccugagcaucccgaauuucaaccaguaugaagccauguccugugacuuuaauggaggcaagauuagcguucaguacaaccucucucacuccuaugccggcgaugcugccaaucauugcgggacaguggcuaacggaguccugcaaaccuucaugcggauggccuggggcgggagcuacaucgcgcuugacucuggacgcggcaacugggauuguauuaugacguccuaccaguaucugaucauucagaauacaaccugggaggaccacugccaguuuagcagacccucuccuaucggguaccucggacugcuuucccaacggacacgcgauaucuauauuagcagacggcugcucggcaccuucaccuggacacuguccgacucugaaggcgaggauacgcccgggggauacugucugacccgcuggaugcucaucgaggccgaacugaagugcuuuggcaacacagcuguggccaaauguaaugagaagcaugacgaagaguucugcgauaugcuuagacuguuugacuucaacaaacaggcuauucagcggcucaaggccccugcgcagaugagcauccaacugauuaauaaagccgugaacgcucuuaucaaugaucagcugaucaugaagaaccaccuccgcgacauuauggggauccccuauugcaauuacuccaaguauuguuaccugaaccacaccacaaccggaagaacgagccugccuaaaugcugucucgucucuaauggcuccuaccugaacgaaacacauuucagcgacgauauugagcagcaagccgacaauaugaucaccgagaugcuucagaaggaauauauggagcggcaggggaaaaccccgcugggacucguugaucuguuuguguucucuaccagcuuuuaccugauuuccaucuuccuucaccucgugaagauccccacacaucgccacauugucggcaaaucuugcccuaagccccauagacugaaccacaugggcaucuguagcugcgggcuguauaaacagccuggagugcccguuaaguggaagcggugaggacuagucccuguucccagagcccacuuuuuuuucuuuuuuugaaauaaaauagccugucuuucagaucucaaaggcucuuuucagagccaccaaaaaaaaaaaaaaaaaaaaaaaaaaaaaaaaaaaaaaaaaaaaaaaaaaaaaaaaaaaaaaaaagaauu

SEQ ID NO: 32097 - RNA, 1736 nt, Artificial Sequence
  mRNA product Design a-2 (hSL-A64-N5) comprising derived and/or modified sequence from LASV(LM765-SLE-2012;Clade IV)__AIT17814__GPCmut7 (opt5)
aggagaguccgcucagccagguugcagaagcggcuuagcguguguccuaaucuucucucugcguguagguaggccugugccgcaaacaagcuuaccaugggccagaucgugaccuucuuucaagaggucccccacguuauugaagaggugaugaacaucgugcugauugcccucagcauccuggcuguccuuaaggggcuguacaauuucgccacaugcggacucgugggccugguuacguuucuucugcucugugggagauccugcaccacaucucuguauaaaggaguguacgaacugcagacccucgagcugaacauggaaacacuuaauaugaccaugccucugagcuguacaaagaacaauucccaucacuauauuauggucggcaacgagaccgggcucgagcugacgcuuaccaauacaucuaucaucgaccauaaauucugcaaccugagcgaugcgcaccggaagaaucucuacgaccaugcucugauguccauuaucucuaccuuucaccugagcauuccgaacuucaaucaguaugaagccauguccugugauuuuaacggaggcaaaaucagcgugcaguacaaucucucucacuccuaugccaaggacgcugccgaucauugcggcacaguugcuaacggggugcugcaaaccuucaugcgcauggccuggggaggcagcuacauugcgcuugacucugggagaggacggugggauuguaucaugacguccuaccaguaucugauuauccagaauacaaccugggaggaccacugccaguuuagccgccccucuccuaucggcuaccucgggcugcuuucccaaagaacacgggauauuuauaucagccgcagacugcucggaaccuucaccuggacacuguccgacucugaaggcaaggauacgcccggcggguacugucugacccgguggaugcucauugaggccgagcugaaaugcuuuggaaacacagcugucgccaaguguaacgaaaaacaugacgaggaguucugcgauaugcuucgccuguuugacuucaauaagcaggcuauccagagacucaaagccccugcgcagaugagcauucaacugaucaacaaggccgugaaugcucuuaucaacgaccagcugauuaugaagaaucaccuccgggauaucaugggcauucccuauugcaacuacuccaaauauuguuaccugaaucacaccacaaccgggaagacgagccugccuaaaugcugucucgugucuaacggauccuaccugaaugaaacacauuucagcgacgauaucgaacagcaagccgacaacaugauuaccgagaugcuucagaaggaguauauggaacgccagggcaaaaccccgcuggggcucgucgaucuguuuguuuucucuaccagcuuuuaccugaucuccaucuuccuucaccucgugaagauucccacacauagacacaucgugggaaaaccuugccccaagccucaucggcugaaucacaugggcauuuguucuugcggccuguauaagcagcccggggucccggugaaauggaagcgcugaggacuagucccuguucccagagcccacuuuuuuuucuuuuuuugaaauaaaauagccugucuuucagaucucaaaggcucuuuucagagccaccaaaaaaaaaaaaaaaaaaaaaaaaaaaaaaaaaaaaaaaaaaaaaaaaaaaaaaaaaaaaaaaaagaauu

SEQ ID NO: 32098 - RNA, 1736 nt, Artificial Sequence
  mRNA product Design a-2 (hSL-A64-N5) comprising derived and/or modified sequence from LASV(LM776-SLE-2012;Clade IV)__AIT17824__GPCmut7 (opt5)
aggagaguccgcucagccagguugcagaagcggcuuagcguguguccuaaucuucucucugcguguagguaggccugugccgcaaacaagcuuaccaugggccagaucgugaccuucuuucaagaggucccccacguuauugaagaggugaugaacaucgugcugauugcccucagcauccuggcuguccuuaaggggcuguacaauuucgccacaugcggacucgugggccugguuacguuucuucugcucugugggagauccugcaccacaucuguguauaaaggagucuacgaacugcagacccuggagcucaacauggaaacacugaauaugaccaugccucuuagcuguacaaagaacaauucccaucacuauauuauggugggcaacgagaccgggcuggagcucacgcugaccaauacaucuaucaucaaccauaaauucugcaaucuuagcgacgcgcacaagaaaaaccuguacgaucaugcucucauguccauuaucucuaccuuucaccugagcauuccgaauuucaaccaguaugaagccauguccugugacuuuaauggaggcaagaucagcguucaguacaaccugucucacuccuaugccggcgaugcugccaaucauugcgggacaguggcuaacggaguccuccaaaccuucaugcggauggccuggggcgggagcuacauugcgcuggacucuggacacggcaagugggauuguaucaugacguccuaccaguaucuuauuauccagaacacaaccugggaggaccauugccaguuuagccgccccucuccuaucggguaccugggacuccugucccaaagaacacgggauauuuauaucagccgcagacuucugggcaccuucaccuggacacucuccgacucugaaggcaaagauacgcccgggggauacugucugacccgguggaugcugauugaggccgagcucaagugcuuuggcaauacagcuguggccaaauguaacgaaaagcacgacgaggaguucugcgauaugcugcgccuuuuugacuucaauaaacaggcuauccagagacugaaggccccugcgcagaugagcauucaacucaucaacaaggccgugaaugcucugaucaacgaucagcuuauuaugaaaaaucaucugcgggacaucauggggauucccuauugcaacuacuccaaguauuguuaccucaaucacaccacaaccggaaaaacgagccugccuaagugcugucuggucucuaacggcuccuaccucaaugaaacacacuucagcgacgauaucgaacagcaagccgacaacaugauuaccgagaugcugcagaaagaguauauggaacgccaggggaagaccccgcuuggacugguugaucucuuuguguucucuaccagcuuuuaccugaucuccaucuuccugcaucuugugaaaauucccacacacagacauaucgucggcaagucuugcccuaagccccaccggcucaaucacaugggcauuuguagcugcgggcuguauaaacagccuggagugcccguucgcuggaagagaugaggacuagucccuguucccagagcccacuuuuuuuucuuuuuuugaaauaaaauagccugucuuucagaucucaaaggcucuuuucagagccaccaaaaaaaaaaaaaaaaaaaaaaaaaaaaaaaaaaaaaaaaaaaaaaaaaaaaaaaaaaaaaaaaagaauu

SEQ ID NO: 32099 - RNA, 1736 nt, Artificial Sequence
  mRNA product Design a-2 (hSL-A64-N5) comprising derived and/or modified sequence from LASV(Mad39;Clade IV)__ANH09722__GPCmut7 (opt5)
aggagaguccgcucagccagguugcagaagcggcuuagcguguguccuaaucuucucucugcguguagguaggccugugccgcaaacaagcuuaccaugggccagaucgugaccuucuuucaagaggucccccacguuauugaagaggugaugaacaucgugcugauugcccucagcauccuggcuguccuuaaggggcuguacaauguggccacaugcggacucauuggccugguuacguuccuucugcucugugggagauccugcaccacaacccuguauaaaggaguguacgaacugcaggcgcucgagcugaacauggaaacacuuaauaugaccaugccucugucuuguacaaagaacaauagccaucacuauauccgggucggcaacgagaccgggcucgagcugacgcuuaccaauacaucccugaucaaccauaaauuuugcaaucucucugacgcucacaagaaaaaccuguacgaucaugcccugaugagcauuaucuccaccuuccaccucucuauuccgaauuuuaaccaguaugaagccaugagcugugacuucaaugauggaaagaucuccgugcaguacaaccugagccacacauaugcuggcgacaccgccaaucauugcggcacgguugcuaacggggugcuucaaacauuuaugcgcauggccuggggaggcucuuacauugcgcuggauuccgggagaggaggcugggacuguaucaugaccagcuaccaguaucucauuauccagaacacaaccugggaggaucacugccaguucucucggcccuccccuaucggguaccugggacuucugagccaacgcaccagagacauuuauaucucucggcgccuccugggcacauuuacguggacccuguccgauagcgaaggcaaggacacacccgggggauacugucucaccagauggaugcugauugaggccgagcuuaaaugcuucggcaauacagcugucgccaaguguaacgaaaaacaugaugaggaauuuugcgacaugcugcgccucuucgauuuuaauaagcaggcuauccagcggcugaaagccccugcgcagauguccauucaacuuaucaacaaggccgugaaugcucugaucaacgaccagcucauuaugaagaaucaccugagagacaucauggggauucccuauugcaacuacucuaaauauuguuaccugaaucacaccgugacgggaaagacaagccucccuaaaugcugucuggucuccaacggcagcuaccuuaaugagacccauuucucugaugacaucgaacagcaagccgauaacaugauuaccgagaugcugcagaaggaguauauggaacggcaggggaaaacaccgcucggacugguugaccuguucguguuuuccaccagcuucuaccuuaucucuaucuuucuccaccuggugaagauucccacacaucgccacgucgugggcaaaccuugccccaagccucauagacugaaucacaugggcaucuguagcugcggguucuauaagcagcccggaguuccggugcgguggaaacgcugaggacuagucccuguucccagagcccacuuuuuuuucuuuuuuugaaauaaaauagccugucuuucagaucucaaaggcucuuuucagagccaccaaaaaaaaaaaaaaaaaaaaaaaaaaaaaaaaaaaaaaaaaaaaaaaaaaaaaaaaaaaaaaaaagaauu

SEQ ID NO: 32100 - RNA, 1736 nt, Artificial Sequence
  mRNA product Design a-2 (hSL-A64-N5) comprising derived and/or modified sequence from LASV(Z0947-SLE-2011;Clade IV)__AIT17840__GPCmut7 (opt5)
aggagaguccgcucagccagguugcagaagcggcuuagcguguguccuaaucuucucucugcguguagguaggccugugccgcaaacaagcuuaccaugggccagaucgugaccuucuuucaagaggucccccacguuauugaagaggugaugaacaucgugcugauugcccucagcauccuggcuguccuuaaggggcuguacaauuucgccacaugcggacucgugggccugguuacguuucuucugcucugugggagauccugcaccauuucucuguauaaaggaguguacgaacugcagacacucgagcugaacauggaaacccuuaauaugacaaugccucugagcuguaccaagaacaauucccaucacuauaucauggucggcaacgagacagggcucgagcugacccuuacgaauaccucuaucauuaaccauaaauucugcaaucugagcgacgcgcacaagaaaaaccucuacgaucaugcucugauguccaucauuucuacauuucaccugagcaucccgaauuucaaccaguaugaagccauguccugugacuuuaauggaggcaagauuagcgugcaguacaaccucucucacuccuaugccggcgaugcugccaaucauugcgggaccguugcuaacggagugcugcaaacauucaugcggauggccuggggcgggagcuacaucgcgcuugacucuggacgcgauagaugggacuguauuaugaccuccuaccaguaucugaucauccagaacacgacaugggaggaucacugccaguuuagccggcccucuccuauuggcuaccucgggcugcuuucccaacgcaccagagacaucuauauuagccggcgccugcucggaacauucaccuggacccuguccgauucugaaggcaaggacacacccggcggguacugucugacgagauggaugcucaucgaggccgagcugaaaugcuuuggaaauaccgcugucgccaaguguaacgaaaaacaugaugaggaguucugcgacaugcuucggcuguuugauuucaauaagcaggcuauucagcgccucaaagccccugcgcagaugagcauccaacugaucaacaaggccgugaaugcucuuauuaacgaccagcugaucaugaagaaucaccucagagacauuaugggcauccccuauugcaacuacuccaaauauuguuaccugaaucacacaaccacagggaagaccagccugccuaaaugcugucucgugucuaacggauccuaccugaaugaaacgcauuucagcgaugacauugaacagcaagccgauaacaugaucacagagaugcuucagaaggaguauauggaacggcagggcaaaaccccgcuggggcucgucgaccuguuuguuuucucuaccagcuuuuaccugaucuccauuuuccuucaccucgugaagauccccacacaucgccacauugugggaaaaccuugccccaagccucauagacugaaucacaugggcaucuguucuugcggccuguauaagcagcccggggucccggugaaauggaagcggugaggacuagucccuguucccagagcccacuuuuuuuucuuuuuuugaaauaaaauagccugucuuucagaucucaaaggcucuuuucagagccaccaaaaaaaaaaaaaaaaaaaaaaaaaaaaaaaaaaaaaaaaaaaaaaaaaaaaaaaaaaaaaaaaagaauu

SEQ ID NO: 32101 - RNA, 1767 nt, Artificial Sequence
  mRNA product Design a-2 (hSL-A100) comprising derived and/or modified sequence from LASV(Josiah;Clade IV)__NP_694870__GPCmut7 (opt1)
aggagaguccgcucagccagguugcagaagcggcuuagcguguguccuaaucuucucucugcguguagguaggccugugccgcaaacaagcuuaccaugggccagaucgugaccuucuuccaggaggucccccacgugaucgaggaggugaugaacaucguccugaucgcccucagcgugcuggccgugcugaaggggcucuacaacuucgcgaccugcggccuggucgggcuggugacguuccuccugcugugcggccgcuccugcaccaccagccucuacaaggggguguacgagcugcagacccuggagcucaacauggagacgcugaacaugaccaugccgcuguccugcaccaagaacaacagccaccacuacaucauggucggcaacgagaccggccucgagcugacgcugaccaacaccuccaucaucaaccacaaguucugcaaccucagcgacgcccacaagaagaaccuguacgaccacgcccugauguccaucaucagcaccuuccaccucuccauccccaacuucaaccaguacgaggccaugagcugcgacuucaacgggggcaagaucuccgugcaguacaaccugagccacuccuacgccggggacgcggccaaccacugcggcacgguggccaacgggguccugcagaccuucaugcggauggccuggggcggcagcuacaucgcgcucgacuccgggcgcggcaacugggacugcaucaugaccagcuaccaguaccugaucauccagaacaccacgugggaggaccacugccaguucucccggcccagccccaucggguaccugggccuccugucccagcgcacccgggacaucuacaucagccgccggcugcucggcaccuucaccuggacgcugagcgacuccgaggggaaggacaccccgggcggguacugccugacccgcuggaugcucaucgaggccgagcugaagugcuucggcaacaccgccguggccaagugcaacgagaagcacgacgaggaguucugcgacaugcugcggcuguucgacuucaacaagcaggccauccagcgccugaaggcgcccgcccagaugagcauccagcugaucaacaaggccgugaacgcccucaucaacgaccagcugaucaugaagaaccaccuccgggacaucauggggauccccuacugcaacuacuccaaguacugcuaccucaaccacacgaccaccggccgcaccagccugcccaagugcugccuggucuccaacggcagcuaccucaacgagacgcacuucuccgacgacaucgagcagcaggccgacaacaugaucaccgagaugcugcagaaggaguacauggagcggcaggggaagacgccccugggccucguggaccuguucguguucagcaccuccuucuaccugaucagcaucuuccugcaccucgucaagaucccgacccaccgccacaucguggggaaguccugccccaagccccaccggcugaaccacaugggcaucugcagcugcgggcuguacaagcagcccggcgugccggucaaguggaagcgcugaggacuagucccuguucccagagcccacuuuuuuuucuuuuuuugaaauaaaauagccugucuuucagaucucaaaggcucuuuucagagccaccaaaaaaaaaaaaaaaaaaaaaaaaaaaaaaaaaaaaaaaaaaaaaaaaaaaaaaaaaaaaaaaaaaaaaaaaaaaaaaaaaaaaaaaaaaaaaaaaaaaaa

SEQ ID NO: 32102 - RNA, 1764 nt, Artificial Sequence
  mRNA product Design a-2 (hSL-A100) comprising derived and/or modified sequence from LASV(LP;Clade I)__AAF86701__GPCmut7 (opt1)
aggagaguccgcucagccagguugcagaagcggcuuagcguguguccuaaucuucucucugcguguagguaggccugugccgcaaacaagcuuaccaugggccagaucaucaccuucuuccaggaggugccccacgucaucgaggaggugaugaacaucgugcugaucgcccucagccugcuggccauccucaaggggcuguacaacaucgcgaccugcggcaucaucgggcuggucgccuuccucuuccugugcggcaaguccugcagccugacgcucaagggcggguacgagcugcagacccuggagcucaacauggagacccugaacaugaccaugccgcuguccugcacgaagaacagcucccaccacuacauccgcgugggcaacgagaccgggcucgagcugacccugaccaacacgagcaucaucaaccacaaguucugcaaccucuccgacgcccacaagaagaaccuguacgaccacgcccugaugagcaucaucuccaccuuccaccucagcauccccaacuucaaccaguacgaggccauguccugcgacuucaacggcgggaagaucagcgugcaguacaaccugucccacagcuacgcgggcgacgccgccgagcacugcgggaccgucgccaacggcgugcugcagaccuucaugcggauggcguggggcgggcgcuacaucgcccucgacuccggcaaggggaacugggacugcaucaugacgagcuaccaguaccugaucauccagaacaccaccugggaggaccacugccaguucucccggcccagccccaucggcuaccugggccuccugucccagcgcacccgggacaucuacaucagccgccggcugcucgggacguucaccuggacccugagcgacuccgagggcaacgagacccccgggggcuacugccugacgcgcuggaugcucaucgaggccgagcugaagugcuucgggaacaccgccguggccaagugcaacgagaagcacgacgaggaguucugcgacaugcugcggcuguucgacuucaacaagcaggcgauccgccggcugaaggcccccgcccagaugagcauccagcugaucaacaaggccgucaacgcccucaucaacgaccagcugaucaugaagaaccaccuccgcgacaucaugggcauccccuacugcaacuacuccaaguacugcuaccucaaccacaccagcuccggccggaccagccugcccaagugcugccugaucuccaacgggagcuaccucaacgagacgcaguucuccgacgacaucgagcagcaggcggacaacaugaucaccgagaugcugcagaaggaguacaucgagcgccagggcaagaccccgcuggggcucguggacaucuucaucuucagcaccuccuucuaccugaucagcaucuuccugcaccugaucaagaucccgacgcaccggcacaucgugggcaagcccugccccaagccccaccgccucaaccacaugggggucugcuccugcggccuguacaagcacccgggcgugcccaccaaguggaagcggugaggacuagucccuguucccagagcccacuuuuuuuucuuuuuuugaaauaaaauagccugucuuucagaucucaaaggcucuuuucagagccaccaaaaaaaaaaaaaaaaaaaaaaaaaaaaaaaaaaaaaaaaaaaaaaaaaaaaaaaaaaaaaaaaaaaaaaaaaaaaaaaaaaaaaaaaaaaaaaaaaaaaa

SEQ ID NO: 32103 - RNA, 1764 nt, Artificial Sequence
  mRNA product Design a-2 (hSL-A100) comprising derived and/or modified sequence from LASV(803213;Clade II)__AAF86703__GPCmut7 (opt1)
aggagaguccgcucagccagguugcagaagcggcuuagcguguguccuaaucuucucucugcguguagguaggccugugccgcaaacaagcuuaccaugggccagaucaucaccuucuuccaggaggugccccacgucaucgaggaggugaugaacaucgugcugaucgcccucagccugcuggccauccucaaggggaucuacaacgucgcgaccugcggccuguucgggcugaucuccuuccuccugcugugcggccgcagcugcuccgugacguacaaggggguguacgagcuccagacccuggagcugaacauggccaaccucaacaugaccaugccgcugagcugcaccaagaacaacucccaccacuacaucauggucggcaacgagacgggccuggagcucacccugaccaacaccagcaucaucaaccacaaguucugcaaccuguccgacgcccacaagaagaaccucuacgaccacgcccugaugagcaucaucuccacguuccaccugagcauccccaacuucaaccaguacgaggccauguccugcgacuucaacgggggcaagaucagcgugcaguacaaccucucccacagcuucgcgguggacgccgccaaccacugcgggaccaucgccaacggcguccugcagaccuucaugcggauggcguggggcggguccuacaucgcccuggacagcggcaaggggaacugggacugcaucaugaccuccuaccaguaccucaucauccagaacacgaccugggaggaccacugccaguucagccgccccucccccaucggcuaccuggggcugcucagccagcggacccgcgacaucuacaucagccggcgccugcugggcaccuucacguggacccucuccgacagcgagggcaacgaggcccccgggggcuacugccugacccgguggaugcugaucgaggccgagcucaagugcuucgggaacaccgccguggcgaagugcaacgagaagcacgacgaggaguucugcgacaugcugcgccuguucgacuucaacaagcaggccaucaagcggcucaagacgcccgcccagauguccauccagcugaucaacaaggccgugaacgcccugaucaacgaccagcucaucaugaagaaccaccuccgcgacaucaugggcauccccuacugcaacuacagccgguacugcuaccugaaccacaccgucaccgggaagaccucccugccccgcugcugccuggugagcaacggcuccuaccugaacgagacgcacuucagcgacgacaucgagcagcaggcggacaacaugaucaccgagaugcuccagaaggaguacauggaccggcagggcaagaccccgcuggggcugguggaccucuucgucuucuccaccagcuucuaccugaucuccaucuuccugcaccuggugaagaucccgacgcaccgccacaucgugggcaagcccugccccaagccccaccggcucaaccacauggggaucugcagcugcggccuguacaagcacccggggguccccgugaaguggaagcgcugaggacuagucccuguucccagagcccacuuuuuuuucuuuuuuugaaauaaaauagccugucuuucagaucucaaaggcucuuuucagagccaccaaaaaaaaaaaaaaaaaaaaaaaaaaaaaaaaaaaaaaaaaaaaaaaaaaaaaaaaaaaaaaaaaaaaaaaaaaaaaaaaaaaaaaaaaaaaaaaaaaaaa

SEQ ID NO: 32104 - RNA, 1764 nt, Artificial Sequence
  mRNA product Design a-2 (hSL-A100) comprising derived and/or modified sequence from LASV(GA391;Clade III)__CAA36645__GPCmut7 (opt1)
aggagaguccgcucagccagguugcagaagcggcuuagcguguguccuaaucuucucucugcguguagguaggccugugccgcaaacaagcuuaccaugggccagaucgugaccuucuuccaggaggucccccacgugaucgaggaggugaugaacaucguccugaucgcccucagcauccuggccauccugaaggggcucuacaacguggcgaccugcggccugaucgggcuggugacguuccuccugcuguccggccgcagcugcucccucaucuacaaggggaccuacgagcugcagacccuggagcucaacauggagacccugaacaugacgaugccgcugagcugcaccaagaacaacucccaccacuacauccgggucggcaacgagaccggccucgagcugacccugacgaacaccagcauccucaaccacaaguucugcaaccuguccgacgcccacaagcgcaaccuguacgaccacagccucauguccaucaucagcaccuuccaccuguccauccccaacuucaaccaguacgaggccaugagcugcgacuucaacgggggcaagaucaccgugcaguacaaccugucccacagcuucgccguggacgccgcggggcacugcggcacgcucgccaacgggguccugcagaccuucaugcggauggccuggggcggcuccuacaucgcccuggacagcgggcgcggcaacugggacugcaucaugaccuccuaccaguaccucaucauccagaacaccacgugggacgaccacugccaguucagccggcccucccccaucggguaccugggccugcucagccagcgcacccgggacaucuacaucagccgccggcugcugggcaccuucaccuggacgcucuccgacagcgaggggaacgagaccccgggcggguacugccugacccgcuggaugcugaucgaggcggagcucaagugcuucggcaacaccgccguggccaagugcaacgagaagcacgacgaggaguucugcgacaugcugcggcuguucgacuucaacaagcaggccauccgccggcucaagacgcccgcccagauguccauccagcugaucaacaaggcggugaacgcccugaucaacgaccagcucaucaugaagaaccaccuccgcgacaucauggggauccccuacugcaacuacagccgguacugcuaccugaaccacaccuccaccggcaagaccagccugccccgcugcugccugaucuccaacggcagcuaccugaacgagacgaaguucuccgacgacaucgagcagcaggccgacaacaugaucaccgagaugcuccagaaggaguacaucgaccggcaggggaagacgccccugggccuggucgaccuguucguguucagcaccuccuucuaccucaucagcaucuuccugcaccuggugaagaucccgacccaccgccacaucgucgggaagcccugccccaagccccaccggcucaaccacaugggcaucugcuccugcgggcuguacaagcagccgggcgugcccgugcgcuggaagcggugaggacuagucccuguucccagagcccacuuuuuuuucuuuuuuugaaauaaaauagccugucuuucagaucucaaaggcucuuuucagagccaccaaaaaaaaaaaaaaaaaaaaaaaaaaaaaaaaaaaaaaaaaaaaaaaaaaaaaaaaaaaaaaaaaaaaaaaaaaaaaaaaaaaaaaaaaaaaaaaaaaaaa

SEQ ID NO: 32105 - RNA, 1767 nt, Artificial Sequence
  mRNA product Design a-2 (hSL-A100) comprising derived and/or modified sequence from LASV(AV;Clade V)__CCA30314__GPCmut7 (opt1)
aggagaguccgcucagccagguugcagaagcggcuuagcguguguccuaaucuucucucugcguguagguaggccugugccgcaaacaagcuuaccaugggccagaucgugaccuucuuccaggaggucccccacgugaucgaggaggugaugaacaucguccugaucgcccucagcauccuggccgugcugaaggggcucuacaacaucgcgaccugcggccugaucgggcugaucacguuccuccugcugugcggccgcuccugcagcuccaaccucuacaaggggguguacgagcugcagagccuggaccucaacauggagacccugaacaugaccaugccgcuguccugcaccaagaacaacagccaccacuacauccgggucggcaacgacacgggccucgagcugacccugaccaacaccuccauccucaaccacaaguucugcaaccugagcgacgcccacaagaaggaccuguacgaccacgcccucauguccaucaucagcacguuccaccuguccauccccaacuucaaccaguacgaggccaugagcugcgacuucaacgggggcaagaucuccgugcaguacaaccugagccacuccuacgccaucgacgcggccaaccacugcgggaccguggccaacggcauccuccagaccuucaugcgcauggccuggggcgggagcuacaucgcgcuggacuccggccgggggaacugggacugcaucaugaccagcuaccaguaccugaucauccagaacacgaccugggagaaccacugccaguucucccgccccagccccaucggcuaccucgggcugcugagccagcggacccgcgacaucuacaucucccggcgccuccugggcaccuucacguggacccugagcgacuccgagggcaacgccacccccgggggcuacugccucacccgguggaugcugaucgaggccgagcugaagugcuucgggaacacggccgucgccaagugcaacgagaagcacgacgaggaguucugcgacaugcuccgccuguucgacuucaacaagcaggcgaucagccggcugaagucccccgcccagaugagcauccagcucaucaacaaggccgugaacgcccugaucaacgaccagcugaucaugaagaaccaccuccgcgacaucaugggcauccccuacugcaacuacuccaaguacugcuaccugaaccacaccaucaccgggaagaccagccugcccaagugcugccucguguccaacggcagcuaccugaacgagacgcacuucuccgacgacaucgagcagcaggccgacaacaugaucaccgagaugcugcagaaggaguacauggagcggcagggcaagaccccgcucgggcuggucgaccuguucguguucagcaccuccuucuaccugaucagcaucuuccuccgccuggugaagaucccgacgcaccggcacaucgucggcaagcccugccccaagccccaccgccugaaccacauggggaucugcuccugcggccucuacaagcagccgggggugcccgugcgguggaagcgcugaggacuagucccuguucccagagcccacuuuuuuuucuuuuuuugaaauaaaauagccugucuuucagaucucaaaggcucuuuucagagccaccaaaaaaaaaaaaaaaaaaaaaaaaaaaaaaaaaaaaaaaaaaaaaaaaaaaaaaaaaaaaaaaaaaaaaaaaaaaaaaaaaaaaaaaaaaaaaaaaaaaaa

SEQ ID NO: 32106 - RNA, 1764 nt, Artificial Sequence
  mRNA product Design a-2 (hSL-A100) comprising derived and/or modified sequence from LASV(Togo/2016/7082;Clade VI)__AMR44577__GPCmut7 (opt1)
aggagaguccgcucagccagguugcagaagcggcuuagcguguguccuaaucuucucucugcguguagguaggccugugccgcaaacaagcuuaccaugggccagaucaucaccuucuuccaggaggugccccacgucaucgaggaggugaugaacaucgugcugaucgcccucagccugcuggccauccucaagggggucuacaacguggcgaccugcggcaucaucgggcuggugacguuccuguuccucugcggccgcuccugcagccugaucuacaagggguccuacgagcugcagacccucgagcugaacauggagacccugaacaugaccaugccgcucagcugcacgaagaacuccagccaccacuacauccgggucggcaacgagaccggccuggagcugacccucaccaacacguccaucaucaaccacaaguucugcaaccugagcgacgcccacaagcgcaaccuguacgaccacgcccucauguccauccugagcaccuuccaccuguccauccccaacuucaaccaguacgaggccaugagcugcgacuucaacgggggcaagaucuccgugcaguacaaccucagccacgccuacgcgguggacgccgccgagcacugcgggaccgucgccaacggcgugcugcagaccuucaugcggauggcguggggcggguccuacaucgcccuggacagcggccgcgggaacugggacugcaucaugacguccuaccaguaccucaucauccagaacaccaccugggaggaccacugccaguucagccggcccucccccaucggcuaccuggggcugcucagccagcgcacccgggacaucuacaucagccgccggcugcugggcacguucaccuggacccucuccgacagcgagggcaacgagacccccgggggcuacugccugacgcgcuggaugcugaucgaggccgagcucaagugcuucgggaacaccgccguggccaagugcaacgagaagcacgacgaggaguucugcgacaugcugcggcuguucgacuucaacaagcaggcgauccagcgccucaagucccccgcccagaugagcauccagcugaucaacaaggccgucaacgcccugaucaacgaccagcucaucaugaagaaccaccuccgggacaugaugggcauccccuacugcaacuacuccaaguacugcuaccugaaccacaccagcuccgggcgcaccagccugcccaagugcugccugguguccaacggcagcuaccugaacgagacgcacuucuccgacgacaucgagcagcaggccgacaacaugaucaccgagaugcuccagaaggaguacaucgaccggcagggcaagaccccgcuggggcugguggaccucuucgucuucagcaccuccuucuaccugaucagcaucuuccugcaccugaucaagaucccgacgcaccgccacaucgugggcaagcccugccccaagccccaccggcucaaccacauggggaucugcuccugcggccuguacaagcagccgggggugcccacccgcuggaagcggugaggacuagucccuguucccagagcccacuuuuuuuucuuuuuuugaaauaaaauagccugucuuucagaucucaaaggcucuuuucagagccaccaaaaaaaaaaaaaaaaaaaaaaaaaaaaaaaaaaaaaaaaaaaaaaaaaaaaaaaaaaaaaaaaaaaaaaaaaaaaaaaaaaaaaaaaaaaaaaaaaaaaa

SEQ ID NO: 32107 - RNA, 1764 nt, Artificial Sequence
  mRNA product Design a-2 (hSL-A100) comprising derived and/or modified sequence from LASV(KAK-428;Clade n.d. (VII))__ANH09740__GPCmut7 (opt1)
aggagaguccgcucagccagguugcagaagcggcuuagcguguguccuaaucuucucucugcguguagguaggccugugccgcaaacaagcuuaccaugggccagaucgugaccuucuuccaggaggucccccacgugaucgaggaggugaugaacaucguccugaucgcccucagccugcuggccauccucaaggggcuguacaacuucgcgaccugcggcgugaucgggcugaucacguuccuccugcugugcggccgcuccugcagcgccaccuacaaggggcaguacgagcuccagacccuggagcugaacauggagucccucaacaugaccaugccgcugagcugcacgaagaacaacucccaccacuacauccgggccggcaacaacaccggccuggagcucacccugaccaacacgagcaucaucucccacaaguucugcaaccugagcgacgcccacaagaagaaccucuacgaccacacccugauguccaucaucaccaccuuccaccugagcauccccaacuucaaccaguacgaggccauguccugcgacuucaacgggggcaagaucagcauccaguacaaccucucccacagcuacgcgggggacgccgcccagcacugcggcacgguggccaacgggguccugcagaccuucaugcgcauggcguggggcggcuccuaccuggcccucgacagcgggcggcgcggcugggacugcaucaucuccagcuaccaguaccugaucauccagaacaccaccugggacgaccacugccaguucucccggcccagccccaucggguaccugggcuucgugagccagaagacgcgcgacaucuacaucucccggcgccuccugggcaccuucaccuggacccugagcgacuccgaggggcacgacaugccgggcggguacugccucacgcgguggaugcugaucgaggccgaccugaagugcuucggcaacaccgccguggccaagugcaacgagaagcacgacgaggaguucugcgacauguggcgccucuucgacuucaacaagcaggcgauccagcggcugaaggcccccgcccagaugaacauccagcugaucaacaaggccgucaacgcccucaucaacgaccagcugaugaugaagaaccaccuccgcgacaucauggggauccccuacugcaacuacagcaaguucugcuaccugaacaacaccaccacgggccggaccucccugccccgcugcugccugaucagcaacggcuccuaccucaacgagacccacuucagcgacgacaucgagcagcaggcggacaacaugaucaccgagaugcugcagaaggaguacauggaccggcaggggaagacgccccugggccucguggaccuguucguguucuccaccagcuucuaccugaucaccaucuuccuccaccuggucaagaucccgacccaccgccacaucguggggaagcccugccccaagccccaccggcugaaccacaugggcaucugcuccugcgggcuguacaagcagccgggcgugcccguccgcuggaagcggugaggacuagucccuguucccagagcccacuuuuuuuucuuuuuuugaaauaaaauagccugucuuucagaucucaaaggcucuuuucagagccaccaaaaaaaaaaaaaaaaaaaaaaaaaaaaaaaaaaaaaaaaaaaaaaaaaaaaaaaaaaaaaaaaaaaaaaaaaaaaaaaaaaaaaaaaaaaaaaaaaaaaa

SEQ ID NO: 32108 - RNA, 1764 nt, Artificial Sequence; identical to SEQ ID NO: 32102
  mRNA product Design a-2 (hSL-A100) comprising derived and/or modified sequence from LASV(Pinneo-NIG-1969;Clade I)__AIT17836__GPCmut7 (opt1)

SEQ ID NO: 32109 - RNA, 1764 nt, Artificial Sequence
  mRNA product Design a-2 (hSL-A100) comprising derived and/or modified sequence from LASV(ISTH0009-NIG-2011;Clade II)__AIT17404__GPCmut7 (opt1)
aggagaguccgcucagccagguugcagaagcggcuuagcguguguccuaaucuucucucugcguguagguaggccugugccgcaaacaagcuuaccaugggccagaucaucaccuucuuccaggaggugccccacgucaucgaggaggugaugaacaucgugcugaucgcccucagccugcuggccauccucaaggggaucuacaacgucgcgaccugcggccuguucgggcugguguccuuccuccugcugugcggccgcagcugcuccacgaccuacaaggggguguacgagcuccagacccuggagcuggacauggccagccucaacaugaccaugccgcuguccugcacgaagaacaacagccaccacuacaucauggucggcaacgagaccggccuggagcucacccugaccaacacguccaucaucaaccacaaguucugcaaccugagcgacgcccacaagaagaaccucuacgaccacgcccugauguccaucaucagcaccuuccaccuguccauccccaacuucaaccaguacgaggccaugagcugcgacuucaacgggggcaagaucuccgugcaguacaaccucagccacgcguacgccguggacgccgccaaccacugcgggaccaucgcgaacggcguccugcagaccuucaugcggauggccuggggcggguccuacaucgcccuggacagcggcaagggguccugggacugcaucaugacgagcuaccaguaccucaucauccagaacaccaccugggaggaccacugccaguucucccgccccagccccaucggcuaccuggggcugcucagccagcggacccgcgacaucuacaucucccggcgccugcugggcacguucaccuggacccucagcgacuccgagggcaacgagacccccgggggcuacugccugacgcgguggaugcugaucgaggccgagcucaagugcuucgggaacaccgccguggcgaagugcaacgagaagcacgacgaggaguucugcgacaugcugcgccuguucgacuucaacaagcaggccauccggcgccucaagacccccgcccagaugagcauccagcugaucaacaaggccgugaacgcccugaucaacgaccagcucaucaugaagaaccaccuccgggacaucaugggcaucccguacugcaacuacuccaaguacugcuaccugaaccacaccgucacggggaagaccagccugccccgcugcugccugguguccaacggcagcuaccugaacgagacccacuucuccgacgacaucgagcagcaggcggacaacaugaucaccgagcuccugcagaaggaguacauggaccggcagggcaagacgccccuggggcucguggaccuguucgucuucagcaccuccuucuaccugaucagcaucuuccugcaccucaucaagaucccgacccaccgccacaucaccggcaagcccugccccaagccccaccggcugaaccacauggggaucugcuccugcggccuguacaagcacccgggggugcccgugaaguggaagcgcugaggacuagucccuguucccagagcccacuuuuuuuucuuuuuuugaaauaaaauagccugucuuucagaucucaaaggcucuuuucagagccaccaaaaaaaaaaaaaaaaaaaaaaaaaaaaaaaaaaaaaaaaaaaaaaaaaaaaaaaaaaaaaaaaaaaaaaaaaaaaaaaaaaaaaaaaaaaaaaaaaaaaa

SEQ ID NO: 32110 - RNA, 1764 nt, Artificial Sequence
  mRNA product Design a-2 (hSL-A100) comprising derived and/or modified sequence from LASV(ISTH2010-NIG-2012;Clade II)__AIT17482__GPCmut7 (opt1)
aggagaguccgcucagccagguugcagaagcggcuuagcguguguccuaaucuucucucugcguguagguaggccugugccgcaaacaagcuuaccaugggccagaucaucaccuucuuccaggaggugccccacgucaucgaggaggugaugaacaucgugcugaucgcccucagccugcuggccauccucaaggggaucuacaacgucgcgaccugcggccuguucgggcugguguccuuccuccugcugugcggccgcagcugcuccacgaccuacaaggggguguacgagcuccagacccuggagcuggacauggccagccucaacaugaccaugccgcuguccugcacgaagaacaacagccaccacuacaucauggucggcaacgagaccggccuggagcucacccugaccaacacguccaucaucaaccacaaguucugcaaccugagcgacgcccacaagaagaaccucuacgaccacgcccugauguccaucaucagcaccuuccaccuguccauccccaacuucaaccaguacgaggccaugagcugcgacuucaacgggggcaagaucuccgugcaguacaaccucagccacgcguacgccguggacgccgccaaccacugcgggaccaucgcgaacggcguccugcagaccuucaugcggauggccuggggcggguccuacaucgcccuggacagcggcaagggguccugggacugcaucaugacgagcuaccaguaccucaucauccagaacaucaccugggaggaccacugccaguucucccgccccagccccaucggcuaccuggggcugcucagccagcggacccgcgacaucuacaucucccggcgccugcugggcaccuucacguggacccucagcgacuccgagggcaacgagacccccgggggcuacugccugacccgguggaugcugaucgaggccgagcucaagugcuucgggaacacggccguggcgaagugcaacgagaagcacgacgaggaguucugcgacaugcugcgccuguucgacuucaacaagcaggccauccggcgccucaagacccccgcccagaugagcauccagcugaucaacaaggccgugaacgcccugaucaacgaccagcucaucaugaagaaccaccuccgggacaucaugggcauccccuacugcaacuacuccaaguacugcuaccugaaccacaccgucaccgggaagacgagccugccccgcugcugccugguguccaacggcagcuaccugaacgagacccacuucuccgacgacaucgagcagcaggcggacaacaugaucaccgagcuccugcagaaggaguacaucgaccggcagggcaagaccccgcuggggcucguggaccuguucgucuucagcacguccuucuaccugaucagcaucuuccugcaccucgugaagaucccgacccaccgccacguggucggcaagcccugccccaagccccaccggcugaaccacauggggaucugcuccugcggccuguacaagcacccgggggugcccgugaaguggaagcgcugaggacuagucccuguucccagagcccacuuuuuuuucuuuuuuugaaauaaaauagccugucuuucagaucucaaaggcucuuuucagagccaccaaaaaaaaaaaaaaaaaaaaaaaaaaaaaaaaaaaaaaaaaaaaaaaaaaaaaaaaaaaaaaaaaaaaaaaaaaaaaaaaaaaaaaaaaaaaaaaaaaaaa

SEQ ID NO: 32111 - RNA, 1764 nt, Artificial Sequence
  mRNA product Design a-2 (hSL-A100) comprising derived and/or modified sequence from LASV(Lassa virus/H.sapiens-wt/NGA/2015/ISTH_0543;Clade II)__AVO03639__GPCmut7 (opt1)
aggagaguccgcucagccagguugcagaagcggcuuagcguguguccuaaucuucucucugcguguagguaggccugugccgcaaacaagcuuaccaugggccagaucaucaccuucuuccaggaggugccccacgucaucgaggaggugaugaacaucgugcugaucgcccucagccugcuggccauccucaaggggaucuacaacgucgcgaccugcggccuguucgggcugguguccuuccuccugcugugcggccgcagcugcuccacgaccuacaaggggguguacgagcuccagacccuggagcuggacauggccaaccucaacaugaccaugccgcugagcugcacgaagaacaacucccaccacuacaucauggucggcaacgagaccggccuggagcucacccugaccaacacgagcaucaucaaccacaaguucugcaaccuguccgacgcccacaagaagaaccucuacgaccacgcccugaugagcaucaucuccaccuuccaccugagcauccccaacuucaaccaguacgaggccauguccugcgacuucaacgggggcaagaucagcgugcaguacaaccucucccacaccuacgcgguggacgccgccaaccacugcgggaccaucgccaacggcguccugcagacguucaugcggauggcguggggcgggagcuacaucgcccuggacuccggcaaggggagcugggacugcaucaugaccuccuaccaguaccucgugauccagaacaccaccugggaggaccacugccaguucagccgccccucccccaucggcuaccuggggcugcucagccagcggacgcgcgacaucuacaucagccggcgccugcugggcaccuucaccuggacccucuccgacagcgagggcaacgagacgcccgggggcuacugccugacccgguggaugcugaucgaggccgagcucaagugcuucgggaacaccgccguggccaagugcaacgagaagcacgacgaggaguucugcgacaugcugcgccuguucgacuucaacaagcaggcgauccggcgccucaagacccccgcccagauguccauccagcugaucaacaaggccgucaacgcccugaucaacgaccagcucaucaugaagaaccaccuccgggacaucaugggcauccccuacugcaacuacagcaaguacugcuaccugaaccacacggugaccgggaagaccucccugccccgcugcugccuggugagcaacggcuccuaccugaacgagacccacuucagcgacgacaucgagcagcaggccgacaacaugaucacggagcuccugcagaaggaguacaucgaccggcagggcaagaccccgcuggggcucgucgaccuguucguguucuccaccagcuucuaccugaucuccaucuuccugcaccucgugaagaucccgacccaccgccacaucacgggcaagcccugccccaagccccaccggcugaaccacauggggaucugcagcugcggccuguacaagcacccggggguccccgugaaguggaagcgcugaggacuagucccuguucccagagcccacuuuuuuuucuuuuuuugaaauaaaauagccugucuuucagaucucaaaggcucuuuucagagccaccaaaaaaaaaaaaaaaaaaaaaaaaaaaaaaaaaaaaaaaaaaaaaaaaaaaaaaaaaaaaaaaaaaaaaaaaaaaaaaaaaaaaaaaaaaaaaaaaaaaaa

SEQ ID NO: 32112 - RNA, 1764 nt, Artificial Sequence
  mRNA product Design a-2 (hSL-A100) comprising derived and/or modified sequence from LASV(Lassa virus/H.sapiens-wt/NGA/2016/ISTH_0009;Clade II)__AVO03571__GPCmut7 (opt1)
aggagaguccgcucagccagguugcagaagcggcuuagcguguguccuaaucuucucucugcguguagguaggccugugccgcaaacaagcuuaccaugggccagaucaucaccuucuuccaggaggugccccacgucaucgaggaggugaugaacaucgugcugaucgcccucagccugcuggccauccucaaggggaucuacaacgucgcgaccugcggccugcuggggcucguguccuuccugcugcucugcggccgcagcugcuccacgaccuacaaggggguguacgagcugcagacccuggagcucgacauggccagccugaacaugaccaugccgcuguccugcacgaagaacaacagccaccacuacaucauggucggcaacgagaccggccucgagcugacccugaccaacacguccaucaucaaccacaaguucugcaaccucagcgacgcccacaagaagaaccuguacgaccacgcccugauguccaucaucagcaccuuccaccucuccauccccaacuucaaccaguacgaggccaugagcugcgacuucaacgggggccggaucuccgugcaguacaaccugagccacuccuacgcgguggacgccgccaaccacugcgggaccaucgccaacggcguccugcagaccuucaugcgcauggcguggggcgggagcuacaucgcccucgacuccggcaaggggagcugggacugcaucaugacguccuaccaguaccugaucauccagaacaccaccugggaggaccacugccaguucagccggcccagccccaucggcuaccuggggcuccugucccagcgcacccgggacaucuacaucagccgccggcugcucggcacguucaccuggacccuguccgacagcgagggcaacgagacccccgggggcuacugccugacgcgcuggaugcucaucgaggccgagcugaagugcuucgggaacaccgccguggccaagugcaacgagaagcacgacgaggaguucugcgacaugcugcggcuguucgacuucaacaagcaggcgauccgccggcugaagacccccgcccagauguccauccagcugaucaacaaggccgugaacgcccucaucaacgaccagcugaucaugaagaaccaccuccgcgacaucaugggcaucccguacugcaacuacagcaaguacugcuaccucaaccacaccgucacggggaagaccucccugccccggugcugccuggugagcaacggcuccuaccucaacgagacccacuucagcgacgacaucgagcagcaggccgacaacaugaucaccgagcugcugcagaaggaguacaucgaccgccagggcaagacgccccucgggcugguggaccuguucgucuucuccaccagcuucuaccugaucuccaucuuccuccaccuggugaagaucccgacccaccggcacaucaccggcaagcccugccccaagccccaccgccugaaccacauggggaucugcagcugcggccucuacaaccacccgggggugcccgucaaguggaagcggugaggacuagucccuguucccagagcccacuuuuuuuucuuuuuuugaaauaaaauagccugucuuucagaucucaaaggcucuuuucagagccaccaaaaaaaaaaaaaaaaaaaaaaaaaaaaaaaaaaaaaaaaaaaaaaaaaaaaaaaaaaaaaaaaaaaaaaaaaaaaaaaaaaaaaaaaaaaaaaaaaaaaa

SEQ ID NO: 32113 - RNA, 1764 nt, Artificial Sequence
  mRNA product Design a-2 (hSL-A100) comprising derived and/or modified sequence from LASV(Lassa virus/H.sapiens-wt/NGA/2016/ISTH_0017;Clade II)__AVO03567__GPCmut7 (opt1)
aggagaguccgcucagccagguugcagaagcggcuuagcguguguccuaaucuucucucugcguguagguaggccugugccgcaaacaagcuuaccaugggccagaucaucaccuucuuccaggaggugccccacgucaucgaggaggugaugaacaucgugcugaucgcccucagccugcuggccauccucaaggggaucuacaacgucgcgaccugcggccuguucgggcugguguccuuccuccugcugugcggccgcagcugcuccacgaccuacaaggggguguacgagcuccagacccuggagcuggacauggccagccucaacaugaccaugccgcuguccugcacgaagaacaacagccaccacuacaucauggucggcaacgagaccggccuggagcucacccugaccaacacguccaucaucaaccacaaguucugcaaccugagcgacgcccacaagaagaaccucuacgaccacgcccugauguccaucaucagcaccuuccaccuguccauccccaacuucaaccaguacgaggccaugagcugcgacuucaacgggggcaagaucuccgugcaguacaaccucagccacaccuacgcgaucgacgccgccaaccacugcgggaccaucgccaacggcgugcugcagacguucaugcggauggcguggggcggguccuacaucgcccuggacagcggcaagggguccugggacugcaucaugaccagcuaccaguaccucaucauccagaacaccaccugggaggaccacugccaguucucccgccccagccccaucggcuaccuggggcugcucagccagcggacgcgcgacaucuacaucucccggcgccugcugggcaccuucaccuggacccucagcgacuccgagggcaacgagacgcccgggggcuacugccugacccgguggaugcugaucgaggccgagcucaagugcuucgggaacaccgccgucgccaagugcaacgagaagcacgacgaggaguucugcgacaugcugcgccuguucgacuucaacaagcaggcgauccggcgccucaagacccccgcccagaugagcauccagcugaucaacaaggccgugaacgcccugaucaacgaccagcucaucaugaagaaccaccuccgggacaucaugggcauccccuacugcaacuacuccaaguacugcuaccugaaccacacggugaccgggaagaccagccugccccgcugcugccuggucuccaacggcagcuaccugaacgagacccacuucuccgacgacaucgagcagcaggccgacaacaugaucacggagcuccugcagaaggaguacauggaccggcagggcaagaccccgcuggggcucguggaccuguucguguucagcaccuccuucuaccugaucagcaucuuccugcaccucguccgcaucccgacccaccggcacgugaucggcaagcccugccccaagccccaccgccugaaccacauggggaucugcuccugcggccuguacaagcacccgggggugcccgucaaguggaagcggugaggacuagucccuguucccagagcccacuuuuuuuucuuuuuuugaaauaaaauagccugucuuucagaucucaaaggcucuuuucagagccaccaaaaaaaaaaaaaaaaaaaaaaaaaaaaaaaaaaaaaaaaaaaaaaaaaaaaaaaaaaaaaaaaaaaaaaaaaaaaaaaaaaaaaaaaaaaaaaaaaaaaa

SEQ ID NO: 32114 - RNA, 1764 nt, Artificial Sequence
  mRNA product Design a-2 (hSL-A100) comprising derived and/or modified sequence from LASV(Lassa virus/H.sapiens-wt/NGA/2018/ISTH_0959;Clade II)__AVV65099__GPCmut7 (opt1)
aggagaguccgcucagccagguugcagaagcggcuuagcguguguccuaaucuucucucugcguguagguaggccugugccgcaaacaagcuuaccaugggccagaucaucaccuucuuccaggaggugccccacgucaucgaggaggugaugaacaucgugcugaucgcccucagccugcuggccauccucaaggggaucuacaacgucgugaccugcggccuguucgggcugguguccuuccuccugcugugcggccgcagcugcuccacgaccuacaagggggucuacgagcuccagacccuggagcuggacauggcgagccucaacaugaccaugccgcuguccugcacgaagaacaacagccaccacuacaucauggugggcaacgagaccggccuggagcucacccugaccaacacguccaucaucaaccacaaguucugcaaccugagcgacgcccacaagaagaaccucuacgaccacgcccugauguccaucaucagcaccuuccaccuguccauccccaacuucaaccaguacgaggccaugagcugcgacuucaacgggggcaagaucuccgugcaguacaaccucagccacgccuacgcgaucgacgccgccaaccacugcgggaccaucgccaacggcguccugcagaccuucaugcggauggcguggggcggguccuacaucgcccuggacagcggcaagggguccugggacugcaucaugacgagcuaccaguaccucaucauccagaacaccaccugggaggaccacugccaguucucccgccccagccccaucggcuaccuggggcugcucagccagcggacccgcgacaucuacaucucccggcgccugcugggcacguucaccuggacccucagcgacuccgagggcaacgagacccccgggggcuacugccugacgcgguggaugcugaucgaggccgagcucaagugcuucgggaacaccgccguggccaagugcaacgagaagcacgacgaggaguucugcgacaugcugcgccuguucgacuucaacaagcaggcgauccggcgccucaagacccccgcccagaugagcauccagcugaucaacaaggccgugaacgcccugaucaacgaccagcucaucaugaagaaccaccuccgggacaucaugggcaucccguacugcaacuacuccaaguacugcuaccugaaccacaccgucacggggaagaccagccugccccgcugcugccugguguccaacggcagcuaccugaacgagacccacuucuccgacgacaucgagcagcaggccgacaacaugaucaccgagcuccugcagaaggaguacaucgaccggcagggcaagacgccccuggggcucguggaccuguucgucuucagcaccuccuucuaccugaucagcaucuuccugcaccucgugaagaucccgacccaccgccacgugaucggcaagcccugccccaagccccaccggcugaaccacauggggaucugcuccugcggccuguacaagcacccggggguccccgugaaguggaagcgcugaggacuagucccuguucccagagcccacuuuuuuuucuuuuuuugaaauaaaauagccugucuuucagaucucaaaggcucuuuucagagccaccaaaaaaaaaaaaaaaaaaaaaaaaaaaaaaaaaaaaaaaaaaaaaaaaaaaaaaaaaaaaaaaaaaaaaaaaaaaaaaaaaaaaaaaaaaaaaaaaaaaaa

SEQ ID NO: 32115 - RNA, 1764 nt, Artificial Sequence
  mRNA product Design a-2 (hSL-A100) comprising derived and/or modified sequence from LASV(LASV003-NIG-2008;Clade II)__AIT17580__GPCmut7 (opt1)
aggagaguccgcucagccagguugcagaagcggcuuagcguguguccuaaucuucucucugcguguagguaggccugugccgcaaacaagcuuaccaugggccagaucaucaccuucuuccaggaggugccccacgucaucgaggaggugaugaacaucgugcugaucgcccucagccugcuggccauccucaaggggaucuacaacgucgcgaccugcggccuguucgggcugguguccuuccuccugcugugcggccgcagcugcuccacgaccuacaaggggguguacgagcuccagacccuggagcuggacauggccagccucaacaugaccaugccgcuguccugcacgaagaacaacagccaccacuacaucauggucggcaacgagaccggccuggagcucacccugaccaacacguccaucaucaaccacaaguucugcaaccugagcgacgcccacaagaagaaccucuacgaccacgcccugauguccaucaucagcaccuuccaccuguccauccccaacuucaaccaguacgaggccaugagcugcgacuucaacgggggcaagaucuccgugcaguacaaccucagccacaccuacgcgguggacgccgccaaccacugcgggaccaucgccaacggcguccugcagacguucaugcggauggcguggggcggguccuacaucgcccuggacagcggcaagggguccugggacugcaucaugaccagcuaccaguaccucaucauccagaacaccaccugggaggaccacugccaguucucccgccccagccccaucggcuaccuggggcugcucagccagcggacgcgcgacaucuacaucucccggcgccugcugggcaccuucaccuggacccucagcgacuccgagagcaacgagacgccgggcggguacugccugacccgguggaugcugaucgaggccgagcucaagugcuucggcaacaccgccguggccaagugcaacgagaagcacgacgaggaguucugcgacaugcugcgccuguucgacuucaacaagcaggcgauccggcgccucaaggcccccgcccagauguccauccagcugaucaacaaggccgugaacgcccugaucaacgaccagcucaucaugaagaaccaccuccgggacaucauggggauccccuacugcaacuacagcaaguacugcuaccugaaccacaccgucacgggccgcaccucccugccccggugcugccuggugagcaacggguccuaccugaacgagacccacuucagcgacgacaucgagcagcaggcggacaacaugaucaccgagcuccugcagaaggaguacauggaccgccagggcaagacgccccugggccucguggaccuguucgucuucuccaccagcuucuaccugaucuccaucuuccugcaccucgugaagaucccgacccaccggcacgugaucgggaagcccugccccaagccccaccgccugaaccacaugggcaucugcagcugcgggcuguacaagcacccgggcguccccgugaaguggaagcggugaggacuagucccuguucccagagcccacuuuuuuuucuuuuuuugaaauaaaauagccugucuuucagaucucaaaggcucuuuucagagccaccaaaaaaaaaaaaaaaaaaaaaaaaaaaaaaaaaaaaaaaaaaaaaaaaaaaaaaaaaaaaaaaaaaaaaaaaaaaaaaaaaaaaaaaaaaaaaaaaaaaaa

SEQ ID NO: 32116 - RNA, 1764 nt, Artificial Sequence
  mRNA product Design a-2 (hSL-A100) comprising derived and/or modified sequence from LASV(LASV035-NIG-2009;Clade II)__AIT17588__GPCmut7 (opt1)
aggagaguccgcucagccagguugcagaagcggcuuagcguguguccuaaucuucucucugcguguagguaggccugugccgcaaacaagcuuaccaugggccagaucaucaccuucuuccaggaggugccccacgucaucgaggaggugaugaacaucgugcugaucgcccucagccugcuggccauccucaaggggaucuacaacgucgcgaccugcggccuguucgggcugguguccuuccuccugcugugcggccgcagcugcuccacgaccuacaaggggguguacgagcuccagacccuggagcuggacauggccagccucaacaugaccaugccgcuguccugcacgaagaacaacagccaccacuacaucauggucggcaacgagaccggccuggagcucacccugaccaacacguccaucaucaaccacaaguucugcaaccugagcgacgcccacaagaagaaccucuacgaccacgcccugauguccaucaucagcaccuuccaccuguccauccccaacuucaaccaguacgaggccaugagcugcgacuucaacgggggcaagaucuccgugcaguacaaccucagccacgcguacgccguggacgccgccaaccacugcgggaccaucgcgaacggcguccugcagaccuucaugcggauggccuggggcggguccuacaucgcccuggacagcggcaagggguccugggacugcaucaugacgagcuaccaguaccucaucauccagaacaccaccugggaggaccacugccaguucucccgccccagccccaucggcuaccuggggcugcucagccagcggacccgcgacaucuacaucucccggcgccugcugggcacguucaccuggacccucagcgacuccgagggcaacgagacccccgggggcuacugccugacgcgguggaugcugaucgaggccgagcucaagugcuucgggaacaccgccguggcgaagugcaacgagaagcacgacgaggaguucugcgacaugcugcgccuguucgacuucaacaagcaggccauccggcgccucaaggcccccgcccagaugagcauccagcugaucaacaaggccgugaacgcgcugaucaacgaccagcucaucaugaagaaccaccuccgggacaucaugggcauccccuacugcaacuacuccaaguacugcuaccugaaccacaccgucaccgggaagacgagccugccccgcugcugccugguguccaacggcagcuaccugaacgagacccacuucuccgacgacaucgagcagcaggccgacaacaugaucaccgagcuccugcagaaggaguacaucgaccggcagggcaagaccccgcuggggcucguggaccuguucgucuucagcacguccuucuaccugaucagcaucuuccugcaccucgugaagaucccgacccaccgccacgugaucggcaagcccugccccaagccccaccggcugaaccacauggggaucugcuccugcggccuguacaagcacccggggguccccgugaaguggaagcgcugaggacuagucccuguucccagagcccacuuuuuuuucuuuuuuugaaauaaaauagccugucuuucagaucucaaaggcucuuuucagagccaccaaaaaaaaaaaaaaaaaaaaaaaaaaaaaaaaaaaaaaaaaaaaaaaaaaaaaaaaaaaaaaaaaaaaaaaaaaaaaaaaaaaaaaaaaaaaaaaaaaaaa

SEQ ID NO: 32117 - RNA, 1764 nt, Artificial Sequence
  mRNA product Design a-2 (hSL-A100) comprising derived and/or modified sequence from LASV(LASV1000-NIG-2009;Clade II)__AIT17782__GPCmut7 (opt1)
aggagaguccgcucagccagguugcagaagcggcuuagcguguguccuaaucuucucucugcguguagguaggccugugccgcaaacaagcuuaccaugggccagaucaucaccuucuuccaggaggugccccacgucaucgaggaggugaugaacaucgugcugaucgcccucagccugcuggccauccucaaggggaucuacaacgucgcgaccugcggccuguucgggcugguguccuuccuccugcugugcggccgcagcugcuccacgaccuacaaggggguguacgagcuccagacccuggagcuggacauggccagccucaacaugaccaugccgcuguccugcacgaagaacaacagccaccacuacaucauggucggcaacgagaccggccuggagcucacccugaccaacacguccaucaucaaccacaaguucugcaaccugagcgacgcccacaagaagaaccucuacgaccacgcccugauguccaucaucagcaccuuccaccuguccauccccaacuucaaccaguacgaggccaugagcugcgacuucaacgggggcaagaucuccgugcaguacaaccucagccacaccuacgcgguggacgccgccaaccacugcgggaccaucgccaacggcguccugcagacguucaugcggauggcguggggcggguccuacaucgcccuggacagcggcaagggguccugggacugcaucaugaccagcuaccaguaccucaucauccagaacaccaccugggaggaccacugccaguucucccgccccagccccaucggcuaccuggggcugcucagccagcggacgcgcgacaucuacaucucccggcgccugcugggcaccuucaccuggacccucagcgacuccgagggcaacgagacgcccgggggcuacugccugacccgguggaugcugaucgaggccgagcucaagugcuucgggaacaccgccguggccaagugcaacgagaagcacgacgaggaguucugcgacaugcugcgccuguucgacuucaacaagcaggcgaucaagcggcucaagacccccgcccagaugagcauccagcugaucaacaaggccgugaacgcccugaucaacgaccagcucaucaugaagaaccaccuccgcgacaucaugggcauccccuacugcaacuacuccaaguacugcuaccugaaccacacggucaccgggaagaccagccugccccggugcugccugguguccaacggcagcuaccugaacgagacccacuucuccgacgacaucgagcagcaggccgacaacaugaucacggagcuccugcagaaggaguacaucgaccgccagggcaagaccccgcuggggcucguggaccuguucgucuucagcaccuccuucuaccugaucagcaucuuccugcaccucgugaagaucccgacccaccggcacguggucggcaagcccugccccaagccccaccgccugaaccacauggggaucugcuccugcggccuguacaagcacccgggggugcccgugaaguggaagcggugaggacuagucccuguucccagagcccacuuuuuuuucuuuuuuugaaauaaaauagccugucuuucagaucucaaaggcucuuuucagagccaccaaaaaaaaaaaaaaaaaaaaaaaaaaaaaaaaaaaaaaaaaaaaaaaaaaaaaaaaaaaaaaaaaaaaaaaaaaaaaaaaaaaaaaaaaaaaaaaaaaaaa

SEQ ID NO: 32118 - RNA, 1764 nt, Artificial Sequence
  mRNA product Design a-2 (hSL-A100) comprising derived and/or modified sequence from LASV(LASV221-NIG-2010;Clade II)__AIT17624__GPCmut7 (opt1)
aggagaguccgcucagccagguugcagaagcggcuuagcguguguccuaaucuucucucugcguguagguaggccugugccgcaaacaagcuuaccaugggccagaucaucaccuucuuccaggaggugccccacgucaucgaggaggugaugaacaucgugcugaucgcccucagccugcuggccauccucaaggggaucuacaacgucgcgaccugcggccuguucgggcugguguccuuccuccugcugugcggccgcagcugcuccacgaccuacaaggggguguacgagcuccagacccuggagcuggacauggccagccucaacaugaccaugccgcuguccugcacgaagaacaacagccaccacuacaucauggucggcaacgagaccggccuggagcucacccugaccaacacguccaucaucaaccacaaguucugcaaccugagcgacgcccacaagaagaaccucuacgaccacgcccugauguccaucaucagcaccuuccaccuguccauccccaacuucaaccaguacgaggccaugagcugcgacuucaacgggggcaagaucuccgugcaguacaaccucagccacaccuacgcgaucgacgccgccaaccacugcgggaccaucgccaacggcgugcugcagacguucaugcggauggcguggggcggguccuacaucgcccuggacagcggcaagggguccugggacugcaucaugaccagcuaccaguaccucaucauccagaacaccaccugggaggaccacugccaguucucccgccccagccccaucggcuaccuggggcugcucagccagcggacgcgcgacaucuacaucucccggcgccugcugggcaccuucaccuggacccucagcgacuccgagggcaacgagacgcccgggggcuacugccugacccgguggaugcugaucgaggccgagcucaagugcuucgggaacaccgccgucgccaagugcaacgagaagcacgacgaggaguucugcgacaugcugcgccuguucgacuucaacaagcaggcgauccggcgccucaagacccccgcccagaugagcauccagcugaucaacaaggccgugaacgcccugaucaacgaccagcucaucaugaagaaccaccuccgggacaucaugggcauccccuacugcaacuacuccaaguacugcuaccugaaccacacggugaccgggaagaccagccugccccgcugcugccuggucuccaacggcagcuaccugaacgagacccacuucuccgacgacaucgagcagcaggccgacaacaugaucacggagaugcuccagaaggaguacauggaccggcagggcaagaccccgcuggggcugguggaccucuucguguucagcaccuccuucuaccugaucagcaucuuccugcaccuggucaagaucccgacccaccgccacgugaucggcaagcccugccccaagccccaccggcucaaccacauggggaucugcuccugcggccuguacaagcacccgggggugcccgucaaguggaagcgcugaggacuagucccuguucccagagcccacuuuuuuuucuuuuuuugaaauaaaauagccugucuuucagaucucaaaggcucuuuucagagccaccaaaaaaaaaaaaaaaaaaaaaaaaaaaaaaaaaaaaaaaaaaaaaaaaaaaaaaaaaaaaaaaaaaaaaaaaaaaaaaaaaaaaaaaaaaaaaaaaaaaaa

SEQ ID NO: 32119 - RNA, 1764 nt, Artificial Sequence
  mRNA product Design a-2 (hSL-A100) comprising derived and/or modified sequence from LASV(LASV237-NIG-2010;Clade II)__AIT17638__GPCmut7 (opt1)
aggagaguccgcucagccagguugcagaagcggcuuagcguguguccuaaucuucucucugcguguagguaggccugugccgcaaacaagcuuaccaugggccagaucaucaccuucuuccaggaggugccccacgucaucgaggaggugaugaacaucgugcugaucgcccucagccugcuggccauccucaaggggaucuacaacgucgcgaccugcggccuguucgggcugguguccuuccuccugcugugcggccgcagcugcuccacgaccuacaaggggguguacgagcuccagacccuggagcuggacauggccagccucaacaugaccaugccgcuguccugcacgaagaacaacagccaccacuacaucauggucggcaacgagaccggccuggagcucacccugaccaacacguccaucaucaaccacaaguucugcaaccugagcgacgcccacaagaaggaccucuacgaccacgcccugauguccaucaucagcaccuuccaccuguccauccccaacuucaaccaguacgaggccaugagcugcgacuucaacgggggcaagaucuccgugcaguacaaccucagccacaccuacgcgguggacgccgccaaccacugcgggaccaucgccaacggcguccugcagacguucaugcggauggcguggggcggguccuacaucgcccuggacagcggcaagggguccugggacugcaucaugaccagcuaccaguaccucaucauccagaacaccaccugggaggaccacugccaguucucccgccccagccccaucggcuaccuggggcugcucagccagcggacgcgcgacaucuacaucucccggcgccugcugggcaccuucaccuggacccucagcgacuccgagggcaacgagacgcccgggggcuacugccugacccgguggaugcugaucgaggccgagcucaagugcuucgggaacaccgccguggccaagugcaacgagaagcacgacgaggaguucugcgacaugcugcgccuguucgacuucaacaagcaggcgauccggcgccucaagacccccgcccagaugagcauccagcugaucaacaaggccgugaacgcccugaucaacgaccagcucaucaugaagaaccaccuccgggacaucaugggcauccccuacugcaacuacuccaaguacugcuaccugaaccacacggucaccgggaagaccagccugccccgcugcugccugguguccaacggcagcuaccugaacgagacccacuucuccgacgacaucgagcagcaggccgacaacaugaucacggagcuccugcagaaggaguacauggaccggcagggcaagaccccgcuggggcucguggaccuguucgucuucagcaccuccuucuaccugaucagcaucuuccugcaccucaucaagaucccgacccaccgccacaucacgggcaagcccugccccaagccccaccggcugaaccacauggggaucugcuccugcggccuguacaagcacccgggggugcccgugaaguggaagcgcugaggacuagucccuguucccagagcccacuuuuuuuucuuuuuuugaaauaaaauagccugucuuucagaucucaaaggcucuuuucagagccaccaaaaaaaaaaaaaaaaaaaaaaaaaaaaaaaaaaaaaaaaaaaaaaaaaaaaaaaaaaaaaaaaaaaaaaaaaaaaaaaaaaaaaaaaaaaaaaaaaaaaa

SEQ ID NO: 32120 - RNA, 1764 nt, Artificial Sequence
  mRNA product Design a-2 (hSL-A100) comprising derived and/or modified sequence from LASV(LASV253-NIG-2011;Clade II)__AIT17670__GPCmut7 (opt1)
aggagaguccgcucagccagguugcagaagcggcuuagcguguguccuaaucuucucucugcguguagguaggccugugccgcaaacaagcuuaccaugggccagaucaucaccuucuuccaggaggugccccacgucaucgaggaggugaugaacaucgugcugaucgcccucagccugcuggccauccucaaggggaucuacaacgucgcgaccugcggccuguucgggcugguguccuuccuccugcugugcggccgcagcugcuccacgaccuacaaggggguguacgagcuccagacccuggagcuggacauggccagccucaacaugaccaugccgcuguccugcacgaagaacaacagccaccacuacaucauggucggcaacgagaccggccuggagcucacccugaccaacacguccaucaucaaccacaaguucugcaaccugagcgacgcccacaagaagaaccucuacgaccacgcccugauguccaucaucagcaccuuccaccuguccauccccaacuucaaccaguacgaggccaugagcugcgacuucaacgggggcaagaucuccgugcaguacaaccucagccacaccuacgcgguggacgccgccaaccacugcgggaccaucgccaacggcguccugcagacguucaugcggauggcguggggcggguccuacaucgcccuggacagcggcaagggguccugggacugcaucaugaccagcuaccaguaccucaucauccagaacaccaccugggaggaccacugccaguucucccgccccagccccaucggcuaccuggggcugcucagccagcggacgcgcgacaucuacaucucccggcgccugcugggcaccuucaccuggacccucagcgacuccgagggcaacgagacgcccgggggcuacugccugacccgguggaugcugaucgaggccgagcucaagugcuucgggaacaccgccguggccaagugcaacgagaagcacgacgaggaguucugcgacaugcugcgccuguucgacuucaacaagcaggcgauccggcgccucaaggcccccgcccagaugagcauccagcugaucaacaaggccgugaacgcccugaucaacgaccagcucaucaugaagaaccaccuccgggacaucaugggcaucccguacugcaacuacuccaaguacugcuaccugaaccacaccgucacggggcgcaccagccugccccggugcugccugguguccaacggcagcuaccugaacgagacccacuucuccgacgacaucgagcagcaggcggacaacaugaucaccgagcuccugcagaaggaguacaucgaccgccagggcaagacgccccuggggcucguggaccuguucgucuucagcaccuccuucuaccugaucagcaucuuccugcaccucgugaagaucccgacccaccggcacaucaucggcaagcccugccccaagccccaccgccugaaccacauggggaucugcuccugcggccuguacaagcacccgggggugcccgucaaguggaagcggugaggacuagucccuguucccagagcccacuuuuuuuucuuuuuuugaaauaaaauagccugucuuucagaucucaaaggcucuuuucagagccaccaaaaaaaaaaaaaaaaaaaaaaaaaaaaaaaaaaaaaaaaaaaaaaaaaaaaaaaaaaaaaaaaaaaaaaaaaaaaaaaaaaaaaaaaaaaaaaaaaaaaa

SEQ ID NO: 32121 - RNA, 1764 nt, Artificial Sequence
  mRNA product Design a-2 (hSL-A100) comprising derived and/or modified sequence from LASV(LASV254-NIG-2011;Clade II)__AIT17674__GPCmut7 (opt1)
aggagaguccgcucagccagguugcagaagcggcuuagcguguguccuaaucuucucucugcguguagguaggccugugccgcaaacaagcuuaccaugggccagaucaucaccuucuuccaggaggugccccacgucaucgaggaggugaugaacaucgugcugaucgcccucagccugcuggccauccucaaggggaucuacaacgucgcgaccugcggccuguucgggcugguguccuuccuccugcugugcggccgcagcugcuccacgaccuacaaggggguguacgagcuccagacccuggagcuggacaugaccaaccucaacaugacgaugccgcugagcugcaccaagaacaacucccaccacuacaucauggucggcaacgagaccggccuggagcucacccugacgaacaccagcaucaucaaccacaaguucugcaaccuguccgacgcccacaagaagaaccucuacaaccacgcccugaugagcaucaucuccaccuuccaccugagcauccccaacuucaaccaguacgaggccauguccugcgacuucaacgggggcaagaucagcgugcaguacaaccucucccacagcuacgccguggacgcggccaaccacugcgggaccaucgccaacggcguccugcagacguucaugcggauggccuggggcggguccuacaucgcgcuggacagcggcaaggggaacugggacugcaucaugaccuccuaccaguaccucaucauccagaacaccaccugggaggaccacugccaguucagccgccccucccccaucggcuaccuggggcugcucagccagcggacgcgcgacaucuacaucagccggcgccugcugggcaccuucaccuggacccucuccgacagcgagggcaacgagacgcccgggggcuacugccugacccgguggaugcugaucgaggccgagcucaagugcuucgggaacaccgccguggccaagugcaacgagaagcacgacgaggaguucugcgacaugcugcgccuguucgacuucaacaagcaggccauccggcgccucaagacccccgcgcaggccaacauccagcugaucaacaaggccgugaacgcccugaucaacgaccagcucaucaugaagaaccaccuccgggacaucaugggcauccccuacugcaacuacuccaaguacugcuaccugaaccacacggucaccgggaagaccagccugccccgcugcugccugguguccaacggcagcuaccugaacgagacccacuucuccgacgacaucgagcagcaggccgacaacaugaucacggagcuccugcagaaggaguacauggaccggcagggcaagaccccgcuggggcucguggaccuguucgucuucagcaccuccuucuaccugaucagcaucuuccugcaccucgugaagaucccgacccaccgccacgugaucggcaagcccugccccaagccccaccggcugaaccacauggggaucugcuccugcggccuguacaagcacccggggguccccgugaaguggaagcgcugaggacuagucccuguucccagagcccacuuuuuuuucuuuuuuugaaauaaaauagccugucuuucagaucucaaaggcucuuuucagagccaccaaaaaaaaaaaaaaaaaaaaaaaaaaaaaaaaaaaaaaaaaaaaaaaaaaaaaaaaaaaaaaaaaaaaaaaaaaaaaaaaaaaaaaaaaaaaaaaaaaaaa

SEQ ID NO: 32122 - RNA, 1764 nt, Artificial Sequence
  mRNA product Design a-2 (hSL-A100) comprising derived and/or modified sequence from LASV(Nig08-A19;Clade III)__ADU56618__GPCmut7 (opt1)
aggagaguccgcucagccagguugcagaagcggcuuagcguguguccuaaucuucucucugcguguagguaggccugugccgcaaacaagcuuaccaugggccagaucgugaccuucuuccaggaggucccccacgugaucgaggaggugaugaacaucguccugaucgcccucagcauccuggccauccugaaggggcucuacaacaucgcgaccugcggccugaucgggcuggugacguuccuccugcuguccggccgcagcugcuccaugaccuacaaggggguguacgagcuccagacccuggagcugaacaugaacacccucaacaugacgaugccgcugagcugcaccaagaacaacucccaccacuacaucauggucggcaacgagaccggccuggagcucacccugacgaacaccagccugcuccaccacaaguucugcaaccuguccgacgcccacaagaagaaccuguacgaccacacccucaugagcaucaucuccaccuuccaccugagcauccccaacuucaaccaguacgaggccauguccugcgacuucaacgggggcaagaucacggugcaguacaaccugagccacuccuacgccaucgacgccgcgaaccacugcgggaccguggccaacggcguccuccagaccuucaugcggauggccuggggcgggagcuacaucgcccuggacuccggccgcgggaagugggacugcaucaugaccagcuaccaguaccugaucauccagaacacgaccugggaggaccacugccaguucucccggcccagccccaucggcuaccucgggcugcugucccagcgcacccgggacaucuacaucagccgccggcuccugggcaccuucacguggacccugagcgacuccgagggcaacgagacccccgggggcuacugccucacccgcuggaugcugaucgaggcggagcugaagugcuucgggaacacggccguggccaagugcaacgagaagcacgacgaggaguucugcgacaugcuccggcuguucgacuucaacaagcaggccauccgccggcugaaggcccccgcgcagaugagcauccagcucaucaacaaggccgugaacgcccugaucaacgaccagcugaucaugaagaaccaccuccgcgacaucaugggcauccccuacugcaacuacuccaaguacugcuaccugaaccacaccagcaccgggcggaccucccugccccgcugcugccucgucagcaacggcuccuaccugaacgagacgcacuucagcgacgacaucgagcagcaggccgacaacaugaucaccgagaugcugcagaaggaguaccucgaccggcagggcaagaccccgcuggggcugguggaccuguucguguucuccaccagcuucuaccucaucuccaucuuccugcaccuggucaagaucccgacgcaccgccacaucgugggcaagcccugccccaagccccaccggcucaaccacauggggaucugcagcugcggccuguacaagcagccgggggugcccguccgcuggaagcggugaggacuagucccuguucccagagcccacuuuuuuuucuuuuuuugaaauaaaauagccugucuuucagaucucaaaggcucuuuucagagccaccaaaaaaaaaaaaaaaaaaaaaaaaaaaaaaaaaaaaaaaaaaaaaaaaaaaaaaaaaaaaaaaaaaaaaaaaaaaaaaaaaaaaaaaaaaaaaaaaaaaaa

SEQ ID NO: 32123 - RNA, 1767 nt, Artificial Sequence
  mRNA product Design a-2 (hSL-A100) comprising derived and/or modified sequence from LASV(G1180-SLE-2010;Clade IV)__AIT17168__GPCmut7 (opt1)
aggagaguccgcucagccagguugcagaagcggcuuagcguguguccuaaucuucucucugcguguagguaggccugugccgcaaacaagcuuaccaugggccagaucgugaccuucuuccaggaggucccccacgugaucgaggaggugaugaacaucguccugaucgcccucagcauccuggccgugcugaaggggcucuacaacuucgcgaccugcggccugguggggcugcucaccuuccugcugcucugcggccgcuccugcaccgccagccgguacaagggggucuacgagcugcagacccuggagcucaacauggagacccugaacaugacgaugccgcuguccugcaccaagaacaacagccaccacuacaucauggugggcaacgagaccggccucgagcugacccugacgaacaccuccaucaucaaccacaaguucugcaaccucagcgacgcccacaagaagaaccuguacgaccacgcccugauguccaucaucagcaccuuccaccucuccauccccaacuucaaccaguacgaggccaugagcugcgacuucaacgggggcaagaucuccgugcaguacaaccugagccacuccuacgcgggggacgccgccaaccacugcggcaccgucgccaacggggugcugcagacguucaugcgcauggcguggggcggcagcuacaucgcccucgacuccgggcacggcagcugggacugcaucaugaccuccuaccaguaccugaucauccagaacaccaccugggaggaccacugccaguucagccggcccucccccaucggguaccugggccuccugagccagcgcacgcgggacaucuacaucagccgccggcugcucggcaccuucaccuggacccuguccgacagcgaggggaaggacacgccgggcggguacugccugacccgcuggaugcucaucgaggccgagcugaagugcuucggcaacaccgccguggccaagugcaacgagaagcacgacgaggaguucugcgacaugcugcggcuguucgacuucaacaagcaggcgauccagcgccugaaggcccccgcccagauguccauccagcugaucaacaaggccgucaacgcccucaucaacgaccagcugaucaugaagaaccaccuccgggacaucauggggauccccuacugcaacuacagcaaguacugcuaccucaaccacaccacgaccggcaagaccucccugcccaagugcugccuggugagcaacggcuccuaccucaacgagacccacuucagcgacgacaucgagcagcaggcggacaacaugaucacggagaugcugcagaaggaguacauggagcgccaggggaagacgccccugggccucguggaccuguucgucuucuccaccagcuucuaccugaucuccaucuuccugcaccucgugaagaucccgacccaccggcacaucgugggcaagagcugccccaagccccaccgccugaaccacauggggaucugcuccugcgggcuguacaagcagcccggcgucccggugaaguggaagcggugaggacuagucccuguucccagagcccacuuuuuuuucuuuuuuugaaauaaaauagccugucuuucagaucucaaaggcucuuuucagagccaccaaaaaaaaaaaaaaaaaaaaaaaaaaaaaaaaaaaaaaaaaaaaaaaaaaaaaaaaaaaaaaaaaaaaaaaaaaaaaaaaaaaaaaaaaaaaaaaaaaaaa

SEQ ID NO: 32124 - RNA, 1767 nt, Artificial Sequence
  mRNA product Design a-2 (hSL-A100) comprising derived and/or modified sequence from LASV(G1442-SLE-2011;Clade IV)__AIT17180__GPCmut7 (opt1)
aggagaguccgcucagccagguugcagaagcggcuuagcguguguccuaaucuucucucugcguguagguaggccugugccgcaaacaagcuuaccaugggccagaucgugaccuucuuccaggaggucccccacgugaucgaggaggugaugaacaucguccugaucgcccucagcauccuggccgugcugaaggggcucuacaacguggcgaccugcggccugaucgggcuggucacguuccuccugcugugcggccgcuccugcaccaccacccucuacaaggggguguacgagcugcagacgcuggagcucaacauggagacccugaacaugaccaugccgcugagcugcaccaagaacaacucccaccacuacauccgggugggcaacgagacgggccucgagcugacccugaccaacaccagcaucaucaaccacaaguucugcaaccucuccgacgcccacaagaagaaccuguacgaccacgcccugaugagcaucaucuccacguuccaccucagcauccccaacuucaaccaguacgaggccauguccugcgacuucaacgggggcaagaucagcguccaguacaaccugucccacagcuacgccggggacgcggccaaccacugcggcaccguggccaacggggugcugcagaccuucaugcgcauggccuggggcggcuccuacaucgcgcucgacagcgggcggggcaacugggacugcaucaugaccuccuaccaguaccugaucauccagaacacgaccugggacgaccacugccaguucagccgccccucccccaucggguaccugggccuccugagccagcggacccgcgacgucuacaucucccggcgccugcucggcaccuucacguggacccugagcgacagcgaggggaaggacaccccgggcggguacugccugacccgguggaugcucaucgaggccgagcugaagugcuucggcaacacggccguggccaagugcaacgagaagcacgacgaggaguucugcgacaugcugcgccucuucgacuucaacaagcaggccauccagcggcugaaggcgcccgcccagauguccauccagcugaucaacaaggccgugaacgcccucaucaacgaccagcugaucaugaagaaccaccuccgcgacaucauggggauccccuacugcaacuacagcaaguacugcuaccugaacaacaccgccaccggcaagaccucccugcccaagugcugccugaucagcaacggcuccuaccucaacgagacgcacuucagcgacgacaucgagcaggaggcggacaacaugaucaccgagaugcugcagaaggaguacauggagcggcaggggaagacgccccugggccucgucgaccuguucguguucuccaccagcuucuaccugaucuccaucuuccugcaccucgugaagaucccgacccaccgccacaucgucggcaagagcugccccaagccccaccggcugaaccacauggggaucugcuccugcgggcuguacaagcagcccggcgugccggugcgcuggaagcggugaggacuagucccuguucccagagcccacuuuuuuuucuuuuuuugaaauaaaauagccugucuuucagaucucaaaggcucuuuucagagccaccaaaaaaaaaaaaaaaaaaaaaaaaaaaaaaaaaaaaaaaaaaaaaaaaaaaaaaaaaaaaaaaaaaaaaaaaaaaaaaaaaaaaaaaaaaaaaaaaaaaaa

SEQ ID NO: 32125 - RNA, 1767 nt, Artificial Sequence
  mRNA product Design a-2 (hSL-A100) comprising derived and/or modified sequence from LASV(G3010-SLE-2013;Clade IV)__AIT17344__GPCmut7 (opt1)
aggagaguccgcucagccagguugcagaagcggcuuagcguguguccuaaucuucucucugcguguagguaggccugugccgcaaacaagcuuaccaugggccagaucgugaccuucuuccaggaggucccccacgugaucgaggaggugaugaacaucguccugaucgcccucagcauccuggccgugcugaaggggcucuacaacuucgcgaccugcggccugguggggcuggucacguuccuccugcugugcggccgcuccugcaccaccagccucuacaaggggguguacgagcugcagacccuggagcucaacauggagacgcugaacaugaccaugccgcuguccugcaccaagaacaacagccaccacuacaucauggugggcaacgagaccggccucgagcugacgcugaccaacaccuccaucaucaaccacaaguucugcaaccucagcgacgcccacaagaagaaccuguacaaccacgcccugauguccaucaucagcaccuuccaccucuccauccccaacuucaaccaguacgaggccaugagcugcgacuucaacgggggcaagaucuccguccaguacaaccugagccacuccuacgccggggacgcggccagccacugcggcacgguggccaacggggugcugcagaccuucaugcggauggccuggggcggcuccuacaucgcgcucgacagcggguacggcaagugggacugcaucaugaccuccuaccaguaccugaucauccagaacaccacgugggaggaccacugccaguucagccgccccucccccaucggguaccugggccuccugagccagcggacccgcgacaucuacaucagccggcgccugcucggcaccuucaccuggacgcuguccgacagcgaggggaaggacaccccgggcggguacugccugacccgguggaugcucaucgaggccgagcugaagugcuucggcaacaccgccgucgccaagugcaacgagaagcacgacgaggaguucugcgacaugcugcgccucuucgacuucaacaagcaggccauccagcggcugaagacgcccgcgcagauguccauccagcugaucaacaaggccgugaacgcccucaucaacgaccagcugaucaugaagaaccaccuccgcgacaucauggggauccccuacugcaacuacagcaaguacugcuaccugaaccacaccaccaccggcaagacgucccugcccaagugcugccuggugagcaacggcuccuaccucaacgagacccacuucagcgacgacaucgagcagcaggccgacaacaugaucaccgagaugcugcagaaggaguacauggagcggcaggggaagacgccccugggccucgucgaccuguucguguucuccaccagcuucuaccugaucuccaucuuccugcaccucgugaagaucccgacccaccgccacaucgucggcaagagcugccccaagccccaccggcugaaccacauggggaucugcuccugcgggcuguacaagcagcccggcgugccggugcgcuggaagcggugaggacuagucccuguucccagagcccacuuuuuuuucuuuuuuugaaauaaaauagccugucuuucagaucucaaaggcucuuuucagagccaccaaaaaaaaaaaaaaaaaaaaaaaaaaaaaaaaaaaaaaaaaaaaaaaaaaaaaaaaaaaaaaaaaaaaaaaaaaaaaaaaaaaaaaaaaaaaaaaaaaaaa

SEQ ID NO: 32126 - RNA, 1767 nt, Artificial Sequence
  mRNA product Design a-2 (hSL-A100) comprising derived and/or modified sequence from LASV(G502-SLE-2009;Clade IV)__AIT17126__GPCmut7 (opt1)
aggagaguccgcucagccagguugcagaagcggcuuagcguguguccuaaucuucucucugcguguagguaggccugugccgcaaacaagcuuaccaugggccagaucgugaccuucuuccaggaggucccccacgugaucgaggaggugaugaacaucguccugaucgcccucagcauccuggccgugcugaaggggcucuacaacuucgcgaccugcggccugguggggcugcucacguuccugcugcucugcggccgcuccugcaccaccgggcuguacaagggcgucuacgagcugcagacccucgagcugaacauggagacgcugaacaugaccaugccgcucagcugcaccaagaacaacucccaccacuacaucauggugggcaacgagaccgggcuggagcugacgcucaccaacaccagcaucaucaaccacaaguucugcaaccuguccgacgcccacaagaagaaccuguacgaccacgcccucaugagcaucaucuccaccuuccaccugagcauccccaacuucaaccaguacgaggccauguccugcgacuucaacggcgggaagaucagcgugcaguacaaccugucccacagcuacgccggcgacgcggccgaccacugcgggacggucgccaacggcgugcuccagaccuucaugcggauggccuggggcggguccuacaucgcgcuggacagcggccgcgggcggugggacugcaucaugaccuccuaccaguaccugaucauccagaacaccacgugggaggaccacugccaguucagccgccccucccccaucggcuaccucggccugcugagccagcggacccgcgacaucuacaucucccggcgccuccuggggaccuucaccuggacgcugagcgacagcgagggcaaggacacccccgggggcuacugccucacccgguggaugcugaucgaggccgagcugaagugcuucgggaacaccgccguggccaagugcaacgagaagcacgacgaggaguucugcgacaugcuccgccuguucgacuucaacaagcaggccauccagcggcugaaggcgcccgcccagauguccauccagcucaucaacaaggccgucaacgcccugaucaacgaccagcuggugaugaagaaccaccuccgcgacaucaugggcauccccuacugcaacuacagccgguacugcuaccugaaccacacgaccaccggccgcaccucccugcccaagugcugccucgugagcaacggguccuaccugaacgagacgcacuucagcgacgacaucgagcagcaggccgacaacaugaucaccgagaugcugcagaaggaguacauggagcggcagggcaagaccccgcucgggcuggucgaccuguucguguucuccaccagcuucuaccugaucuccaucuuccuccaccuggugaagaucccgacgcaccgccacaucgucggcaagagcugccccaagccccaccggcugaaccacauggggaucugcuccugcggccucuacaagcagcccggcgugccggugaaguggaagcgcugaggacuagucccuguucccagagcccacuuuuuuuucuuuuuuugaaauaaaauagccugucuuucagaucucaaaggcucuuuucagagccaccaaaaaaaaaaaaaaaaaaaaaaaaaaaaaaaaaaaaaaaaaaaaaaaaaaaaaaaaaaaaaaaaaaaaaaaaaaaaaaaaaaaaaaaaaaaaaaaaaaaaa

SEQ ID NO: 32127 - RNA, 1767 nt, Artificial Sequence
  mRNA product Design a-2 (hSL-A100) comprising derived and/or modified sequence from LASV(G733-SLE-2010;Clade IV)__AIT17154__GPCmut7 (opt1)
aggagaguccgcucagccagguugcagaagcggcuuagcguguguccuaaucuucucucugcguguagguaggccugugccgcaaacaagcuuaccaugggccagaucgugaccuucuuccaggaggucccccacgugaucgaggaggugaugaacaucguccugaucgcccucagcauccuggccgugcugaaggggcucuacaacuucgcgaccugcggcaucguggggcuggucuccuuccugcuccugugcggccgcagcugcacgaccucccuguacaaggggguguacgagcuccagacccuggagcugaacauggagacccucaacaugacgaugccgcugagcugcaccaagaacaacucccaccacuacaucauggugggcaacgagaccggccuggagcucacccugacgaacaccagcaucaucaaccacaaguucugcaaccuguccgacgcccacaagaagaaccucuacgaccacgcccugaugagcaucaucuccaccuuccaccugagcauccccaacuucaaccaguacgaggccauguccugcgacuucaacgggggcaagaucagcguccaguacaaccucucccacagcuacgccggggacgcggccaaccacugcggcaccaucgccaacggggugcugcagacguucaugcggauggccuggggcggcuccuacaucgcgcuggacagcgggcgcgaccggugggacugcaucaugaccuccuaccaguaccucaucauccagaacaccaccugggaggaccacugccaguucagccgccccucccccaucggcuaccuggggcugcucagccagcggacgcgcgacaucuacaucagccggcgccugcugggcaccuucaccuggacccucuccgacagcgagggcaaggacacgcccgggggcuacugccugacccgguggaugcugaucgaggccgagcucaagugcuucgggaacaccgccguggccaagugcaacgagaagcacgacgaggaguucugcgacaugcugcgccuguucgacuucaacaagcaggccauccagcggcucaaggcgcccgcccagauguccauccagcugaucaacaaggccgucaacgcccugaucaacgaccagcucaucaugaagaaccaccuccgcgacaucaugggcauccccuacugcaacuacagcaaguacugcuaccugaaccacaccacgaccgggaagaccucccugcccaagugcugccuggugagcaacggcuccuaccugaacgagacccacuucagcgacgacaucgagcagcaggccgacaacaugaucacggagaugcuccagaaggaguacauggagcggcagggcaagaccccgcuggggcugguggaccucuucgucuucuccaccagcuucuaccugaucuccaucuuccugcaccuggugaagaucccgacccaccgccacguggucggcaagagcugccccaagccccaccggcucaaccacauggggaucugcuccugcggccuguacgggcagcccggcgugccggugaaguggaagcgcugaggacuagucccuguucccagagcccacuuuuuuuucuuuuuuugaaauaaaauagccugucuuucagaucucaaaggcucuuuucagagccaccaaaaaaaaaaaaaaaaaaaaaaaaaaaaaaaaaaaaaaaaaaaaaaaaaaaaaaaaaaaaaaaaaaaaaaaaaaaaaaaaaaaaaaaaaaaaaaaaaaaaa

SEQ ID NO: 32128 - RNA, 1767 nt, Artificial Sequence
  mRNA product Design a-2 (hSL-A100) comprising derived and/or modified sequence from MOPV/LASV reassortant(IGS-1;Clade IV)__AFY05576__GPCmut7 (opt1)
aggagaguccgcucagccagguugcagaagcggcuuagcguguguccuaaucuucucucugcguguagguaggccugugccgcaaacaagcuuaccaugggccagaucgugaccuucuuccaggaggucccccacgugaucgaggaggugaugaacaucguccugaucgcccucagcgugcuggccgugcugaaggggcucuacaacuucgcgaccugcggccuggucgggcuggugacguuccuccugcugugcggccgcuccugcaccaccagccucuacaaggggguguacgagcugcagacccuggagcucaacauggagacgcugaacaugaccaugccgcuguccugcaccaagaacaacagccaccacuacaucauggucggcaacgagaccggccucgagcugacgcugaccaacaccuccaucaucaaccacaaguucugcaaccucagcgacgcccacaagaagaaccuguacgaccacgcccugauguccaucaucagcaccuuccaccucuccauccccaacuucaaccaguacgaggccaugagcugcgacuucaacgggggcaagaucuccgugcaguacaaccugagccacuccuacgccggggacgcggccaaccacugcggcacgguggccaacgggguccugcagaccuucaugcggauggccuggggcggcagcuacaucgcgcucgacuccgggcgcggcaacugggacugcaucaugaccagcuaccaguaccugaucauccagaacaccacgugggaggaccacugccaguucucccggcccagccccaucggguaccugggccuccugucccagcgcacccgggacaucuacaucagccgccggcugcucggcaccuucaccuggacgcugagcgacuccgagggggaggacaccccgggcggguacugccugacccgcuggaugcucaucgaggccgagcugaagugcuucggcaacaccgccguggccaagugcaacgagaagcacgacgaggaguucugcgacaugcugcggcuguucgacuucaacaagcaggccauccagcgccugaaggcgcccgcccagaugagcauccagcugaucaacaaggccgugaacgcccucaucaacgaccagcugaucaugaagaaccaccuccgggacaucauggggauccccuacugcaacuacuccaaguacugcuaccucaaccacacgaccaccggccgcaccagccugcccaagugcugccuggucuccaacggcagcuaccucaacgagacgcacuucuccgacgacaucgagcagcaggccgacaacaugaucaccgagaugcugcagaaggaguacauggagcggcaggggaagacgccccugggccucguggaccuguucguguucagcaccuccuucuaccugaucagcaucuuccugcaccucgucaagaucccgacccaccgccacaucguggggaaguccugccccaagccccaccggcugaaccacaugggcaucugcagcugcgggcuguacaagcagcccggcgugccggucaaguggaagcgcugaggacuagucccuguucccagagcccacuuuuuuuucuuuuuuugaaauaaaauagccugucuuucagaucucaaaggcucuuuucagagccaccaaaaaaaaaaaaaaaaaaaaaaaaaaaaaaaaaaaaaaaaaaaaaaaaaaaaaaaaaaaaaaaaaaaaaaaaaaaaaaaaaaaaaaaaaaaaaaaaaaaaa

SEQ ID NO: 32129 - RNA, 1767 nt, Artificial Sequence
  mRNA product Design a-2 (hSL-A100) comprising derived and/or modified sequence from LASV(LM765-SLE-2012;Clade IV)__AIT17814__GPCmut7 (opt1)
aggagaguccgcucagccagguugcagaagcggcuuagcguguguccuaaucuucucucugcguguagguaggccugugccgcaaacaagcuuaccaugggccagaucgugaccuucuuccaggaggucccccacgugaucgaggaggugaugaacaucguccugaucgcccucagcauccuggccgugcugaaggggcucuacaacuucgcgaccugcggccugguggggcuggucacguuccuccugcugugcggccgcuccugcaccaccagccucuacaaggggguguacgagcugcagacccuggagcucaacauggagacgcugaacaugaccaugccgcuguccugcaccaagaacaacagccaccacuacaucauggugggcaacgagaccggccucgagcugacgcugaccaacaccuccaucaucgaccacaaguucugcaaccucagcgacgcccaccggaagaaccuguacgaccacgcccugauguccaucaucagcaccuuccaccucuccauccccaacuucaaccaguacgaggccaugagcugcgacuucaacgggggcaagaucuccguccaguacaaccugagccacuccuacgccaaggacgcggccgaccacugcgggacgguggccaacggcgugcugcagaccuucaugcgcauggccuggggcgggagcuacaucgcgcucgacuccggccgggggcgcugggacugcaucaugaccagcuaccaguaccugaucauccagaacaccacgugggaggaccacugccaguucucccggcccagccccaucggcuaccuggggcuccugucccagcgcacccgggacaucuacaucagccgccggcugcucggcaccuucaccuggacgcugagcgacuccgagggcaaggacacccccgggggcuacugccugacccgcuggaugcucaucgaggccgagcugaagugcuucgggaacaccgccgucgccaagugcaacgagaagcacgacgaggaguucugcgacaugcugcggcuguucgacuucaacaagcaggccauccagcgccugaaggcgcccgcccagaugagcauccagcugaucaacaaggccgugaacgcccucaucaacgaccagcugaucaugaagaaccaccuccgggacaucaugggcauccccuacugcaacuacuccaaguacugcuaccucaaccacacgaccaccgggaagaccagccugcccaagugcugccugguguccaacggcagcuaccucaacgagacgcacuucuccgacgacaucgagcagcaggccgacaacaugaucaccgagaugcugcagaaggaguacauggagcgccagggcaagaccccgcuggggcucgucgaccuguucguguucagcaccuccuucuaccugaucagcaucuuccugcaccucgugaagaucccgacgcaccggcacaucgucggcaagcccugccccaagccccaccgccugaaccacauggggaucugcuccugcggccuguacaagcagccgggggugcccgugaaguggaagcggugaggacuagucccuguucccagagcccacuuuuuuuucuuuuuuugaaauaaaauagccugucuuucagaucucaaaggcucuuuucagagccaccaaaaaaaaaaaaaaaaaaaaaaaaaaaaaaaaaaaaaaaaaaaaaaaaaaaaaaaaaaaaaaaaaaaaaaaaaaaaaaaaaaaaaaaaaaaaaaaaaaaaa

SEQ ID NO: 32130 - RNA, 1767 nt, Artificial Sequence
  mRNA product Design a-2 (hSL-A100) comprising derived and/or modified sequence from LASV(LM776-SLE-2012;Clade IV)__AIT17824__GPCmut7 (opt1)
aggagaguccgcucagccagguugcagaagcggcuuagcguguguccuaaucuucucucugcguguagguaggccugugccgcaaacaagcuuaccaugggccagaucgugaccuucuuccaggaggucccccacgugaucgaggaggugaugaacaucguccugaucgcccucagcauccuggccgugcugaaggggcucuacaacuucgcgaccugcggccugguggggcuggucacguuccuccugcugugcggccgcuccugcaccaccagcguguacaaggggguguacgagcuccagacccuggagcugaacauggagacgcucaacaugaccaugccgcuguccugcaccaagaacaacagccaccacuacaucauggucggcaacgagaccggccuggagcucacgcugaccaacaccuccaucaucaaccacaaguucugcaaccugagcgacgcccacaagaagaaccucuacgaccacgcccugauguccaucaucagcaccuuccaccuguccauccccaacuucaaccaguacgaggccaugagcugcgacuucaacgggggcaagaucuccgugcaguacaaccucagccacuccuacgccggggacgcggccaaccacugcggcacgguggccaacgggguccugcagaccuucaugcggauggccuggggcggcagcuacaucgcgcuggacuccgggcacggcaagugggacugcaucaugaccagcuaccaguaccucaucauccagaacaccacgugggaggaccacugccaguucucccgccccagccccaucggguaccugggccugcucucccagcggacccgcgacaucuacaucagccggcgccugcugggcaccuucaccuggacgcucagcgacuccgaggggaaggacaccccgggcggguacugccugacccgguggaugcugaucgaggccgagcucaagugcuucggcaacaccgccguggccaagugcaacgagaagcacgacgaggaguucugcgacaugcugcgccuguucgacuucaacaagcaggccauccagcggcucaaggcgcccgcccagaugagcauccagcugaucaacaaggccgugaacgcccugaucaacgaccagcucaucaugaagaaccaccuccgcgacaucauggggauccccuacugcaacuacuccaaguacugcuaccugaaccacacgaccaccggcaagaccagccugcccaagugcugccuggucuccaacggcagcuaccugaacgagacgcacuucuccgacgacaucgagcagcaggccgacaacaugaucaccgagaugcuccagaaggaguacauggagcggcaggggaagacgccccugggccugguggaccucuucguguucagcaccuccuucuaccugaucagcaucuuccugcaccuggucaagaucccgacccaccgccacaucguggggaaguccugccccaagccccaccggcucaaccacaugggcaucugcagcugcgggcuguacaagcagcccggcgugccgguccgcuggaagcggugaggacuagucccuguucccagagcccacuuuuuuuucuuuuuuugaaauaaaauagccugucuuucagaucucaaaggcucuuuucagagccaccaaaaaaaaaaaaaaaaaaaaaaaaaaaaaaaaaaaaaaaaaaaaaaaaaaaaaaaaaaaaaaaaaaaaaaaaaaaaaaaaaaaaaaaaaaaaaaaaaaaaa

SEQ ID NO: 32131 - RNA, 1767 nt, Artificial Sequence
  mRNA product Design a-2 (hSL-A100) comprising derived and/or modified sequence from LASV(Mad39;Clade IV)__ANH09722__GPCmut7 (opt1)
aggagaguccgcucagccagguugcagaagcggcuuagcguguguccuaaucuucucucugcguguagguaggccugugccgcaaacaagcuuaccaugggccagaucgugaccuucuuccaggaggucccccacgugaucgaggaggugaugaacaucguccugaucgcccucagcauccuggccgugcugaaggggcucuacaacguggcgaccugcggccugaucgggcuggucacguuccuccugcugugcggccgcuccugcaccaccacccucuacaaggggguguacgagcugcaggcccuggagcucaacauggagacgcugaacaugaccaugccgcugagcugcaccaagaacaacucccaccacuacauccgggugggcaacgagaccggccucgagcugacgcugaccaacaccagccucaucaaccacaaguucugcaaccuguccgacgcccacaagaagaaccuguacgaccacgcccucaugagcaucaucuccaccuuccaccugagcauccccaacuucaaccaguacgaggccauguccugcgacuucaacgacgggaagaucagcguccaguacaaccugucccacacguacgcgggcgacaccgccaaccacugcgggaccguggccaacggcgugcuccagaccuucaugcgcauggccuggggcgggagcuacaucgcgcuggacuccggccgcgggggcugggacugcaucaugacgagcuaccaguaccugaucauccagaacaccaccugggaggaccacugccaguucucccggcccagccccaucggguaccucggccugcugucccagcggacccgcgacaucuacaucagccggcgccuccugggcacguucaccuggacccuguccgacagcgaggggaaggacaccccgggcggguacugccucacgcgguggaugcugaucgaggccgagcugaagugcuucggcaacaccgccgucgccaagugcaacgagaagcacgacgaggaguucugcgacaugcuccgccuguucgacuucaacaagcaggccauccagcggcugaaggcgcccgcccagaugagcauccagcucaucaacaaggccgugaacgcccugaucaacgaccagcugaucaugaagaaccaccuccgcgacaucauggggauccccuacugcaacuacuccaaguacugcuaccugaaccacaccgugaccggcaagacgagccugcccaagugcugccucgucuccaacggcagcuaccugaacgagacccacuucuccgacgacaucgagcagcaggccgacaacaugaucaccgagaugcugcagaaggaguacauggagcggcaggggaagacgccccucggccugguggaccuguucguguucagcaccuccuucuaccugaucagcaucuuccuccaccuggucaagaucccgacccaccgccacgugguggggaagcccugccccaagccccaccggcugaaccacaugggcaucugcuccugcggguucuacaagcagccgggcguccccgugcgcuggaagcggugaggacuagucccuguucccagagcccacuuuuuuuucuuuuuuugaaauaaaauagccugucuuucagaucucaaaggcucuuuucagagccaccaaaaaaaaaaaaaaaaaaaaaaaaaaaaaaaaaaaaaaaaaaaaaaaaaaaaaaaaaaaaaaaaaaaaaaaaaaaaaaaaaaaaaaaaaaaaaaaaaaaaa

SEQ ID NO: 32132 - RNA, 1767 nt, Artificial Sequence
  mRNA product Design a-2 (hSL-A100) comprising derived and/or modified sequence from LASV(Z0947-SLE-2011;Clade IV)__AIT17840__GPCmut7 (opt1)
aggagaguccgcucagccagguugcagaagcggcuuagcguguguccuaaucuucucucugcguguagguaggccugugccgcaaacaagcuuaccaugggccagaucgugaccuucuuccaggaggucccccacgugaucgaggaggugaugaacaucguccugaucgcccucagcauccuggccgugcugaaggggcucuacaacuucgcgaccugcggccugguggggcuggucacguuccuccugcugugcggccgcuccugcaccaucagccucuacaaggggguguacgagcugcagacccuggagcucaacauggagacccugaacaugacgaugccgcuguccugcaccaagaacaacagccaccacuacaucauggugggcaacgagaccggccucgagcugacccugacgaacaccuccaucaucaaccacaaguucugcaaccucagcgacgcccacaagaagaaccuguacgaccacgcccugauguccaucaucagcaccuuccaccucuccauccccaacuucaaccaguacgaggccaugagcugcgacuucaacgggggcaagaucuccguccaguacaaccugagccacuccuacgccggggacgcggccaaccacugcggcaccguggccaacggggugcugcagacguucaugcggauggccuggggcggcagcuacaucgcgcucgacuccgggcgcgaccggugggacugcaucaugaccagcuaccaguaccugaucauccagaacaccaccugggaggaccacugccaguucucccgccccagccccaucggcuaccuggggcuccugucccagcggacgcgcgacaucuacaucagccggcgccugcucggcaccuucaccuggacccugagcgacuccgagggcaaggacacgcccgggggcuacugccugacccgguggaugcucaucgaggccgagcugaagugcuucgggaacaccgccgucgccaagugcaacgagaagcacgacgaggaguucugcgacaugcugcgccucuucgacuucaacaagcaggccauccagcggcugaaggcgcccgcccagaugagcauccagcugaucaacaaggccgugaacgcccucaucaacgaccagcugaucaugaagaaccaccuccgcgacaucaugggcauccccuacugcaacuacuccaaguacugcuaccugaaccacaccacgaccgggaagaccagccugcccaagugcugccugguguccaacggcagcuaccucaacgagacccacuucuccgacgacaucgagcagcaggccgacaacaugaucacggagaugcugcagaaggaguacauggagcggcagggcaagaccccgcuggggcucgucgaccuguucguguucagcaccuccuucuaccugaucagcaucuuccugcaccucgugaagaucccgacccaccgccacaucgucggcaagcccugccccaagccccaccggcugaaccacauggggaucugcuccugcggccuguacaagcagccgggggugcccgugaaguggaagcgcugaggacuagucccuguucccagagcccacuuuuuuuucuuuuuuugaaauaaaauagccugucuuucagaucucaaaggcucuuuucagagccaccaaaaaaaaaaaaaaaaaaaaaaaaaaaaaaaaaaaaaaaaaaaaaaaaaaaaaaaaaaaaaaaaaaaaaaaaaaaaaaaaaaaaaaaaaaaaaaaaaaaaa

SEQ ID NO: 32133 - RNA, 1767 nt, Artificial Sequence
  mRNA product Design a-2 (hSL-A100) comprising derived and/or modified sequence from LASV(Josiah;Clade IV)__NP_694870__GPCmut7 (opt1)
aggagaguccgcucagccagguugcagaagcggcuuagcguguguccuaaucuucucucugcguguagguaggccugugccgcaaacaagcuuaccaugggccagaucgugaccuucuuccaggaggucccccacgugaucgaggaggugaugaacaucguccugaucgcccucagcgugcuggccgugcugaaggggcucuacaacuucgcgaccugcggccuggucgggcuggugacguuccuccugcugugcggccgcuccugcaccaccagccucuacaaggggguguacgagcugcagacccuggagcucaacauggagacgcugaacaugaccaugccgcuguccugcaccaagaacaacagccaccacuacaucauggucggcaacgagaccggccucgagcugacgcugaccaacaccuccaucaucaaccacaaguucugcaaccucagcgacgcccacaagaagaaccuguacgaccacgcccugauguccaucaucagcaccuuccaccucuccauccccaacuucaaccaguacgaggccaugagcugcgacuucaacgggggcaagaucuccgugcaguacaaccugagccacuccuacgccggggacgcggccaaccacugcggcacgguggccaacgggguccugcagaccuucaugcggauggccuggggcggcagcuacaucgcgcucgacuccgggcgcggcaacugggacugcaucaugaccagcuaccaguaccugaucauccagaacaccacgugggaggaccacugccaguucucccggcccagccccaucggguaccugggccuccugucccagcgcacccgggacaucuacaucagccgccggcugcucggcaccuucaccuggacgcugagcgacuccgaggggaaggacaccccgggcggguacugccugacccgcuggaugcucaucgaggccgagcugaagugcuucggcaacaccgccguggccaagugcaacgagaagcacgacgaggaguucugcgacaugcugcggcuguucgacuucaacaagcaggccauccagcgccugaaggcgcccgcccagaugagcauccagcugaucaacaaggccgugaacgcccucaucaacgaccagcugaucaugaagaaccaccuccgggacaucauggggauccccuacugcaacuacuccaaguacugcuaccucaaccacacgaccaccggccgcaccagccugcccaagugcugccuggucuccaacggcagcuaccucaacgagacgcacuucuccgacgacaucgagcagcaggccgacaacaugaucaccgagaugcugcagaaggaguacauggagcggcaggggaagaccccgcugggccugguggaccucuucguguucagcaccuccuucuaccugaucagcaucuuccugcaccucgucaagauccccacgcaccgccacaucguggggaaguccugccccaagccccaccggcugaaccacaugggcaucugcagcugcgggcuguacaagcagccgggcgugcccgucaaguggaagcgcugaggacuagucccuguucccagagcccacuuuuuuuucuuuuuuugaaauaaaauagccugucuuucagaucucaaaggcucuuuucagagccaccaaaaaaaaaaaaaaaaaaaaaaaaaaaaaaaaaaaaaaaaaaaaaaaaaaaaaaaaaaaaaaaaaaaaaaaaaaaaaaaaaaaaaaaaaaaaaaaaaaaaa

SEQ ID NO: 32134 - RNA, 1764 nt, Artificial Sequence
  mRNA product Design a-2 (hSL-A100) comprising derived and/or modified sequence from LASV(LP;Clade I)__AAF86701__GPCmut7 (opt1)
aggagaguccgcucagccagguugcagaagcggcuuagcguguguccuaaucuucucucugcguguagguaggccugugccgcaaacaagcuuaccaugggccagaucaucaccuucuuccaggaggugccccacgucaucgaggaggugaugaacaucgugcugaucgcccucagccugcuggccauccucaaggggcuguacaacaucgcgaccugcggcaucaucgggcuggucgccuuccucuuccugugcggcaaguccugcagccugacgcucaagggcggguacgagcugcagacccuggagcucaacauggagacccugaacaugaccaugccgcuguccugcacgaagaacagcucccaccacuacauccgcgugggcaacgagaccgggcucgagcugacccugaccaacacgagcaucaucaaccacaaguucugcaaccucuccgacgcccacaagaagaaccuguacgaccacgcccugaugagcaucaucuccaccuuccaccucagcauccccaacuucaaccaguacgaggccauguccugcgacuucaacggcgggaagaucagcgugcaguacaaccugucccacagcuacgcgggcgacgccgccgagcacugcgggaccgucgccaacggcgugcugcagaccuucaugcggauggcguggggcgggcgcuacaucgcccucgacuccggcaaggggaacugggacugcaucaugacgagcuaccaguaccugaucauccagaacaccaccugggaggaccacugccaguucucccggcccagccccaucggcuaccugggccuccugucccagcgcacccgggacaucuacaucagccgccggcugcucgggacguucaccuggacccugagcgacuccgagggcaacgagacccccgggggcuacugccugacgcgcuggaugcucaucgaggccgagcugaagugcuucgggaacaccgccguggccaagugcaacgagaagcacgacgaggaguucugcgacaugcugcggcuguucgacuucaacaagcaggcgauccgccggcugaaggccccggcccagaugagcauccagcugaucaacaaggccgucaacgcccucaucaacgaccagcugaucaugaagaaccaccuccgcgacaucaugggcauccccuacugcaacuacuccaaguacugcuaccucaaccacaccagcuccggccggaccagccugcccaagugcugccugaucuccaacgggagcuaccucaacgagacgcaguucuccgacgacaucgagcagcaggcggacaacaugaucaccgagaugcugcagaaggaguacaucgagcgccagggcaagaccccgcuggggcugguggacaucuucaucuucagcaccuccuucuaccucaucagcaucuuccugcaccugaucaagauccccacgcaccggcacaucgugggcaagcccugccccaagccgcaccgccucaaccacaugggggucugcuccugcggccuguacaagcaccccggcgugcccaccaaguggaagcggugaggacuagucccuguucccagagcccacuuuuuuuucuuuuuuugaaauaaaauagccugucuuucagaucucaaaggcucuuuucagagccaccaaaaaaaaaaaaaaaaaaaaaaaaaaaaaaaaaaaaaaaaaaaaaaaaaaaaaaaaaaaaaaaaaaaaaaaaaaaaaaaaaaaaaaaaaaaaaaaaaaaaa

SEQ ID NO: 32135 - RNA, 1764 nt, Artificial Sequence
  mRNA product Design a-2 (hSL-A100) comprising derived and/or modified sequence from LASV(803213;Clade II)__AAF86703__GPCmut7 (opt1)
aggagaguccgcucagccagguugcagaagcggcuuagcguguguccuaaucuucucucugcguguagguaggccugugccgcaaacaagcuuaccaugggccagaucaucaccuucuuccaggaggugccccacgucaucgaggaggugaugaacaucgugcugaucgcccucagccugcuggccauccucaaggggaucuacaacgucgcgaccugcggccuguucgggcugaucuccuuccuccugcugugcggccgcagcugcuccgugacguacaaggggguguacgagcuccagacccuggagcugaacauggccaaccucaacaugaccaugccgcugagcugcaccaagaacaacucccaccacuacaucauggucggcaacgagacgggccuggagcucacccugaccaacaccagcaucaucaaccacaaguucugcaaccuguccgacgcccacaagaagaaccucuacgaccacgcccugaugagcaucaucuccacguuccaccugagcauccccaacuucaaccaguacgaggccauguccugcgacuucaacgggggcaagaucagcgugcaguacaaccucucccacagcuucgcgguggacgccgccaaccacugcgggaccaucgccaacggcguccugcagaccuucaugcggauggcguggggcggguccuacaucgcccuggacagcggcaaggggaacugggacugcaucaugaccuccuaccaguaccucaucauccagaacacgaccugggaggaccacugccaguucagccgccccucccccaucggcuaccuggggcugcucagccagcggacccgcgacaucuacaucagccggcgccugcugggcaccuucacguggacccucuccgacagcgagggcaacgaggcccccgggggcuacugccugacccgguggaugcugaucgaggccgagcucaagugcuucgggaacaccgccguggcgaagugcaacgagaagcacgacgaggaguucugcgacaugcugcgccuguucgacuucaacaagcaggccaucaagcggcucaagacgccggcccagauguccauccagcugaucaacaaggccgugaacgcccugaucaacgaccagcucaucaugaagaaccaccuccgcgacaucaugggcauccccuacugcaacuacagccgguacugcuaccugaaccacaccgucaccgggaagaccucccugccccgcugcugccuggugagcaacggcuccuaccugaacgagacgcacuucagcgacgacaucgagcagcaggcggacaacaugaucaccgagaugcuccagaaggaguacauggaccggcagggcaagaccccgcuggggcugguggaccuguucgucuucuccaccagcuucuaccucaucuccaucuuccugcaccuggugaagauccccacgcaccgccacaucgugggcaagcccugccccaagccgcaccggcucaaccacauggggaucugcagcugcggccuguacaagcaccccgggguccccgugaaguggaagcgcugaggacuagucccuguucccagagcccacuuuuuuuucuuuuuuugaaauaaaauagccugucuuucagaucucaaaggcucuuuucagagccaccaaaaaaaaaaaaaaaaaaaaaaaaaaaaaaaaaaaaaaaaaaaaaaaaaaaaaaaaaaaaaaaaaaaaaaaaaaaaaaaaaaaaaaaaaaaaaaaaaaaaa

SEQ ID NO: 32136 - RNA, 1764 nt, Artificial Sequence
  mRNA product Design a-2 (hSL-A100) comprising derived and/or modified sequence from LASV(GA391;Clade III)__CAA36645__GPCmut7 (opt1)
aggagaguccgcucagccagguugcagaagcggcuuagcguguguccuaaucuucucucugcguguagguaggccugugccgcaaacaagcuuaccaugggccagaucgugaccuucuuccaggaggucccccacgugaucgaggaggugaugaacaucguccugaucgcccucagcauccuggccauccugaaggggcucuacaacguggcgaccugcggccugaucgggcuggugacguuccuccugcuguccggccgcagcugcucccucaucuacaaggggaccuacgagcugcagacccuggagcucaacauggagacccugaacaugacgaugccgcugagcugcaccaagaacaacucccaccacuacauccgggucggcaacgagaccggccucgagcugacccugacgaacaccagcauccucaaccacaaguucugcaaccuguccgacgcccacaagcgcaaccuguacgaccacagccucauguccaucaucagcaccuuccaccuguccauccccaacuucaaccaguacgaggccaugagcugcgacuucaacgggggcaagaucaccgugcaguacaaccugucccacagcuucgccguggacgccgcggggcacugcggcacgcucgccaacgggguccugcagaccuucaugcggauggccuggggcggcuccuacaucgcccuggacagcgggcgcggcaacugggacugcaucaugaccuccuaccaguaccucaucauccagaacaccacgugggacgaccacugccaguucagccggcccucccccaucggguaccugggccugcucagccagcgcacccgggacaucuacaucagccgccggcugcugggcaccuucaccuggacgcucuccgacagcgaggggaacgagaccccgggcggguacugccugacccgcuggaugcugaucgaggcggagcucaagugcuucggcaacaccgccguggccaagugcaacgagaagcacgacgaggaguucugcgacaugcugcggcuguucgacuucaacaagcaggccauccgccggcucaagacgcccgcccagauguccauccagcugaucaacaaggcggugaacgcccugaucaacgaccagcucaucaugaagaaccaccuccgcgacaucauggggauccccuacugcaacuacagccgguacugcuaccugaaccacaccuccaccggcaagaccagccugccccgcugcugccugaucuccaacggcagcuaccugaacgagacgaaguucuccgacgacaucgagcagcaggccgacaacaugaucaccgagaugcugcagaaggaguacaucgaccggcaggggaagaccccgcucggccuggucgaccuguucguguucagcaccuccuucuaccucaucagcaucuuccugcaccuggugaagauccccacgcaccgccacaucgucgggaagcccugccccaagccgcaccggcucaaccacaugggcaucugcuccugcgggcuguacaagcagcccggcgugcccgugcgcuggaagcggugaggacuagucccuguucccagagcccacuuuuuuuucuuuuuuugaaauaaaauagccugucuuucagaucucaaaggcucuuuucagagccaccaaaaaaaaaaaaaaaaaaaaaaaaaaaaaaaaaaaaaaaaaaaaaaaaaaaaaaaaaaaaaaaaaaaaaaaaaaaaaaaaaaaaaaaaaaaaaaaaaaaaa

SEQ ID NO: 32137 - RNA, 1767 nt, Artificial Sequence
  mRNA product Design a-2 (hSL-A100) comprising derived and/or modified sequence from LASV(AV;Clade V)__CCA30314__GPCmut7 (opt1)
aggagaguccgcucagccagguugcagaagcggcuuagcguguguccuaaucuucucucugcguguagguaggccugugccgcaaacaagcuuaccaugggccagaucgugaccuucuuccaggaggucccccacgugaucgaggaggugaugaacaucguccugaucgcccucagcauccuggccgugcugaaggggcucuacaacaucgcgaccugcggccugaucgggcugaucacguuccuccugcugugcggccgcuccugcagcuccaaccucuacaaggggguguacgagcugcagagccuggaccucaacauggagacccugaacaugaccaugccgcuguccugcaccaagaacaacagccaccacuacauccgggucggcaacgacacgggccucgagcugacccugaccaacaccuccauccucaaccacaaguucugcaaccugagcgacgcccacaagaaggaccuguacgaccacgcccucauguccaucaucagcacguuccaccuguccauccccaacuucaaccaguacgaggccaugagcugcgacuucaacgggggcaagaucuccgugcaguacaaccugagccacuccuacgccaucgacgcggccaaccacugcgggaccguggccaacggcauccuccagaccuucaugcgcauggccuggggcgggagcuacaucgcgcuggacuccggccgggggaacugggacugcaucaugaccagcuaccaguaccugaucauccagaacacgaccugggagaaccacugccaguucucccgccccagccccaucggcuaccucgggcugcugagccagcggacccgcgacaucuacaucucccggcgccuccugggcaccuucacguggacccugagcgacuccgagggcaacgccacccccgggggcuacugccucacccgguggaugcugaucgaggccgagcugaagugcuucgggaacacggccgucgccaagugcaacgagaagcacgacgaggaguucugcgacaugcuccgccuguucgacuucaacaagcaggcgaucagccggcugaaguccccggcccagaugagcauccagcucaucaacaaggccgugaacgcccugaucaacgaccagcugaucaugaagaaccaccuccgcgacaucaugggcauccccuacugcaacuacuccaaguacugcuaccugaaccacaccaucaccgggaagaccagccugcccaagugcugccucguguccaacggcagcuaccugaacgagacgcacuucuccgacgacaucgagcagcaggccgacaacaugaucaccgagaugcugcagaaggaguacauggagcggcagggcaagaccccgcuggggcucgucgaccuguucguguucagcaccuccuucuaccugaucagcaucuuccuccgccuggugaagauccccacgcaccggcacaucgucggcaagcccugccccaagccgcaccgccugaaccacauggggaucugcuccugcggccucuacaagcagcccggggugcccgugcgguggaagcgcugaggacuagucccuguucccagagcccacuuuuuuuucuuuuuuugaaauaaaauagccugucuuucagaucucaaaggcucuuuucagagccaccaaaaaaaaaaaaaaaaaaaaaaaaaaaaaaaaaaaaaaaaaaaaaaaaaaaaaaaaaaaaaaaaaaaaaaaaaaaaaaaaaaaaaaaaaaaaaaaaaaaaa

SEQ ID NO: 32138 - RNA, 1764 nt, Artificial Sequence
  mRNA product Design a-2 (hSL-A100) comprising derived and/or modified sequence from LASV(Togo/2016/7082;Clade VI)__AMR44577__GPCmut7 (opt1)
aggagaguccgcucagccagguugcagaagcggcuuagcguguguccuaaucuucucucugcguguagguaggccugugccgcaaacaagcuuaccaugggccagaucaucaccuucuuccaggaggugccccacgucaucgaggaggugaugaacaucgugcugaucgcccucagccugcuggccauccucaagggggucuacaacguggcgaccugcggcaucaucgggcuggugacguuccuguuccucugcggccgcuccugcagccugaucuacaagggguccuacgagcugcagacccucgagcugaacauggagacccugaacaugaccaugccgcucagcugcacgaagaacuccagccaccacuacauccgggucggcaacgagaccggccuggagcugacccucaccaacacguccaucaucaaccacaaguucugcaaccugagcgacgcccacaagcgcaaccuguacgaccacgcccucauguccauccugagcaccuuccaccuguccauccccaacuucaaccaguacgaggccaugagcugcgacuucaacgggggcaagaucuccgugcaguacaaccucagccacgccuacgcgguggacgccgccgagcacugcgggaccgucgccaacggcgugcugcagaccuucaugcggauggcguggggcggguccuacaucgcccuggacagcggccgcgggaacugggacugcaucaugacguccuaccaguaccucaucauccagaacaccaccugggaggaccacugccaguucagccggcccucccccaucggcuaccuggggcugcucagccagcgcacccgggacaucuacaucagccgccggcugcugggcacguucaccuggacccucuccgacagcgagggcaacgagacccccgggggcuacugccugacgcgcuggaugcugaucgaggccgagcucaagugcuucgggaacaccgccguggccaagugcaacgagaagcacgacgaggaguucugcgacaugcugcggcuguucgacuucaacaagcaggcgauccagcgccucaaguccccggcccagaugagcauccagcugaucaacaaggccgucaacgcccugaucaacgaccagcucaucaugaagaaccaccuccgggacaugaugggcauccccuacugcaacuacuccaaguacugcuaccugaaccacaccagcuccgggcgcaccagccugcccaagugcugccugguguccaacggcagcuaccugaacgagacgcacuucuccgacgacaucgagcagcaggccgacaacaugaucaccgagaugcuccagaaggaguacaucgaccggcagggcaagaccccgcuggggcugguggaccuguucgucuucagcaccuccuucuaccucaucagcaucuuccugcaccugaucaagauccccacgcaccgccacaucgugggcaagcccugccccaagccgcaccggcucaaccacauggggaucugcuccugcggccuguacaagcagcccggggugcccacccgcuggaagcggugaggacuagucccuguucccagagcccacuuuuuuuucuuuuuuugaaauaaaauagccugucuuucagaucucaaaggcucuuuucagagccaccaaaaaaaaaaaaaaaaaaaaaaaaaaaaaaaaaaaaaaaaaaaaaaaaaaaaaaaaaaaaaaaaaaaaaaaaaaaaaaaaaaaaaaaaaaaaaaaaaaaaa

SEQ ID NO: 32139 - RNA, 1764 nt, Artificial Sequence
  mRNA product Design a-2 (hSL-A100) comprising derived and/or modified sequence from LASV(KAK-428;Clade n.d. (VII))__ANH09740__GPCmut7 (opt1)
aggagaguccgcucagccagguugcagaagcggcuuagcguguguccuaaucuucucucugcguguagguaggccugugccgcaaacaagcuuaccaugggccagaucgugaccuucuuccaggaggucccccacgugaucgaggaggugaugaacaucguccugaucgcccucagccugcuggccauccucaaggggcuguacaacuucgcgaccugcggcgugaucgggcugaucacguuccuccugcugugcggccgcuccugcagcgccaccuacaaggggcaguacgagcuccagacccuggagcugaacauggagucccucaacaugaccaugccgcugagcugcacgaagaacaacucccaccacuacauccgggccggcaacaacaccggccuggagcucacccugaccaacacgagcaucaucucccacaaguucugcaaccugagcgacgcccacaagaagaaccucuacgaccacacccugauguccaucaucaccaccuuccaccugagcauccccaacuucaaccaguacgaggccauguccugcgacuucaacgggggcaagaucagcauccaguacaaccucucccacagcuacgcgggggacgccgcccagcacugcggcacgguggccaacgggguccugcagaccuucaugcgcauggcguggggcggcuccuaccuggcccucgacagcgggcggcgcggcugggacugcaucaucuccagcuaccaguaccugaucauccagaacaccaccugggacgaccacugccaguucucccggcccagccccaucggguaccugggcuucgugagccagaagacgcgcgacaucuacaucucccggcgccuccugggcaccuucaccuggacccugagcgacuccgaggggcacgacaugccgggcggguacugccucacgcgguggaugcugaucgaggccgaccugaagugcuucggcaacaccgccguggccaagugcaacgagaagcacgacgaggaguucugcgacauguggcgccucuucgacuucaacaagcaggcgauccagcggcugaaggcccccgcccagaugaacauccagcugaucaacaaggccgucaacgcccucaucaacgaccagcugaugaugaagaaccaccuccgcgacaucauggggauccccuacugcaacuacagcaaguucugcuaccugaacaacaccaccacgggccggaccucccugccccgcugcugccugaucagcaacggcuccuaccucaacgagacccacuucagcgacgacaucgagcagcaggcggacaacaugaucaccgagaugcugcagaaggaguacauggaccggcaggggaagacgccgcugggccucguggaccuguucguguucuccaccagcuucuaccugaucaccaucuuccugcaccucgucaagauccccacccaccgccacaucguggggaagcccugccccaagccgcaccggcugaaccacaugggcaucugcuccugcgggcuguacaagcagcccggcgugcccguccgcuggaagcggugaggacuagucccuguucccagagcccacuuuuuuuucuuuuuuugaaauaaaauagccugucuuucagaucucaaaggcucuuuucagagccaccaaaaaaaaaaaaaaaaaaaaaaaaaaaaaaaaaaaaaaaaaaaaaaaaaaaaaaaaaaaaaaaaaaaaaaaaaaaaaaaaaaaaaaaaaaaaaaaaaaaaa

SEQ ID NO: 32140 - RNA, 1764 nt, Artificial Sequence; identical to SEQ ID NO: 32134
  mRNA product Design a-2 (hSL-A100) comprising derived and/or modified sequence from LASV(Pinneo-NIG-1969;Clade I)__AIT17836__GPCmut7 (opt1)

SEQ ID NO: 32141 - RNA, 1764 nt, Artificial Sequence
  mRNA product Design a-2 (hSL-A100) comprising derived and/or modified sequence from LASV(ISTH0009-NIG-2011;Clade II)__AIT17404__GPCmut7 (opt1)
aggagaguccgcucagccagguugcagaagcggcuuagcguguguccuaaucuucucucugcguguagguaggccugugccgcaaacaagcuuaccaugggccagaucaucaccuucuuccaggaggugccccacgucaucgaggaggugaugaacaucgugcugaucgcccucagccugcuggccauccucaaggggaucuacaacgucgcgaccugcggccuguucgggcugguguccuuccuccugcugugcggccgcagcugcuccacgaccuacaaggggguguacgagcuccagacccuggagcuggacauggccagccucaacaugaccaugccgcuguccugcacgaagaacaacagccaccacuacaucauggucggcaacgagaccggccuggagcucacccugaccaacacguccaucaucaaccacaaguucugcaaccugagcgacgcccacaagaagaaccucuacgaccacgcccugauguccaucaucagcaccuuccaccuguccauccccaacuucaaccaguacgaggccaugagcugcgacuucaacgggggcaagaucuccgugcaguacaaccucagccacgcguacgccguggacgccgccaaccacugcgggaccaucgcgaacggcguccugcagaccuucaugcggauggccuggggcggguccuacaucgcccuggacagcggcaagggguccugggacugcaucaugacgagcuaccaguaccucaucauccagaacaccaccugggaggaccacugccaguucucccgccccagccccaucggcuaccuggggcugcucagccagcggacccgcgacaucuacaucucccggcgccugcugggcacguucaccuggacccucagcgacuccgagggcaacgagacccccgggggcuacugccugacgcgguggaugcugaucgaggccgagcucaagugcuucgggaacaccgccguggcgaagugcaacgagaagcacgacgaggaguucugcgacaugcugcgccuguucgacuucaacaagcaggccauccggcgccucaagaccccggcccagaugagcauccagcugaucaacaaggccgugaacgcccugaucaacgaccagcucaucaugaagaaccaccuccgggacaucaugggcauccccuacugcaacuacuccaaguacugcuaccugaaccacaccgucacggggaagaccagccugccccgcugcugccugguguccaacggcagcuaccugaacgagacccacuucuccgacgacaucgagcagcaggcggacaacaugaucaccgagcuccugcagaaggaguacauggaccggcagggcaagacgccgcuggggcugguggaccucuucgucuucagcaccuccuucuaccugaucagcaucuuccugcaccucaucaagauccccacccaccgccacaucaccggcaagcccugccccaagccgcaccggcugaaccacauggggaucugcuccugcggccuguacaagcaccccggggugcccgugaaguggaagcgcugaggacuagucccuguucccagagcccacuuuuuuuucuuuuuuugaaauaaaauagccugucuuucagaucucaaaggcucuuuucagagccaccaaaaaaaaaaaaaaaaaaaaaaaaaaaaaaaaaaaaaaaaaaaaaaaaaaaaaaaaaaaaaaaaaaaaaaaaaaaaaaaaaaaaaaaaaaaaaaaaaaaaa

SEQ ID NO: 32142 - RNA, 1764 nt, Artificial Sequence
  mRNA product Design a-2 (hSL-A100) comprising derived and/or modified sequence from LASV(ISTH2010-NIG-2012;Clade II)__AIT17482__GPCmut7 (opt1)
aggagaguccgcucagccagguugcagaagcggcuuagcguguguccuaaucuucucucugcguguagguaggccugugccgcaaacaagcuuaccaugggccagaucaucaccuucuuccaggaggugccccacgucaucgaggaggugaugaacaucgugcugaucgcccucagccugcuggccauccucaaggggaucuacaacgucgcgaccugcggccuguucgggcugguguccuuccuccugcugugcggccgcagcugcuccacgaccuacaaggggguguacgagcuccagacccuggagcuggacauggccagccucaacaugaccaugccgcuguccugcacgaagaacaacagccaccacuacaucauggucggcaacgagaccggccuggagcucacccugaccaacacguccaucaucaaccacaaguucugcaaccugagcgacgcccacaagaagaaccucuacgaccacgcccugauguccaucaucagcaccuuccaccuguccauccccaacuucaaccaguacgaggccaugagcugcgacuucaacgggggcaagaucuccgugcaguacaaccucagccacgcguacgccguggacgccgccaaccacugcgggaccaucgcgaacggcguccugcagaccuucaugcggauggccuggggcggguccuacaucgcccuggacagcggcaagggguccugggacugcaucaugacgagcuaccaguaccucaucauccagaacaucaccugggaggaccacugccaguucucccgccccagccccaucggcuaccuggggcugcucagccagcggacccgcgacaucuacaucucccggcgccugcugggcaccuucacguggacccucagcgacuccgagggcaacgagacccccgggggcuacugccugacccgguggaugcugaucgaggccgagcucaagugcuucgggaacacggccguggcgaagugcaacgagaagcacgacgaggaguucugcgacaugcugcgccuguucgacuucaacaagcaggccauccggcgccucaagaccccggcccagaugagcauccagcugaucaacaaggccgugaacgcccugaucaacgaccagcucaucaugaagaaccaccuccgggacaucaugggcauccccuacugcaacuacuccaaguacugcuaccugaaccacaccgucaccgggaagacgagccugccccgcugcugccugguguccaacggcagcuaccugaacgagacccacuucuccgacgacaucgagcagcaggcggacaacaugaucaccgagcuccugcagaaggaguacaucgaccggcagggcaagaccccgcuggggcugguggaccucuucgucuucagcacguccuucuaccugaucagcaucuuccugcaccucgugaagauccccacccaccgccacguggucggcaagcccugccccaagccgcaccggcugaaccacauggggaucugcuccugcggccuguacaagcaccccggggugcccgugaaguggaagcgcugaggacuagucccuguucccagagcccacuuuuuuuucuuuuuuugaaauaaaauagccugucuuucagaucucaaaggcucuuuucagagccaccaaaaaaaaaaaaaaaaaaaaaaaaaaaaaaaaaaaaaaaaaaaaaaaaaaaaaaaaaaaaaaaaaaaaaaaaaaaaaaaaaaaaaaaaaaaaaaaaaaaaa

SEQ ID NO: 32143 - RNA, 1764 nt, Artificial Sequence
  mRNA product Design a-2 (hSL-A100) comprising derived and/or modified sequence from LASV(Lassa virus/H.sapiens-wt/NGA/2015/ISTH_0543;Clade II)__AVO03639__GPCmut7 (opt1)
aggagaguccgcucagccagguugcagaagcggcuuagcguguguccuaaucuucucucugcguguagguaggccugugccgcaaacaagcuuaccaugggccagaucaucaccuucuuccaggaggugccccacgucaucgaggaggugaugaacaucgugcugaucgcccucagccugcuggccauccucaaggggaucuacaacgucgcgaccugcggccuguucgggcugguguccuuccuccugcugugcggccgcagcugcuccacgaccuacaaggggguguacgagcuccagacccuggagcuggacauggccaaccucaacaugaccaugccgcugagcugcacgaagaacaacucccaccacuacaucauggucggcaacgagaccggccuggagcucacccugaccaacacgagcaucaucaaccacaaguucugcaaccuguccgacgcccacaagaagaaccucuacgaccacgcccugaugagcaucaucuccaccuuccaccugagcauccccaacuucaaccaguacgaggccauguccugcgacuucaacgggggcaagaucagcgugcaguacaaccucucccacaccuacgcgguggacgccgccaaccacugcgggaccaucgccaacggcguccugcagacguucaugcggauggcguggggcgggagcuacaucgcccuggacuccggcaaggggagcugggacugcaucaugaccuccuaccaguaccucgugauccagaacaccaccugggaggaccacugccaguucagccgccccucccccaucggcuaccuggggcugcucagccagcggacgcgcgacaucuacaucagccggcgccugcugggcaccuucaccuggacccucuccgacagcgagggcaacgagacgcccgggggcuacugccugacccgguggaugcugaucgaggccgagcucaagugcuucgggaacaccgccguggccaagugcaacgagaagcacgacgaggaguucugcgacaugcugcgccuguucgacuucaacaagcaggcgauccggcgccucaagaccccggcccagauguccauccagcugaucaacaaggccgucaacgcccugaucaacgaccagcucaucaugaagaaccaccuccgggacaucaugggcauccccuacugcaacuacagcaaguacugcuaccugaaccacacggugaccgggaagaccucccugccccgcugcugccuggugagcaacggcuccuaccugaacgagacccacuucagcgacgacaucgagcagcaggccgacaacaugaucacggagcuccugcagaaggaguacaucgaccggcagggcaagaccccgcuggggcuggucgaccucuucguguucuccaccagcuucuaccugaucuccaucuuccugcaccucgugaagauccccacccaccgccacaucacgggcaagcccugccccaagccgcaccggcugaaccacauggggaucugcagcugcggccuguacaagcaccccgggguccccgugaaguggaagcgcugaggacuagucccuguucccagagcccacuuuuuuuucuuuuuuugaaauaaaauagccugucuuucagaucucaaaggcucuuuucagagccaccaaaaaaaaaaaaaaaaaaaaaaaaaaaaaaaaaaaaaaaaaaaaaaaaaaaaaaaaaaaaaaaaaaaaaaaaaaaaaaaaaaaaaaaaaaaaaaaaaaaaa

SEQ ID NO: 32144 - RNA, 1764 nt, Artificial Sequence
  mRNA product Design a-2 (hSL-A100) comprising derived and/or modified sequence from LASV(Lassa virus/H.sapiens-wt/NGA/2016/ISTH_0009;Clade II)__AVO03571__GPCmut7 (opt1)
aggagaguccgcucagccagguugcagaagcggcuuagcguguguccuaaucuucucucugcguguagguaggccugugccgcaaacaagcuuaccaugggccagaucaucaccuucuuccaggaggugccccacgucaucgaggaggugaugaacaucgugcugaucgcccucagccugcuggccauccucaaggggaucuacaacgucgcgaccugcggccugcuggggcucguguccuuccugcugcucugcggccgcagcugcuccacgaccuacaaggggguguacgagcugcagacccuggagcucgacauggccagccugaacaugaccaugccgcuguccugcacgaagaacaacagccaccacuacaucauggucggcaacgagaccggccucgagcugacccugaccaacacguccaucaucaaccacaaguucugcaaccucagcgacgcccacaagaagaaccuguacgaccacgcccugauguccaucaucagcaccuuccaccucuccauccccaacuucaaccaguacgaggccaugagcugcgacuucaacgggggccggaucuccgugcaguacaaccugagccacuccuacgcgguggacgccgccaaccacugcgggaccaucgccaacggcguccugcagaccuucaugcgcauggcguggggcgggagcuacaucgcccucgacuccggcaaggggagcugggacugcaucaugacguccuaccaguaccugaucauccagaacaccaccugggaggaccacugccaguucagccggcccagccccaucggcuaccuggggcuccugucccagcgcacccgggacaucuacaucagccgccggcugcucggcacguucaccuggacccuguccgacagcgagggcaacgagacccccgggggcuacugccugacgcgcuggaugcucaucgaggccgagcugaagugcuucgggaacaccgccguggccaagugcaacgagaagcacgacgaggaguucugcgacaugcugcggcuguucgacuucaacaagcaggcgauccgccggcugaagaccccggcccagauguccauccagcugaucaacaaggccgugaacgcccucaucaacgaccagcugaucaugaagaaccaccuccgcgacaucaugggcauccccuacugcaacuacagcaaguacugcuaccucaaccacaccgucacggggaagaccucccugccccggugcugccuggugagcaacggcuccuaccucaacgagacccacuucagcgacgacaucgagcagcaggccgacaacaugaucaccgagcugcugcagaaggaguacaucgaccgccagggcaagacgccgcuggggcucguggaccuguucgucuucuccaccagcuucuaccugaucuccaucuuccuccaccuggugaagauccccacccaccggcacaucaccggcaagcccugccccaagccgcaccgccugaaccacauggggaucugcagcugcggccucuacaaccaccccggggugcccgucaaguggaagcggugaggacuagucccuguucccagagcccacuuuuuuuucuuuuuuugaaauaaaauagccugucuuucagaucucaaaggcucuuuucagagccaccaaaaaaaaaaaaaaaaaaaaaaaaaaaaaaaaaaaaaaaaaaaaaaaaaaaaaaaaaaaaaaaaaaaaaaaaaaaaaaaaaaaaaaaaaaaaaaaaaaaaa

SEQ ID NO: 32145 - RNA, 1764 nt, Artificial Sequence
  mRNA product Design a-2 (hSL-A100) comprising derived and/or modified sequence from LASV(Lassa virus/H.sapiens-wt/NGA/2016/ISTH_0017;Clade II)__AVO03567__GPCmut7 (opt1)
aggagaguccgcucagccagguugcagaagcggcuuagcguguguccuaaucuucucucugcguguagguaggccugugccgcaaacaagcuuaccaugggccagaucaucaccuucuuccaggaggugccccacgucaucgaggaggugaugaacaucgugcugaucgcccucagccugcuggccauccucaaggggaucuacaacgucgcgaccugcggccuguucgggcugguguccuuccuccugcugugcggccgcagcugcuccacgaccuacaaggggguguacgagcuccagacccuggagcuggacauggccagccucaacaugaccaugccgcuguccugcacgaagaacaacagccaccacuacaucauggucggcaacgagaccggccuggagcucacccugaccaacacguccaucaucaaccacaaguucugcaaccugagcgacgcccacaagaagaaccucuacgaccacgcccugauguccaucaucagcaccuuccaccuguccauccccaacuucaaccaguacgaggccaugagcugcgacuucaacgggggcaagaucuccgugcaguacaaccucagccacaccuacgcgaucgacgccgccaaccacugcgggaccaucgccaacggcgugcugcagacguucaugcggauggcguggggcggguccuacaucgcccuggacagcggcaagggguccugggacugcaucaugaccagcuaccaguaccucaucauccagaacaccaccugggaggaccacugccaguucucccgccccagccccaucggcuaccuggggcugcucagccagcggacgcgcgacaucuacaucucccggcgccugcugggcaccuucaccuggacccucagcgacuccgagggcaacgagacgcccgggggcuacugccugacccgguggaugcugaucgaggccgagcucaagugcuucgggaacaccgccgucgccaagugcaacgagaagcacgacgaggaguucugcgacaugcugcgccuguucgacuucaacaagcaggcgauccggcgccucaagaccccggcccagaugagcauccagcugaucaacaaggccgugaacgcccugaucaacgaccagcucaucaugaagaaccaccuccgggacaucaugggcauccccuacugcaacuacuccaaguacugcuaccugaaccacacggugaccgggaagaccagccugccccgcugcugccuggucuccaacggcagcuaccugaacgagacccacuucuccgacgacaucgagcagcaggccgacaacaugaucacggagcuccugcagaaggaguacauggaccggcagggcaagaccccgcuggggcugguggaccucuucguguucagcaccuccuucuaccugaucagcaucuuccugcaccucguccgcauccccacccaccggcacgugaucggcaagcccugccccaagccgcaccgccugaaccacauggggaucugcuccugcggccuguacaagcaccccggggugcccgucaaguggaagcggugaggacuagucccuguucccagagcccacuuuuuuuucuuuuuuugaaauaaaauagccugucuuucagaucucaaaggcucuuuucagagccaccaaaaaaaaaaaaaaaaaaaaaaaaaaaaaaaaaaaaaaaaaaaaaaaaaaaaaaaaaaaaaaaaaaaaaaaaaaaaaaaaaaaaaaaaaaaaaaaaaaaaa

SEQ ID NO: 32146 - RNA, 1764 nt, Artificial Sequence
  mRNA product Design a-2 (hSL-A100) comprising derived and/or modified sequence from LASV(Lassa virus/H.sapiens-wt/NGA/2018/ISTH_0959;Clade II)__AVV65099__GPCmut7 (opt1)
aggagaguccgcucagccagguugcagaagcggcuuagcguguguccuaaucuucucucugcguguagguaggccugugccgcaaacaagcuuaccaugggccagaucaucaccuucuuccaggaggugccccacgucaucgaggaggugaugaacaucgugcugaucgcccucagccugcuggccauccucaaggggaucuacaacgucgugaccugcggccuguucgggcugguguccuuccuccugcugugcggccgcagcugcuccacgaccuacaagggggucuacgagcuccagacccuggagcuggacauggcgagccucaacaugaccaugccgcuguccugcacgaagaacaacagccaccacuacaucauggugggcaacgagaccggccuggagcucacccugaccaacacguccaucaucaaccacaaguucugcaaccugagcgacgcccacaagaagaaccucuacgaccacgcccugauguccaucaucagcaccuuccaccuguccauccccaacuucaaccaguacgaggccaugagcugcgacuucaacgggggcaagaucuccgugcaguacaaccucagccacgccuacgcgaucgacgccgccaaccacugcgggaccaucgccaacggcguccugcagaccuucaugcggauggcguggggcggguccuacaucgcccuggacagcggcaagggguccugggacugcaucaugacgagcuaccaguaccucaucauccagaacaccaccugggaggaccacugccaguucucccgccccagccccaucggcuaccuggggcugcucagccagcggacccgcgacaucuacaucucccggcgccugcugggcacguucaccuggacccucagcgacuccgagggcaacgagacccccgggggcuacugccugacgcgguggaugcugaucgaggccgagcucaagugcuucgggaacaccgccguggccaagugcaacgagaagcacgacgaggaguucugcgacaugcugcgccuguucgacuucaacaagcaggcgauccggcgccucaagaccccggcccagaugagcauccagcugaucaacaaggccgugaacgcccugaucaacgaccagcucaucaugaagaaccaccuccgggacaucaugggcauccccuacugcaacuacuccaaguacugcuaccugaaccacaccgucacggggaagaccagccugccccgcugcugccugguguccaacggcagcuaccugaacgagacccacuucuccgacgacaucgagcagcaggccgacaacaugaucaccgagcuccugcagaaggaguacaucgaccggcagggcaagacgccgcuggggcugguggaccucuucgucuucagcaccuccuucuaccugaucagcaucuuccugcaccucgugaagauccccacccaccgccacgugaucggcaagcccugccccaagccgcaccggcugaaccacauggggaucugcuccugcggccuguacaagcaccccgggguccccgugaaguggaagcgcugaggacuagucccuguucccagagcccacuuuuuuuucuuuuuuugaaauaaaauagccugucuuucagaucucaaaggcucuuuucagagccaccaaaaaaaaaaaaaaaaaaaaaaaaaaaaaaaaaaaaaaaaaaaaaaaaaaaaaaaaaaaaaaaaaaaaaaaaaaaaaaaaaaaaaaaaaaaaaaaaaaaaa

SEQ ID NO: 32147 - RNA, 1764 nt, Artificial Sequence
  mRNA product Design a-2 (hSL-A100) comprising derived and/or modified sequence from LASV(LASV003-NIG-2008;Clade II)__AIT17580__GPCmut7 (opt1)
aggagaguccgcucagccagguugcagaagcggcuuagcguguguccuaaucuucucucugcguguagguaggccugugccgcaaacaagcuuaccaugggccagaucaucaccuucuuccaggaggugccccacgucaucgaggaggugaugaacaucgugcugaucgcccucagccugcuggccauccucaaggggaucuacaacgucgcgaccugcggccuguucgggcugguguccuuccuccugcugugcggccgcagcugcuccacgaccuacaaggggguguacgagcuccagacccuggagcuggacauggccagccucaacaugaccaugccgcuguccugcacgaagaacaacagccaccacuacaucauggucggcaacgagaccggccuggagcucacccugaccaacacguccaucaucaaccacaaguucugcaaccugagcgacgcccacaagaagaaccucuacgaccacgcccugauguccaucaucagcaccuuccaccuguccauccccaacuucaaccaguacgaggccaugagcugcgacuucaacgggggcaagaucuccgugcaguacaaccucagccacaccuacgcgguggacgccgccaaccacugcgggaccaucgccaacggcguccugcagacguucaugcggauggcguggggcggguccuacaucgcccuggacagcggcaagggguccugggacugcaucaugaccagcuaccaguaccucaucauccagaacaccaccugggaggaccacugccaguucucccgccccagccccaucggcuaccuggggcugcucagccagcggacgcgcgacaucuacaucucccggcgccugcugggcaccuucaccuggacccucagcgacuccgagagcaacgagacgccgggcggguacugccugacccgguggaugcugaucgaggccgagcucaagugcuucggcaacaccgccguggccaagugcaacgagaagcacgacgaggaguucugcgacaugcugcgccuguucgacuucaacaagcaggcgauccggcgccucaaggcccccgcccagauguccauccagcugaucaacaaggccgugaacgcccugaucaacgaccagcucaucaugaagaaccaccuccgggacaucauggggauccccuacugcaacuacagcaaguacugcuaccugaaccacaccgucacgggccgcaccucccugccccggugcugccuggugagcaacggguccuaccugaacgagacccacuucagcgacgacaucgagcagcaggcggacaacaugaucaccgagcuccugcagaaggaguacauggaccgccagggcaagacgccgcugggccugguggaccucuucgucuucuccaccagcuucuaccugaucuccaucuuccugcaccucgugaagauccccacccaccggcacgugaucgggaagcccugccccaagccgcaccgccugaaccacaugggcaucugcagcugcgggcuguacaagcaccccggcguccccgugaaguggaagcggugaggacuagucccuguucccagagcccacuuuuuuuucuuuuuuugaaauaaaauagccugucuuucagaucucaaaggcucuuuucagagccaccaaaaaaaaaaaaaaaaaaaaaaaaaaaaaaaaaaaaaaaaaaaaaaaaaaaaaaaaaaaaaaaaaaaaaaaaaaaaaaaaaaaaaaaaaaaaaaaaaaaaa

SEQ ID NO: 32148 - RNA, 1764 nt, Artificial Sequence
  mRNA product Design a-2 (hSL-A100) comprising derived and/or modified sequence from LASV(LASV035-NIG-2009;Clade II)__AIT17588__GPCmut7 (opt1)
aggagaguccgcucagccagguugcagaagcggcuuagcguguguccuaaucuucucucugcguguagguaggccugugccgcaaacaagcuuaccaugggccagaucaucaccuucuuccaggaggugccccacgucaucgaggaggugaugaacaucgugcugaucgcccucagccugcuggccauccucaaggggaucuacaacgucgcgaccugcggccuguucgggcugguguccuuccuccugcugugcggccgcagcugcuccacgaccuacaaggggguguacgagcuccagacccuggagcuggacauggccagccucaacaugaccaugccgcuguccugcacgaagaacaacagccaccacuacaucauggucggcaacgagaccggccuggagcucacccugaccaacacguccaucaucaaccacaaguucugcaaccugagcgacgcccacaagaagaaccucuacgaccacgcccugauguccaucaucagcaccuuccaccuguccauccccaacuucaaccaguacgaggccaugagcugcgacuucaacgggggcaagaucuccgugcaguacaaccucagccacgcguacgccguggacgccgccaaccacugcgggaccaucgcgaacggcguccugcagaccuucaugcggauggccuggggcggguccuacaucgcccuggacagcggcaagggguccugggacugcaucaugacgagcuaccaguaccucaucauccagaacaccaccugggaggaccacugccaguucucccgccccagccccaucggcuaccuggggcugcucagccagcggacccgcgacaucuacaucucccggcgccugcugggcacguucaccuggacccucagcgacuccgagggcaacgagacccccgggggcuacugccugacgcgguggaugcugaucgaggccgagcucaagugcuucgggaacaccgccguggcgaagugcaacgagaagcacgacgaggaguucugcgacaugcugcgccuguucgacuucaacaagcaggccauccggcgccucaaggccccggcccagaugagcauccagcugaucaacaaggccgugaacgcgcugaucaacgaccagcucaucaugaagaaccaccuccgggacaucaugggcauccccuacugcaacuacuccaaguacugcuaccugaaccacaccgucaccgggaagacgagccugccccgcugcugccugguguccaacggcagcuaccugaacgagacccacuucuccgacgacaucgagcagcaggccgacaacaugaucaccgagcuccugcagaaggaguacaucgaccggcagggcaagaccccgcuggggcugguggaccucuucgucuucagcacguccuucuaccugaucagcaucuuccugcaccucgugaagauccccacccaccgccacgugaucggcaagcccugccccaagccgcaccggcugaaccacauggggaucugcuccugcggccuguacaagcaccccgggguccccgugaaguggaagcgcugaggacuagucccuguucccagagcccacuuuuuuuucuuuuuuugaaauaaaauagccugucuuucagaucucaaaggcucuuuucagagccaccaaaaaaaaaaaaaaaaaaaaaaaaaaaaaaaaaaaaaaaaaaaaaaaaaaaaaaaaaaaaaaaaaaaaaaaaaaaaaaaaaaaaaaaaaaaaaaaaaaaaa

SEQ ID NO: 32149 - RNA, 1764 nt, Artificial Sequence
  mRNA product Design a-2 (hSL-A100) comprising derived and/or modified sequence from LASV(LASV1000-NIG-2009;Clade II)__AIT17782__GPCmut7 (opt1)
aggagaguccgcucagccagguugcagaagcggcuuagcguguguccuaaucuucucucugcguguagguaggccugugccgcaaacaagcuuaccaugggccagaucaucaccuucuuccaggaggugccccacgucaucgaggaggugaugaacaucgugcugaucgcccucagccugcuggccauccucaaggggaucuacaacgucgcgaccugcggccuguucgggcugguguccuuccuccugcugugcggccgcagcugcuccacgaccuacaaggggguguacgagcuccagacccuggagcuggacauggccagccucaacaugaccaugccgcuguccugcacgaagaacaacagccaccacuacaucauggucggcaacgagaccggccuggagcucacccugaccaacacguccaucaucaaccacaaguucugcaaccugagcgacgcccacaagaagaaccucuacgaccacgcccugauguccaucaucagcaccuuccaccuguccauccccaacuucaaccaguacgaggccaugagcugcgacuucaacgggggcaagaucuccgugcaguacaaccucagccacaccuacgcgguggacgccgccaaccacugcgggaccaucgccaacggcguccugcagacguucaugcggauggcguggggcggguccuacaucgcccuggacagcggcaagggguccugggacugcaucaugaccagcuaccaguaccucaucauccagaacaccaccugggaggaccacugccaguucucccgccccagccccaucggcuaccuggggcugcucagccagcggacgcgcgacaucuacaucucccggcgccugcugggcaccuucaccuggacccucagcgacuccgagggcaacgagacgcccgggggcuacugccugacccgguggaugcugaucgaggccgagcucaagugcuucgggaacaccgccguggccaagugcaacgagaagcacgacgaggaguucugcgacaugcugcgccuguucgacuucaacaagcaggcgaucaagcggcucaagaccccggcccagaugagcauccagcugaucaacaaggccgugaacgcccugaucaacgaccagcucaucaugaagaaccaccuccgcgacaucaugggcauccccuacugcaacuacuccaaguacugcuaccugaaccacacggucaccgggaagaccagccugccccggugcugccugguguccaacggcagcuaccugaacgagacccacuucuccgacgacaucgagcagcaggccgacaacaugaucacggagcuccugcagaaggaguacaucgaccgccagggcaagaccccgcuggggcugguggaccucuucgucuucagcaccuccuucuaccugaucagcaucuuccugcaccucgugaagauccccacccaccggcacguggucggcaagcccugccccaagccgcaccgccugaaccacauggggaucugcuccugcggccuguacaagcaccccggggugcccgugaaguggaagcggugaggacuagucccuguucccagagcccacuuuuuuuucuuuuuuugaaauaaaauagccugucuuucagaucucaaaggcucuuuucagagccaccaaaaaaaaaaaaaaaaaaaaaaaaaaaaaaaaaaaaaaaaaaaaaaaaaaaaaaaaaaaaaaaaaaaaaaaaaaaaaaaaaaaaaaaaaaaaaaaaaaaaa

SEQ ID NO: 32150 - RNA, 1764 nt, Artificial Sequence
  mRNA product Design a-2 (hSL-A100) comprising derived and/or modified sequence from LASV(LASV221-NIG-2010;Clade II)__AIT17624__GPCmut7 (opt1)
aggagaguccgcucagccagguugcagaagcggcuuagcguguguccuaaucuucucucugcguguagguaggccugugccgcaaacaagcuuaccaugggccagaucaucaccuucuuccaggaggugccccacgucaucgaggaggugaugaacaucgugcugaucgcccucagccugcuggccauccucaaggggaucuacaacgucgcgaccugcggccuguucgggcugguguccuuccuccugcugugcggccgcagcugcuccacgaccuacaaggggguguacgagcuccagacccuggagcuggacauggccagccucaacaugaccaugccgcuguccugcacgaagaacaacagccaccacuacaucauggucggcaacgagaccggccuggagcucacccugaccaacacguccaucaucaaccacaaguucugcaaccugagcgacgcccacaagaagaaccucuacgaccacgcccugauguccaucaucagcaccuuccaccuguccauccccaacuucaaccaguacgaggccaugagcugcgacuucaacgggggcaagaucuccgugcaguacaaccucagccacaccuacgcgaucgacgccgccaaccacugcgggaccaucgccaacggcgugcugcagacguucaugcggauggcguggggcggguccuacaucgcccuggacagcggcaagggguccugggacugcaucaugaccagcuaccaguaccucaucauccagaacaccaccugggaggaccacugccaguucucccgccccagccccaucggcuaccuggggcugcucagccagcggacgcgcgacaucuacaucucccggcgccugcugggcaccuucaccuggacccucagcgacuccgagggcaacgagacgcccgggggcuacugccugacccgguggaugcugaucgaggccgagcucaagugcuucgggaacaccgccgucgccaagugcaacgagaagcacgacgaggaguucugcgacaugcugcgccuguucgacuucaacaagcaggcgauccggcgccucaagaccccggcccagaugagcauccagcugaucaacaaggccgugaacgcccugaucaacgaccagcucaucaugaagaaccaccuccgggacaucaugggcauccccuacugcaacuacuccaaguacugcuaccugaaccacacggugaccgggaagaccagccugccccgcugcugccuggucuccaacggcagcuaccugaacgagacccacuucuccgacgacaucgagcagcaggccgacaacaugaucacggagaugcuccagaaggaguacauggaccggcagggcaagaccccgcuggggcugguggaccuguucguguucagcaccuccuucuaccucaucagcaucuuccugcaccuggucaagauccccacccaccgccacgugaucggcaagcccugccccaagccgcaccggcucaaccacauggggaucugcuccugcggccuguacaagcaccccggggugcccgucaaguggaagcgcugaggacuagucccuguucccagagcccacuuuuuuuucuuuuuuugaaauaaaauagccugucuuucagaucucaaaggcucuuuucagagccaccaaaaaaaaaaaaaaaaaaaaaaaaaaaaaaaaaaaaaaaaaaaaaaaaaaaaaaaaaaaaaaaaaaaaaaaaaaaaaaaaaaaaaaaaaaaaaaaaaaaaa

SEQ ID NO: 32151 - RNA, 1764 nt, Artificial Sequence
  mRNA product Design a-2 (hSL-A100) comprising derived and/or modified sequence from LASV(LASV237-NIG-2010;Clade II)__AIT17638__GPCmut7 (opt1)
aggagaguccgcucagccagguugcagaagcggcuuagcguguguccuaaucuucucucugcguguagguaggccugugccgcaaacaagcuuaccaugggccagaucaucaccuucuuccaggaggugccccacgucaucgaggaggugaugaacaucgugcugaucgcccucagccugcuggccauccucaaggggaucuacaacgucgcgaccugcggccuguucgggcugguguccuuccuccugcugugcggccgcagcugcuccacgaccuacaaggggguguacgagcuccagacccuggagcuggacauggccagccucaacaugaccaugccgcuguccugcacgaagaacaacagccaccacuacaucauggucggcaacgagaccggccuggagcucacccugaccaacacguccaucaucaaccacaaguucugcaaccugagcgacgcccacaagaaggaccucuacgaccacgcccugauguccaucaucagcaccuuccaccuguccauccccaacuucaaccaguacgaggccaugagcugcgacuucaacgggggcaagaucuccgugcaguacaaccucagccacaccuacgcgguggacgccgccaaccacugcgggaccaucgccaacggcguccugcagacguucaugcggauggcguggggcggguccuacaucgcccuggacagcggcaagggguccugggacugcaucaugaccagcuaccaguaccucaucauccagaacaccaccugggaggaccacugccaguucucccgccccagccccaucggcuaccuggggcugcucagccagcggacgcgcgacaucuacaucucccggcgccugcugggcaccuucaccuggacccucagcgacuccgagggcaacgagacgcccgggggcuacugccugacccgguggaugcugaucgaggccgagcucaagugcuucgggaacaccgccguggccaagugcaacgagaagcacgacgaggaguucugcgacaugcugcgccuguucgacuucaacaagcaggcgauccggcgccucaagaccccggcccagaugagcauccagcugaucaacaaggccgugaacgcccugaucaacgaccagcucaucaugaagaaccaccuccgggacaucaugggcauccccuacugcaacuacuccaaguacugcuaccugaaccacacggucaccgggaagaccagccugccccgcugcugccugguguccaacggcagcuaccugaacgagacccacuucuccgacgacaucgagcagcaggccgacaacaugaucacggagcuccugcagaaggaguacauggaccggcagggcaagaccccgcuggggcugguggaccucuucgucuucagcaccuccuucuaccugaucagcaucuuccugcaccucaucaagauccccacccaccgccacaucacgggcaagcccugccccaagccgcaccggcugaaccacauggggaucugcuccugcggccuguacaagcaccccggggugcccgugaaguggaagcgcugaggacuagucccuguucccagagcccacuuuuuuuucuuuuuuugaaauaaaauagccugucuuucagaucucaaaggcucuuuucagagccaccaaaaaaaaaaaaaaaaaaaaaaaaaaaaaaaaaaaaaaaaaaaaaaaaaaaaaaaaaaaaaaaaaaaaaaaaaaaaaaaaaaaaaaaaaaaaaaaaaaaaa

SEQ ID NO: 32152 - RNA, 1764 nt, Artificial Sequence
  mRNA product Design a-2 (hSL-A100) comprising derived and/or modified sequence from LASV(LASV253-NIG-2011;Clade II)__AIT17670__GPCmut7 (opt1)
aggagaguccgcucagccagguugcagaagcggcuuagcguguguccuaaucuucucucugcguguagguaggccugugccgcaaacaagcuuaccaugggccagaucaucaccuucuuccaggaggugccccacgucaucgaggaggugaugaacaucgugcugaucgcccucagccugcuggccauccucaaggggaucuacaacgucgcgaccugcggccuguucgggcugguguccuuccuccugcugugcggccgcagcugcuccacgaccuacaaggggguguacgagcuccagacccuggagcuggacauggccagccucaacaugaccaugccgcuguccugcacgaagaacaacagccaccacuacaucauggucggcaacgagaccggccuggagcucacccugaccaacacguccaucaucaaccacaaguucugcaaccugagcgacgcccacaagaagaaccucuacgaccacgcccugauguccaucaucagcaccuuccaccuguccauccccaacuucaaccaguacgaggccaugagcugcgacuucaacgggggcaagaucuccgugcaguacaaccucagccacaccuacgcgguggacgccgccaaccacugcgggaccaucgccaacggcguccugcagacguucaugcggauggcguggggcggguccuacaucgcccuggacagcggcaagggguccugggacugcaucaugaccagcuaccaguaccucaucauccagaacaccaccugggaggaccacugccaguucucccgccccagccccaucggcuaccuggggcugcucagccagcggacgcgcgacaucuacaucucccggcgccugcugggcaccuucaccuggacccucagcgacuccgagggcaacgagacgcccgggggcuacugccugacccgguggaugcugaucgaggccgagcucaagugcuucgggaacaccgccguggccaagugcaacgagaagcacgacgaggaguucugcgacaugcugcgccuguucgacuucaacaagcaggcgauccggcgccucaaggccccggcccagaugagcauccagcugaucaacaaggccgugaacgcccugaucaacgaccagcucaucaugaagaaccaccuccgggacaucaugggcauccccuacugcaacuacuccaaguacugcuaccugaaccacaccgucacggggcgcaccagccugccccggugcugccugguguccaacggcagcuaccugaacgagacccacuucuccgacgacaucgagcagcaggcggacaacaugaucaccgagcuccugcagaaggaguacaucgaccgccagggcaagacgccgcuggggcugguggaccucuucgucuucagcaccuccuucuaccugaucagcaucuuccugcaccucgugaagauccccacccaccggcacaucaucggcaagcccugccccaagccgcaccgccugaaccacauggggaucugcuccugcggccuguacaagcaccccggggugcccgucaaguggaagcggugaggacuagucccuguucccagagcccacuuuuuuuucuuuuuuugaaauaaaauagccugucuuucagaucucaaaggcucuuuucagagccaccaaaaaaaaaaaaaaaaaaaaaaaaaaaaaaaaaaaaaaaaaaaaaaaaaaaaaaaaaaaaaaaaaaaaaaaaaaaaaaaaaaaaaaaaaaaaaaaaaaaaa

SEQ ID NO: 32153 - RNA, 1764 nt, Artificial Sequence
  mRNA product Design a-2 (hSL-A100) comprising derived and/or modified sequence from LASV(LASV254-NIG-2011;Clade II)__AIT17674__GPCmut7 (opt1)
aggagaguccgcucagccagguugcagaagcggcuuagcguguguccuaaucuucucucugcguguagguaggccugugccgcaaacaagcuuaccaugggccagaucaucaccuucuuccaggaggugccccacgucaucgaggaggugaugaacaucgugcugaucgcccucagccugcuggccauccucaaggggaucuacaacgucgcgaccugcggccuguucgggcugguguccuuccuccugcugugcggccgcagcugcuccacgaccuacaaggggguguacgagcuccagacccuggagcuggacaugaccaaccucaacaugacgaugccgcugagcugcaccaagaacaacucccaccacuacaucauggucggcaacgagaccggccuggagcucacccugacgaacaccagcaucaucaaccacaaguucugcaaccuguccgacgcccacaagaagaaccucuacaaccacgcccugaugagcaucaucuccaccuuccaccugagcauccccaacuucaaccaguacgaggccauguccugcgacuucaacgggggcaagaucagcgugcaguacaaccucucccacagcuacgccguggacgcggccaaccacugcgggaccaucgccaacggcguccugcagacguucaugcggauggccuggggcggguccuacaucgcgcuggacagcggcaaggggaacugggacugcaucaugaccuccuaccaguaccucaucauccagaacaccaccugggaggaccacugccaguucagccgccccucccccaucggcuaccuggggcugcucagccagcggacgcgcgacaucuacaucagccggcgccugcugggcaccuucaccuggacccucuccgacagcgagggcaacgagacgcccgggggcuacugccugacccgguggaugcugaucgaggccgagcucaagugcuucgggaacaccgccguggccaagugcaacgagaagcacgacgaggaguucugcgacaugcugcgccuguucgacuucaacaagcaggccauccggcgccucaagaccccggcgcaggccaacauccagcugaucaacaaggccgugaacgcccugaucaacgaccagcucaucaugaagaaccaccuccgggacaucaugggcauccccuacugcaacuacuccaaguacugcuaccugaaccacacggucaccgggaagaccagccugccccgcugcugccugguguccaacggcagcuaccugaacgagacccacuucuccgacgacaucgagcagcaggccgacaacaugaucacggagcuccugcagaaggaguacauggaccggcagggcaagaccccgcuggggcugguggaccucuucgucuucagcaccuccuucuaccugaucagcaucuuccugcaccucgugaagauccccacccaccgccacgugaucggcaagcccugccccaagccgcaccggcugaaccacauggggaucugcuccugcggccuguacaagcaccccgggguccccgugaaguggaagcgcugaggacuagucccuguucccagagcccacuuuuuuuucuuuuuuugaaauaaaauagccugucuuucagaucucaaaggcucuuuucagagccaccaaaaaaaaaaaaaaaaaaaaaaaaaaaaaaaaaaaaaaaaaaaaaaaaaaaaaaaaaaaaaaaaaaaaaaaaaaaaaaaaaaaaaaaaaaaaaaaaaaaaa

SEQ ID NO: 32154 - RNA, 1764 nt, Artificial Sequence
  mRNA product Design a-2 (hSL-A100) comprising derived and/or modified sequence from LASV(Nig08-A19;Clade III)__ADU56618__GPCmut7 (opt1)
aggagaguccgcucagccagguugcagaagcggcuuagcguguguccuaaucuucucucugcguguagguaggccugugccgcaaacaagcuuaccaugggccagaucgugaccuucuuccaggaggucccccacgugaucgaggaggugaugaacaucguccugaucgcccucagcauccuggccauccugaaggggcucuacaacaucgcgaccugcggccugaucgggcuggugacguuccuccugcuguccggccgcagcugcuccaugaccuacaaggggguguacgagcuccagacccuggagcugaacaugaacacccucaacaugacgaugccgcugagcugcaccaagaacaacucccaccacuacaucauggucggcaacgagaccggccuggagcucacccugacgaacaccagccugcuccaccacaaguucugcaaccuguccgacgcccacaagaagaaccuguacgaccacacccucaugagcaucaucuccaccuuccaccugagcauccccaacuucaaccaguacgaggccauguccugcgacuucaacgggggcaagaucacggugcaguacaaccugagccacuccuacgccaucgacgccgcgaaccacugcgggaccguggccaacggcguccuccagaccuucaugcggauggccuggggcgggagcuacaucgcccuggacuccggccgcgggaagugggacugcaucaugaccagcuaccaguaccugaucauccagaacacgaccugggaggaccacugccaguucucccggcccagccccaucggcuaccucgggcugcugucccagcgcacccgggacaucuacaucagccgccggcuccugggcaccuucacguggacccugagcgacuccgagggcaacgagacccccgggggcuacugccucacccgcuggaugcugaucgaggcggagcugaagugcuucgggaacacggccguggccaagugcaacgagaagcacgacgaggaguucugcgacaugcuccggcuguucgacuucaacaagcaggccauccgccggcugaaggccccggcgcagaugagcauccagcucaucaacaaggccgugaacgcccugaucaacgaccagcugaucaugaagaaccaccuccgcgacaucaugggcauccccuacugcaacuacuccaaguacugcuaccugaaccacaccagcaccgggcggaccucccugccccgcugcugccucgucagcaacggcuccuaccugaacgagacgcacuucagcgacgacaucgagcagcaggccgacaacaugaucaccgagaugcugcagaaggaguaccuggaccggcagggcaagaccccgcucgggcugguggaccuguucguguucuccaccagcuucuaccucaucuccaucuuccugcaccuggucaagauccccacgcaccgccacaucgugggcaagcccugccccaagccgcaccggcucaaccacauggggaucugcagcugcggccuguacaagcagcccggggugcccguccgcuggaagcggugaggacuagucccuguucccagagcccacuuuuuuuucuuuuuuugaaauaaaauagccugucuuucagaucucaaaggcucuuuucagagccaccaaaaaaaaaaaaaaaaaaaaaaaaaaaaaaaaaaaaaaaaaaaaaaaaaaaaaaaaaaaaaaaaaaaaaaaaaaaaaaaaaaaaaaaaaaaaaaaaaaaaa

SEQ ID NO: 32155 - RNA, 1767 nt, Artificial Sequence
  mRNA product Design a-2 (hSL-A100) comprising derived and/or modified sequence from LASV(G1180-SLE-2010;Clade IV)__AIT17168__GPCmut7 (opt1)
aggagaguccgcucagccagguugcagaagcggcuuagcguguguccuaaucuucucucugcguguagguaggccugugccgcaaacaagcuuaccaugggccagaucgugaccuucuuccaggaggucccccacgugaucgaggaggugaugaacaucguccugaucgcccucagcauccuggccgugcugaaggggcucuacaacuucgcgaccugcggccugguggggcugcucacguuccugcugcucugcggccgcuccugcaccgccagccgguacaagggggucuacgagcugcagacccuggagcucaacauggagacccugaacaugacgaugccgcuguccugcaccaagaacaacagccaccacuacaucauggugggcaacgagaccggccucgagcugacccugacgaacaccuccaucaucaaccacaaguucugcaaccucagcgacgcccacaagaagaaccuguacgaccacgcccugauguccaucaucagcaccuuccaccucuccauccccaacuucaaccaguacgaggccaugagcugcgacuucaacgggggcaagaucuccgugcaguacaaccugagccacuccuacgcgggggacgccgccaaccacugcggcaccgucgccaacggggugcugcagacguucaugcgcauggcguggggcggcagcuacaucgcccucgacuccgggcacggcagcugggacugcaucaugaccuccuaccaguaccugaucauccagaacaccaccugggaggaccacugccaguucagccggcccucccccaucggguaccugggccuccugagccagcgcacgcgggacaucuacaucagccgccggcugcucggcaccuucaccuggacccuguccgacagcgaggggaaggacacgccgggcggguacugccugacccgcuggaugcucaucgaggccgagcugaagugcuucggcaacaccgccguggccaagugcaacgagaagcacgacgaggaguucugcgacaugcugcggcuguucgacuucaacaagcaggcgauccagcgccugaaggcccccgcccagauguccauccagcugaucaacaaggccgucaacgcccucaucaacgaccagcugaucaugaagaaccaccuccgggacaucauggggauccccuacugcaacuacagcaaguacugcuaccucaaccacaccacgaccggcaagaccucccugcccaagugcugccuggugagcaacggcuccuaccucaacgagacccacuucagcgacgacaucgagcagcaggcggacaacaugaucacggagaugcugcagaaggaguacauggagcgccaggggaagaccccgcugggccugguggaccucuucgucuucuccaccagcuucuaccugaucuccaucuuccugcaccucgugaagauccccacccaccggcacaucgugggcaagagcugccccaagccccaccgccugaaccacauggggaucugcuccugcgggcuguacaagcagccgggcguccccgugaaguggaagcggugaggacuagucccuguucccagagcccacuuuuuuuucuuuuuuugaaauaaaauagccugucuuucagaucucaaaggcucuuuucagagccaccaaaaaaaaaaaaaaaaaaaaaaaaaaaaaaaaaaaaaaaaaaaaaaaaaaaaaaaaaaaaaaaaaaaaaaaaaaaaaaaaaaaaaaaaaaaaaaaaaaaaa

SEQ ID NO: 32156 - RNA, 1767 nt, Artificial Sequence
  mRNA product Design a-2 (hSL-A100) comprising derived and/or modified sequence from LASV(G1442-SLE-2011;Clade IV)__AIT17180__GPCmut7 (opt1)
aggagaguccgcucagccagguugcagaagcggcuuagcguguguccuaaucuucucucugcguguagguaggccugugccgcaaacaagcuuaccaugggccagaucgugaccuucuuccaggaggucccccacgugaucgaggaggugaugaacaucguccugaucgcccucagcauccuggccgugcugaaggggcucuacaacguggcgaccugcggccugaucgggcuggucacguuccuccugcugugcggccgcuccugcaccaccacccucuacaaggggguguacgagcugcagacgcuggagcucaacauggagacccugaacaugaccaugccgcugagcugcaccaagaacaacucccaccacuacauccgggugggcaacgagacgggccucgagcugacccugaccaacaccagcaucaucaaccacaaguucugcaaccucuccgacgcccacaagaagaaccuguacgaccacgcccugaugagcaucaucuccacguuccaccucagcauccccaacuucaaccaguacgaggccauguccugcgacuucaacgggggcaagaucagcguccaguacaaccugucccacagcuacgccggggacgcggccaaccacugcggcaccguggccaacggggugcugcagaccuucaugcgcauggccuggggcggcuccuacaucgcgcucgacagcgggcggggcaacugggacugcaucaugaccuccuaccaguaccugaucauccagaacacgaccugggacgaccacugccaguucagccgccccucccccaucggguaccugggccuccugagccagcggacccgcgacgucuacaucucccggcgccugcucggcaccuucacguggacccugagcgacagcgaggggaaggacaccccgggcggguacugccugacccgguggaugcucaucgaggccgagcugaagugcuucggcaacacggccguggccaagugcaacgagaagcacgacgaggaguucugcgacaugcugcgccucuucgacuucaacaagcaggccauccagcggcugaaggcgcccgcccagauguccauccagcugaucaacaaggccgugaacgcccucaucaacgaccagcugaucaugaagaaccaccuccgcgacaucauggggauccccuacugcaacuacagcaaguacugcuaccugaacaacaccgccaccggcaagaccucccugcccaagugcugccugaucagcaacggcuccuaccucaacgagacgcacuucagcgacgacaucgagcaggaggcggacaacaugaucaccgagaugcugcagaaggaguacauggagcggcaggggaagaccccgcugggccuggucgaccucuucguguucuccaccagcuucuaccugaucuccaucuuccugcaccucgugaagauccccacgcaccgccacaucgucggcaagagcugccccaagccccaccggcugaaccacauggggaucugcuccugcgggcuguacaagcagccgggcgugcccgugcgcuggaagcggugaggacuagucccuguucccagagcccacuuuuuuuucuuuuuuugaaauaaaauagccugucuuucagaucucaaaggcucuuuucagagccaccaaaaaaaaaaaaaaaaaaaaaaaaaaaaaaaaaaaaaaaaaaaaaaaaaaaaaaaaaaaaaaaaaaaaaaaaaaaaaaaaaaaaaaaaaaaaaaaaaaaaa

SEQ ID NO: 32157 - RNA, 1767 nt, Artificial Sequence
  mRNA product Design a-2 (hSL-A100) comprising derived and/or modified sequence from LASV(G3010-SLE-2013;Clade IV)__AIT17344__GPCmut7 (opt1)
aggagaguccgcucagccagguugcagaagcggcuuagcguguguccuaaucuucucucugcguguagguaggccugugccgcaaacaagcuuaccaugggccagaucgugaccuucuuccaggaggucccccacgugaucgaggaggugaugaacaucguccugaucgcccucagcauccuggccgugcugaaggggcucuacaacuucgcgaccugcggccugguggggcuggucacguuccuccugcugugcggccgcuccugcaccaccagccucuacaaggggguguacgagcugcagacccuggagcucaacauggagacgcugaacaugaccaugccgcuguccugcaccaagaacaacagccaccacuacaucauggugggcaacgagaccggccucgagcugacgcugaccaacaccuccaucaucaaccacaaguucugcaaccucagcgacgcccacaagaagaaccuguacaaccacgcccugauguccaucaucagcaccuuccaccucuccauccccaacuucaaccaguacgaggccaugagcugcgacuucaacgggggcaagaucuccguccaguacaaccugagccacuccuacgccggggacgcggccagccacugcggcacgguggccaacggggugcugcagaccuucaugcggauggccuggggcggcuccuacaucgcgcucgacagcggguacggcaagugggacugcaucaugaccuccuaccaguaccugaucauccagaacaccacgugggaggaccacugccaguucagccgccccucccccaucggguaccugggccuccugagccagcggacccgcgacaucuacaucagccggcgccugcucggcaccuucaccuggacgcuguccgacagcgaggggaaggacaccccgggcggguacugccugacccgguggaugcucaucgaggccgagcugaagugcuucggcaacaccgccgucgccaagugcaacgagaagcacgacgaggaguucugcgacaugcugcgccucuucgacuucaacaagcaggccauccagcggcugaagacgcccgcgcagauguccauccagcugaucaacaaggccgugaacgcccucaucaacgaccagcugaucaugaagaaccaccuccgcgacaucauggggauccccuacugcaacuacagcaaguacugcuaccugaaccacaccaccaccggcaagacgucccugcccaagugcugccuggugagcaacggcuccuaccucaacgagacccacuucagcgacgacaucgagcagcaggccgacaacaugaucaccgagaugcugcagaaggaguacauggagcggcaggggaagaccccgcugggccuggucgaccucuucguguucuccacgagcuucuaccugaucuccaucuuccugcaccucgugaagauccccacccaccgccacaucgucggcaagagcugccccaagccccaccggcugaaccacauggggaucugcuccugcgggcuguacaagcagccgggcgugcccgugcgcuggaagcggugaggacuagucccuguucccagagcccacuuuuuuuucuuuuuuugaaauaaaauagccugucuuucagaucucaaaggcucuuuucagagccaccaaaaaaaaaaaaaaaaaaaaaaaaaaaaaaaaaaaaaaaaaaaaaaaaaaaaaaaaaaaaaaaaaaaaaaaaaaaaaaaaaaaaaaaaaaaaaaaaaaaaa

SEQ ID NO: 32158 - RNA, 1767 nt, Artificial Sequence
  mRNA product Design a-2 (hSL-A100) comprising derived and/or modified sequence from LASV(G502-SLE-2009;Clade IV)__AIT17126__GPCmut7 (opt1)
aggagaguccgcucagccagguugcagaagcggcuuagcguguguccuaaucuucucucugcguguagguaggccugugccgcaaacaagcuuaccaugggccagaucgugaccuucuuccaggaggucccccacgugaucgaggaggugaugaacaucguccugaucgcccucagcauccuggccgugcugaaggggcucuacaacuucgcgaccugcggccugguggggcugcucacguuccugcugcucugcggccgcuccugcaccaccgggcuguacaagggcgucuacgagcugcagacccucgagcugaacauggagacgcugaacaugaccaugccgcucagcugcaccaagaacaacucccaccacuacaucauggugggcaacgagaccgggcuggagcugacgcucaccaacaccagcaucaucaaccacaaguucugcaaccuguccgacgcccacaagaagaaccuguacgaccacgcccucaugagcaucaucuccaccuuccaccugagcauccccaacuucaaccaguacgaggccauguccugcgacuucaacggcgggaagaucagcgugcaguacaaccugucccacagcuacgccggcgacgcggccgaccacugcgggacggucgccaacggcgugcuccagaccuucaugcggauggccuggggcggguccuacaucgcgcuggacagcggccgcgggcggugggacugcaucaugaccuccuaccaguaccugaucauccagaacaccacgugggaggaccacugccaguucagccgccccucccccaucggcuaccucggccugcugagccagcggacccgcgacaucuacaucucccggcgccuccuggggaccuucaccuggacgcugagcgacagcgagggcaaggacacccccgggggcuacugccucacccgguggaugcugaucgaggccgagcugaagugcuucgggaacaccgccguggccaagugcaacgagaagcacgacgaggaguucugcgacaugcuccgccuguucgacuucaacaagcaggccauccagcggcugaaggcgccggcccagauguccauccagcucaucaacaaggccgucaacgcccugaucaacgaccagcuggugaugaagaaccaccuccgcgacaucaugggcauccccuacugcaacuacagccgguacugcuaccugaaccacacgaccaccggccgcaccucccugcccaagugcugccucgugagcaacggguccuaccugaacgagacgcacuucagcgacgacaucgagcagcaggccgacaacaugaucaccgagaugcugcagaaggaguacauggagcggcagggcaagaccccgcuggggcucgucgaccuguucguguucuccaccagcuucuaccugaucuccaucuuccuccaccuggugaagauccccacgcaccgccacaucgucggcaagagcugccccaagccccaccggcugaaccacauggggaucugcuccugcggccucuacaagcagccgggcgugcccgugaaguggaagcgcugaggacuagucccuguucccagagcccacuuuuuuuucuuuuuuugaaauaaaauagccugucuuucagaucucaaaggcucuuuucagagccaccaaaaaaaaaaaaaaaaaaaaaaaaaaaaaaaaaaaaaaaaaaaaaaaaaaaaaaaaaaaaaaaaaaaaaaaaaaaaaaaaaaaaaaaaaaaaaaaaaaaaa

SEQ ID NO: 32159 - RNA, 1767 nt, Artificial Sequence
  mRNA product Design a-2 (hSL-A100) comprising derived and/or modified sequence from LASV(G733-SLE-2010;Clade IV)__AIT17154__GPCmut7 (opt1)
aggagaguccgcucagccagguugcagaagcggcuuagcguguguccuaaucuucucucugcguguagguaggccugugccgcaaacaagcuuaccaugggccagaucgugaccuucuuccaggaggucccccacgugaucgaggaggugaugaacaucguccugaucgcccucagcauccuggccgugcugaaggggcucuacaacuucgcgaccugcggcaucguggggcuggucuccuuccugcuccugugcggccgcagcugcacgaccucccuguacaaggggguguacgagcuccagacccuggagcugaacauggagacccucaacaugacgaugccgcugagcugcaccaagaacaacucccaccacuacaucauggugggcaacgagaccggccuggagcucacccugacgaacaccagcaucaucaaccacaaguucugcaaccuguccgacgcccacaagaagaaccucuacgaccacgcccugaugagcaucaucuccaccuuccaccugagcauccccaacuucaaccaguacgaggccauguccugcgacuucaacgggggcaagaucagcguccaguacaaccucucccacagcuacgccggggacgcggccaaccacugcggcaccaucgccaacggggugcugcagacguucaugcggauggccuggggcggcuccuacaucgcgcuggacagcgggcgcgaccggugggacugcaucaugaccuccuaccaguaccucaucauccagaacaccaccugggaggaccacugccaguucagccgccccucccccaucggcuaccuggggcugcucagccagcggacgcgcgacaucuacaucagccggcgccugcugggcaccuucaccuggacccucuccgacagcgagggcaaggacacgcccgggggcuacugccugacccgguggaugcugaucgaggccgagcucaagugcuucgggaacaccgccguggccaagugcaacgagaagcacgacgaggaguucugcgacaugcugcgccuguucgacuucaacaagcaggccauccagcggcucaaggcgccggcccagauguccauccagcugaucaacaaggccgucaacgcccugaucaacgaccagcucaucaugaagaaccaccuccgcgacaucaugggcauccccuacugcaacuacagcaaguacugcuaccugaaccacaccacgaccgggaagaccucccugcccaagugcugccuggugagcaacggcuccuaccugaacgagacccacuucagcgacgacaucgagcagcaggccgacaacaugaucacggagaugcuccagaaggaguacauggagcggcagggcaagaccccgcuggggcugguggaccuguucgucuucuccaccagcuucuaccucaucuccaucuuccugcaccuggugaagauccccacccaccgccacguggucggcaagagcugccccaagccccaccggcucaaccacauggggaucugcuccugcggccuguacgggcagccgggcgugcccgugaaguggaagcgcugaggacuagucccuguucccagagcccacuuuuuuuucuuuuuuugaaauaaaauagccugucuuucagaucucaaaggcucuuuucagagccaccaaaaaaaaaaaaaaaaaaaaaaaaaaaaaaaaaaaaaaaaaaaaaaaaaaaaaaaaaaaaaaaaaaaaaaaaaaaaaaaaaaaaaaaaaaaaaaaaaaaaa

SEQ ID NO: 32160 - RNA, 1767 nt, Artificial Sequence
  mRNA product Design a-2 (hSL-A100) comprising derived and/or modified sequence from MOPV/LASV reassortant(IGS-1;Clade IV)__AFY05576__GPCmut7 (opt1)
aggagaguccgcucagccagguugcagaagcggcuuagcguguguccuaaucuucucucugcguguagguaggccugugccgcaaacaagcuuaccaugggccagaucgugaccuucuuccaggaggucccccacgugaucgaggaggugaugaacaucguccugaucgcccucagcgugcuggccgugcugaaggggcucuacaacuucgcgaccugcggccuggucgggcuggugacguuccuccugcugugcggccgcuccugcaccaccagccucuacaaggggguguacgagcugcagacccuggagcucaacauggagacgcugaacaugaccaugccgcuguccugcaccaagaacaacagccaccacuacaucauggucggcaacgagaccggccucgagcugacgcugaccaacaccuccaucaucaaccacaaguucugcaaccucagcgacgcccacaagaagaaccuguacgaccacgcccugauguccaucaucagcaccuuccaccucuccauccccaacuucaaccaguacgaggccaugagcugcgacuucaacgggggcaagaucuccgugcaguacaaccugagccacuccuacgccggggacgcggccaaccacugcggcacgguggccaacgggguccugcagaccuucaugcggauggccuggggcggcagcuacaucgcgcucgacuccgggcgcggcaacugggacugcaucaugaccagcuaccaguaccugaucauccagaacaccacgugggaggaccacugccaguucucccggcccagccccaucggguaccugggccuccugucccagcgcacccgggacaucuacaucagccgccggcugcucggcaccuucaccuggacgcugagcgacuccgagggggaggacaccccgggcggguacugccugacccgcuggaugcucaucgaggccgagcugaagugcuucggcaacaccgccguggccaagugcaacgagaagcacgacgaggaguucugcgacaugcugcggcuguucgacuucaacaagcaggccauccagcgccugaaggcgcccgcccagaugagcauccagcugaucaacaaggccgugaacgcccucaucaacgaccagcugaucaugaagaaccaccuccgggacaucauggggauccccuacugcaacuacuccaaguacugcuaccucaaccacacgaccaccggccgcaccagccugcccaagugcugccuggucuccaacggcagcuaccucaacgagacgcacuucuccgacgacaucgagcagcaggccgacaacaugaucaccgagaugcugcagaaggaguacauggagcggcaggggaagaccccgcugggccugguggaccucuucguguucagcaccuccuucuaccugaucagcaucuuccugcaccucgucaagauccccacgcaccgccacaucguggggaaguccugccccaagccccaccggcugaaccacaugggcaucugcagcugcgggcuguacaagcagccgggcgugcccgucaaguggaagcgcugaggacuagucccuguucccagagcccacuuuuuuuucuuuuuuugaaauaaaauagccugucuuucagaucucaaaggcucuuuucagagccaccaaaaaaaaaaaaaaaaaaaaaaaaaaaaaaaaaaaaaaaaaaaaaaaaaaaaaaaaaaaaaaaaaaaaaaaaaaaaaaaaaaaaaaaaaaaaaaaaaaaaa

SEQ ID NO: 32161 - RNA, 1767 nt, Artificial Sequence
  mRNA product Design a-2 (hSL-A100) comprising derived and/or modified sequence from LASV(LM765-SLE-2012;Clade IV)__AIT17814__GPCmut7 (opt1)
aggagaguccgcucagccagguugcagaagcggcuuagcguguguccuaaucuucucucugcguguagguaggccugugccgcaaacaagcuuaccaugggccagaucgugaccuucuuccaggaggucccccacgugaucgaggaggugaugaacaucguccugaucgcccucagcauccuggccgugcugaaggggcucuacaacuucgcgaccugcggccugguggggcuggucacguuccuccugcugugcggccgcuccugcaccaccagccucuacaaggggguguacgagcugcagacccuggagcucaacauggagacgcugaacaugaccaugccgcuguccugcaccaagaacaacagccaccacuacaucauggugggcaacgagaccggccucgagcugacgcugaccaacaccuccaucaucgaccacaaguucugcaaccucagcgacgcccaccggaagaaccuguacgaccacgcccugauguccaucaucagcaccuuccaccucuccauccccaacuucaaccaguacgaggccaugagcugcgacuucaacgggggcaagaucuccguccaguacaaccugagccacuccuacgccaaggacgcggccgaccacugcgggacgguggccaacggcgugcugcagaccuucaugcgcauggccuggggcgggagcuacaucgcgcucgacuccggccgggggcgcugggacugcaucaugaccagcuaccaguaccugaucauccagaacaccacgugggaggaccacugccaguucucccggcccagccccaucggcuaccuggggcuccugucccagcgcacccgggacaucuacaucagccgccggcugcucggcaccuucaccuggacgcugagcgacuccgagggcaaggacacccccgggggcuacugccugacccgcuggaugcucaucgaggccgagcugaagugcuucgggaacaccgccgucgccaagugcaacgagaagcacgacgaggaguucugcgacaugcugcggcuguucgacuucaacaagcaggccauccagcgccugaaggcgccggcccagaugagcauccagcugaucaacaaggccgugaacgcccucaucaacgaccagcugaucaugaagaaccaccuccgggacaucaugggcauccccuacugcaacuacuccaaguacugcuaccucaaccacacgaccaccgggaagaccagccugcccaagugcugccugguguccaacggcagcuaccucaacgagacgcacuucuccgacgacaucgagcagcaggccgacaacaugaucaccgagaugcugcagaaggaguacauggagcgccagggcaagaccccgcuggggcuggucgaccucuucguguucagcaccuccuucuaccugaucagcaucuuccugcaccucgugaagauccccacgcaccggcacaucgucggcaagcccugccccaagccgcaccgccugaaccacauggggaucugcuccugcggccuguacaagcagcccggggugcccgugaaguggaagcggugaggacuagucccuguucccagagcccacuuuuuuuucuuuuuuugaaauaaaauagccugucuuucagaucucaaaggcucuuuucagagccaccaaaaaaaaaaaaaaaaaaaaaaaaaaaaaaaaaaaaaaaaaaaaaaaaaaaaaaaaaaaaaaaaaaaaaaaaaaaaaaaaaaaaaaaaaaaaaaaaaaaaa

SEQ ID NO: 32162 - RNA, 1767 nt, Artificial Sequence
  mRNA product Design a-2 (hSL-A100) comprising derived and/or modified sequence from LASV(LM776-SLE-2012;Clade IV)__AIT17824__GPCmut7 (opt1)
aggagaguccgcucagccagguugcagaagcggcuuagcguguguccuaaucuucucucugcguguagguaggccugugccgcaaacaagcuuaccaugggccagaucgugaccuucuuccaggaggucccccacgugaucgaggaggugaugaacaucguccugaucgcccucagcauccuggccgugcugaaggggcucuacaacuucgcgaccugcggccugguggggcuggucacguuccuccugcugugcggccgcuccugcaccaccagcguguacaaggggguguacgagcuccagacccuggagcugaacauggagacgcucaacaugaccaugccgcuguccugcaccaagaacaacagccaccacuacaucauggucggcaacgagaccggccuggagcucacgcugaccaacaccuccaucaucaaccacaaguucugcaaccugagcgacgcccacaagaagaaccucuacgaccacgcccugauguccaucaucagcaccuuccaccuguccauccccaacuucaaccaguacgaggccaugagcugcgacuucaacgggggcaagaucuccgugcaguacaaccucagccacuccuacgccggggacgcggccaaccacugcggcacgguggccaacgggguccugcagaccuucaugcggauggccuggggcggcagcuacaucgcgcuggacuccgggcacggcaagugggacugcaucaugaccagcuaccaguaccucaucauccagaacaccacgugggaggaccacugccaguucucccgccccagccccaucggguaccugggccugcucucccagcggacccgcgacaucuacaucagccggcgccugcugggcaccuucaccuggacgcucagcgacuccgaggggaaggacaccccgggcggguacugccugacccgguggaugcugaucgaggccgagcucaagugcuucggcaacaccgccguggccaagugcaacgagaagcacgacgaggaguucugcgacaugcugcgccuguucgacuucaacaagcaggccauccagcggcucaaggcgcccgcccagaugagcauccagcugaucaacaaggccgugaacgcccugaucaacgaccagcucaucaugaagaaccaccuccgcgacaucauggggauccccuacugcaacuacuccaaguacugcuaccugaaccacacgaccaccggcaagaccagccugcccaagugcugccuggucuccaacggcagcuaccugaacgagacgcacuucuccgacgacaucgagcagcaggccgacaacaugaucaccgagaugcuccagaaggaguacauggagcggcaggggaagaccccgcugggccugguggaccuguucguguucagcaccuccuucuaccucaucagcaucuuccugcaccuggucaagauccccacgcaccgccacaucguggggaaguccugccccaagccccaccggcucaaccacaugggcaucugcagcugcgggcuguacaagcagccgggcgugcccguccgcuggaagcggugaggacuagucccuguucccagagcccacuuuuuuuucuuuuuuugaaauaaaauagccugucuuucagaucucaaaggcucuuuucagagccaccaaaaaaaaaaaaaaaaaaaaaaaaaaaaaaaaaaaaaaaaaaaaaaaaaaaaaaaaaaaaaaaaaaaaaaaaaaaaaaaaaaaaaaaaaaaaaaaaaaaaa

SEQ ID NO: 32163 - RNA, 1767 nt, Artificial Sequence
  mRNA product Design a-2 (hSL-A100) comprising derived and/or modified sequence from LASV(Mad39;Clade IV)__ANH09722__GPCmut7 (opt1)
aggagaguccgcucagccagguugcagaagcggcuuagcguguguccuaaucuucucucugcguguagguaggccugugccgcaaacaagcuuaccaugggccagaucgugaccuucuuccaggaggucccccacgugaucgaggaggugaugaacaucguccugaucgcccucagcauccuggccgugcugaaggggcucuacaacguggcgaccugcggccugaucgggcuggucacguuccuccugcugugcggccgcuccugcaccaccacccucuacaaggggguguacgagcugcaggcccuggagcucaacauggagacgcugaacaugaccaugccgcugagcugcaccaagaacaacucccaccacuacauccgggugggcaacgagaccggccucgagcugacgcugaccaacaccagccucaucaaccacaaguucugcaaccuguccgacgcccacaagaagaaccuguacgaccacgcccucaugagcaucaucuccaccuuccaccugagcauccccaacuucaaccaguacgaggccauguccugcgacuucaacgacgggaagaucagcguccaguacaaccugucccacacguacgcgggcgacaccgccaaccacugcgggaccguggccaacggcgugcuccagaccuucaugcgcauggccuggggcgggagcuacaucgcgcuggacuccggccgcgggggcugggacugcaucaugacgagcuaccaguaccugaucauccagaacaccaccugggaggaccacugccaguucucccggcccagccccaucggguaccucggccugcugucccagcggacccgcgacaucuacaucagccggcgccuccugggcacguucaccuggacccuguccgacagcgaggggaaggacaccccgggcggguacugccucacgcgguggaugcugaucgaggccgagcugaagugcuucggcaacaccgccgucgccaagugcaacgagaagcacgacgaggaguucugcgacaugcuccgccuguucgacuucaacaagcaggccauccagcggcugaaggcgcccgcccagaugagcauccagcucaucaacaaggccgugaacgcccugaucaacgaccagcugaucaugaagaaccaccuccgcgacaucauggggauccccuacugcaacuacuccaaguacugcuaccugaaccacaccgugaccggcaagacgagccugcccaagugcugccucgucuccaacggcagcuaccugaacgagacccacuucuccgacgacaucgagcagcaggccgacaacaugaucaccgagaugcugcagaaggaguacauggagcggcaggggaagaccccgcugggccucguggaccuguucguguucagcacguccuucuaccugaucagcaucuuccuccaccuggucaagauccccacccaccgccacgugguggggaagcccugccccaagccgcaccggcugaaccacaugggcaucugcuccugcggguucuacaagcagcccggcguccccgugcgcuggaagcggugaggacuagucccuguucccagagcccacuuuuuuuucuuuuuuugaaauaaaauagccugucuuucagaucucaaaggcucuuuucagagccaccaaaaaaaaaaaaaaaaaaaaaaaaaaaaaaaaaaaaaaaaaaaaaaaaaaaaaaaaaaaaaaaaaaaaaaaaaaaaaaaaaaaaaaaaaaaaaaaaaaaaa

SEQ ID NO: 32164 - RNA, 1767 nt, Artificial Sequence
  mRNA product Design a-2 (hSL-A100) comprising derived and/or modified sequence from LASV(Z0947-SLE-2011;Clade IV)__AIT17840__GPCmut7 (opt1)
aggagaguccgcucagccagguugcagaagcggcuuagcguguguccuaaucuucucucugcguguagguaggccugugccgcaaacaagcuuaccaugggccagaucgugaccuucuuccaggaggucccccacgugaucgaggaggugaugaacaucguccugaucgcccucagcauccuggccgugcugaaggggcucuacaacuucgcgaccugcggccugguggggcuggucacguuccuccugcugugcggccgcuccugcaccaucagccucuacaaggggguguacgagcugcagacccuggagcucaacauggagacccugaacaugacgaugccgcuguccugcaccaagaacaacagccaccacuacaucauggugggcaacgagaccggccucgagcugacccugacgaacaccuccaucaucaaccacaaguucugcaaccucagcgacgcccacaagaagaaccuguacgaccacgcccugauguccaucaucagcaccuuccaccucuccauccccaacuucaaccaguacgaggccaugagcugcgacuucaacgggggcaagaucuccguccaguacaaccugagccacuccuacgccggggacgcggccaaccacugcggcaccguggccaacggggugcugcagacguucaugcggauggccuggggcggcagcuacaucgcgcucgacuccgggcgcgaccggugggacugcaucaugaccagcuaccaguaccugaucauccagaacaccaccugggaggaccacugccaguucucccgccccagccccaucggcuaccuggggcuccugucccagcggacgcgcgacaucuacaucagccggcgccugcucggcaccuucaccuggacccugagcgacuccgagggcaaggacacgcccgggggcuacugccugacccgguggaugcucaucgaggccgagcugaagugcuucgggaacaccgccgucgccaagugcaacgagaagcacgacgaggaguucugcgacaugcugcgccucuucgacuucaacaagcaggccauccagcggcugaaggcgccggcccagaugagcauccagcugaucaacaaggccgugaacgcccucaucaacgaccagcugaucaugaagaaccaccuccgcgacaucaugggcauccccuacugcaacuacuccaaguacugcuaccugaaccacaccacgaccgggaagaccagccugcccaagugcugccugguguccaacggcagcuaccucaacgagacccacuucuccgacgacaucgagcagcaggccgacaacaugaucacggagaugcugcagaaggaguacauggagcggcagggcaagaccccgcuggggcuggucgaccucuucguguucagcaccuccuucuaccugaucagcaucuuccugcaccucgugaagauccccacccaccgccacaucgucggcaagcccugccccaagccgcaccggcugaaccacauggggaucugcuccugcggccuguacaagcagcccggggugcccgugaaguggaagcgcugaggacuagucccuguucccagagcccacuuuuuuuucuuuuuuugaaauaaaauagccugucuuucagaucucaaaggcucuuuucagagccaccaaaaaaaaaaaaaaaaaaaaaaaaaaaaaaaaaaaaaaaaaaaaaaaaaaaaaaaaaaaaaaaaaaaaaaaaaaaaaaaaaaaaaaaaaaaaaaaaaaaaa

SEQ ID NO: 32165 - RNA, 1767 nt, Artificial Sequence
  mRNA product Design a-2 (hSL-A100) comprising derived and/or modified sequence from LASV(Josiah;Clade IV)__NP_694870__GPCmut7 (opt4)
aggagaguccgcucagccagguugcagaagcggcuuagcguguguccuaaucuucucucugcguguagguaggccugugccgcaaacaagcuuaccaugggccagaucgugaccuucuuccaggaggugccccacgugaucgaggaggugaugaacaucgugcugaucgcccugagcgugcuggccgugcugaagggccuguacaacuucgccaccugcggccuggugggccuggugaccuuccugcugcugugcggcagaagcugcaccaccagccuguacaagggcguguacgagcugcagacccuggagcugaacauggagacccugaacaugaccaugccccugagcugcaccaagaacaacagccaccacuacaucauggugggcaacgagaccggccuggagcugacccugaccaacaccagcaucaucaaccacaaguucugcaaccugagcgacgcccacaagaagaaccuguacgaccacgcccugaugagcaucaucagcaccuuccaccugagcauccccaacuucaaccaguacgaggccaugagcugcgacuucaacggcggcaagaucagcgugcaguacaaccugagccacagcuacgccggcgacgccgccaaccacugcggcaccguggccaacggcgugcugcagaccuucaugagaauggccuggggcggcagcuacaucgcccuggacagcggcagaggcaacugggacugcaucaugaccagcuaccaguaccugaucauccagaacaccaccugggaggaccacugccaguucagcagacccagccccaucggcuaccugggccugcugagccagagaaccagagacaucuacaucagcagaagacugcugggcaccuucaccuggacccugagcgacagcgagggcaaggacacccccggcggcuacugccugaccagauggaugcugaucgaggccgagcugaagugcuucggcaacaccgccguggccaagugcaacgagaagcacgacgaggaguucugcgacaugcugagacuguucgacuucaacaagcaggccauccagagacugaaggcccccgcccagaugagcauccagcugaucaacaaggccgugaacgcccugaucaacgaccagcugaucaugaagaaccaccugagagacaucaugggcauccccuacugcaacuacagcaaguacugcuaccugaaccacaccaccaccggcagaaccagccugcccaagugcugccuggugagcaacggcagcuaccugaacgagacccacuucagcgacgacaucgagcagcaggccgacaacaugaucaccgagaugcugcagaaggaguacauggagagacagggcaagaccccccugggccugguggaccuguucguguucagcaccagcuucuaccugaucagcaucuuccugcaccuggugaagauccccacccacagacacaucgugggcaagagcugccccaagccccacagacugaaccacaugggcaucugcagcugcggccuguacaagcagcccggcgugcccgugaaguggaagagaugaggacuagucccuguucccagagcccacuuuuuuuucuuuuuuugaaauaaaauagccugucuuucagaucucaaaggcucuuuucagagccaccaaaaaaaaaaaaaaaaaaaaaaaaaaaaaaaaaaaaaaaaaaaaaaaaaaaaaaaaaaaaaaaaaaaaaaaaaaaaaaaaaaaaaaaaaaaaaaaaaaaaa

SEQ ID NO: 32166 - RNA, 1764 nt, Artificial Sequence
  mRNA product Design a-2 (hSL-A100) comprising derived and/or modified sequence from LASV(LP;Clade I)__AAF86701__GPCmut7 (opt4)
aggagaguccgcucagccagguugcagaagcggcuuagcguguguccuaaucuucucucugcguguagguaggccugugccgcaaacaagcuuaccaugggccagaucaucaccuucuuccaggaggugccccacgugaucgaggaggugaugaacaucgugcugaucgcccugagccugcuggccauccugaagggccuguacaacaucgccaccugcggcaucaucggccugguggccuuccuguuccugugcggcaagagcugcagccugacccugaagggcggcuacgagcugcagacccuggagcugaacauggagacccugaacaugaccaugccccugagcugcaccaagaacagcagccaccacuacaucagagugggcaacgagaccggccuggagcugacccugaccaacaccagcaucaucaaccacaaguucugcaaccugagcgacgcccacaagaagaaccuguacgaccacgcccugaugagcaucaucagcaccuuccaccugagcauccccaacuucaaccaguacgaggccaugagcugcgacuucaacggcggcaagaucagcgugcaguacaaccugagccacagcuacgccggcgacgccgccgagcacugcggcaccguggccaacggcgugcugcagaccuucaugagaauggccuggggcggcagauacaucgcccuggacagcggcaagggcaacugggacugcaucaugaccagcuaccaguaccugaucauccagaacaccaccugggaggaccacugccaguucagcagacccagccccaucggcuaccugggccugcugagccagagaaccagagacaucuacaucagcagaagacugcugggcaccuucaccuggacccugagcgacagcgagggcaacgagacccccggcggcuacugccugaccagauggaugcugaucgaggccgagcugaagugcuucggcaacaccgccguggccaagugcaacgagaagcacgacgaggaguucugcgacaugcugagacuguucgacuucaacaagcaggccaucagaagacugaaggcccccgcccagaugagcauccagcugaucaacaaggccgugaacgcccugaucaacgaccagcugaucaugaagaaccaccugagagacaucaugggcauccccuacugcaacuacagcaaguacugcuaccugaaccacaccagcagcggcagaaccagccugcccaagugcugccugaucagcaacggcagcuaccugaacgagacccaguucagcgacgacaucgagcagcaggccgacaacaugaucaccgagaugcugcagaaggaguacaucgagagacagggcaagaccccccugggccugguggacaucuucaucuucagcaccagcuucuaccugaucagcaucuuccugcaccugaucaagauccccacccacagacacaucgugggcaagcccugccccaagccccacagacugaaccacaugggcgugugcagcugcggccuguacaagcaccccggcgugcccaccaaguggaagagaugaggacuagucccuguucccagagcccacuuuuuuuucuuuuuuugaaauaaaauagccugucuuucagaucucaaaggcucuuuucagagccaccaaaaaaaaaaaaaaaaaaaaaaaaaaaaaaaaaaaaaaaaaaaaaaaaaaaaaaaaaaaaaaaaaaaaaaaaaaaaaaaaaaaaaaaaaaaaaaaaaaaaa

SEQ ID NO: 32167 - RNA, 1764 nt, Artificial Sequence
  mRNA product Design a-2 (hSL-A100) comprising derived and/or modified sequence from LASV(803213;Clade II)__AAF86703__GPCmut7 (opt4)
aggagaguccgcucagccagguugcagaagcggcuuagcguguguccuaaucuucucucugcguguagguaggccugugccgcaaacaagcuuaccaugggccagaucaucaccuucuuccaggaggugccccacgugaucgaggaggugaugaacaucgugcugaucgcccugagccugcuggccauccugaagggcaucuacaacguggccaccugcggccuguucggccugaucagcuuccugcugcugugcggcagaagcugcagcgugaccuacaagggcguguacgagcugcagacccuggagcugaacauggccaaccugaacaugaccaugccccugagcugcaccaagaacaacagccaccacuacaucauggugggcaacgagaccggccuggagcugacccugaccaacaccagcaucaucaaccacaaguucugcaaccugagcgacgcccacaagaagaaccuguacgaccacgcccugaugagcaucaucagcaccuuccaccugagcauccccaacuucaaccaguacgaggccaugagcugcgacuucaacggcggcaagaucagcgugcaguacaaccugagccacagcuucgccguggacgccgccaaccacugcggcaccaucgccaacggcgugcugcagaccuucaugagaauggccuggggcggcagcuacaucgcccuggacagcggcaagggcaacugggacugcaucaugaccagcuaccaguaccugaucauccagaacaccaccugggaggaccacugccaguucagcagacccagccccaucggcuaccugggccugcugagccagagaaccagagacaucuacaucagcagaagacugcugggcaccuucaccuggacccugagcgacagcgagggcaacgaggcccccggcggcuacugccugaccagauggaugcugaucgaggccgagcugaagugcuucggcaacaccgccguggccaagugcaacgagaagcacgacgaggaguucugcgacaugcugagacuguucgacuucaacaagcaggccaucaagagacugaagacccccgcccagaugagcauccagcugaucaacaaggccgugaacgcccugaucaacgaccagcugaucaugaagaaccaccugagagacaucaugggcauccccuacugcaacuacagcagauacugcuaccugaaccacaccgugaccggcaagaccagccugcccagaugcugccuggugagcaacggcagcuaccugaacgagacccacuucagcgacgacaucgagcagcaggccgacaacaugaucaccgagaugcugcagaaggaguacauggacagacagggcaagaccccccugggccugguggaccuguucguguucagcaccagcuucuaccugaucagcaucuuccugcaccuggugaagauccccacccacagacacaucgugggcaagcccugccccaagccccacagacugaaccacaugggcaucugcagcugcggccuguacaagcaccccggcgugcccgugaaguggaagagaugaggacuagucccuguucccagagcccacuuuuuuuucuuuuuuugaaauaaaauagccugucuuucagaucucaaaggcucuuuucagagccaccaaaaaaaaaaaaaaaaaaaaaaaaaaaaaaaaaaaaaaaaaaaaaaaaaaaaaaaaaaaaaaaaaaaaaaaaaaaaaaaaaaaaaaaaaaaaaaaaaaaaa

SEQ ID NO: 32168 - RNA, 1764 nt, Artificial Sequence
  mRNA product Design a-2 (hSL-A100) comprising derived and/or modified sequence from LASV(GA391;Clade III)__CAA36645__GPCmut7 (opt4)
aggagaguccgcucagccagguugcagaagcggcuuagcguguguccuaaucuucucucugcguguagguaggccugugccgcaaacaagcuuaccaugggccagaucgugaccuucuuccaggaggugccccacgugaucgaggaggugaugaacaucgugcugaucgcccugagcauccuggccauccugaagggccuguacaacguggccaccugcggccugaucggccuggugaccuuccugcugcugagcggcagaagcugcagccugaucuacaagggcaccuacgagcugcagacccuggagcugaacauggagacccugaacaugaccaugccccugagcugcaccaagaacaacagccaccacuacaucagagugggcaacgagaccggccuggagcugacccugaccaacaccagcauccugaaccacaaguucugcaaccugagcgacgcccacaagagaaaccuguacgaccacagccugaugagcaucaucagcaccuuccaccugagcauccccaacuucaaccaguacgaggccaugagcugcgacuucaacggcggcaagaucaccgugcaguacaaccugagccacagcuucgccguggacgccgccggccacugcggcacccuggccaacggcgugcugcagaccuucaugagaauggccuggggcggcagcuacaucgcccuggacagcggcagaggcaacugggacugcaucaugaccagcuaccaguaccugaucauccagaacaccaccugggacgaccacugccaguucagcagacccagccccaucggcuaccugggccugcugagccagagaaccagagacaucuacaucagcagaagacugcugggcaccuucaccuggacccugagcgacagcgagggcaacgagacccccggcggcuacugccugaccagauggaugcugaucgaggccgagcugaagugcuucggcaacaccgccguggccaagugcaacgagaagcacgacgaggaguucugcgacaugcugagacuguucgacuucaacaagcaggccaucagaagacugaagacccccgcccagaugagcauccagcugaucaacaaggccgugaacgcccugaucaacgaccagcugaucaugaagaaccaccugagagacaucaugggcauccccuacugcaacuacagcagauacugcuaccugaaccacaccagcaccggcaagaccagccugcccagaugcugccugaucagcaacggcagcuaccugaacgagaccaaguucagcgacgacaucgagcagcaggccgacaacaugaucaccgagaugcugcagaaggaguacaucgacagacagggcaagaccccccugggccugguggaccuguucguguucagcaccagcuucuaccugaucagcaucuuccugcaccuggugaagauccccacccacagacacaucgugggcaagcccugccccaagccccacagacugaaccacaugggcaucugcagcugcggccuguacaagcagcccggcgugcccgugagauggaagagaugaggacuagucccuguucccagagcccacuuuuuuuucuuuuuuugaaauaaaauagccugucuuucagaucucaaaggcucuuuucagagccaccaaaaaaaaaaaaaaaaaaaaaaaaaaaaaaaaaaaaaaaaaaaaaaaaaaaaaaaaaaaaaaaaaaaaaaaaaaaaaaaaaaaaaaaaaaaaaaaaaaaaa

SEQ ID NO: 32169 - RNA, 1767 nt, Artificial Sequence
  mRNA product Design a-2 (hSL-A100) comprising derived and/or modified sequence from LASV(AV;Clade V)__CCA30314__GPCmut7 (opt4)
aggagaguccgcucagccagguugcagaagcggcuuagcguguguccuaaucuucucucugcguguagguaggccugugccgcaaacaagcuuaccaugggccagaucgugaccuucuuccaggaggugccccacgugaucgaggaggugaugaacaucgugcugaucgcccugagcauccuggccgugcugaagggccuguacaacaucgccaccugcggccugaucggccugaucaccuuccugcugcugugcggcagaagcugcagcagcaaccuguacaagggcguguacgagcugcagagccuggaccugaacauggagacccugaacaugaccaugccccugagcugcaccaagaacaacagccaccacuacaucagagugggcaacgacaccggccuggagcugacccugaccaacaccagcauccugaaccacaaguucugcaaccugagcgacgcccacaagaaggaccuguacgaccacgcccugaugagcaucaucagcaccuuccaccugagcauccccaacuucaaccaguacgaggccaugagcugcgacuucaacggcggcaagaucagcgugcaguacaaccugagccacagcuacgccaucgacgccgccaaccacugcggcaccguggccaacggcauccugcagaccuucaugagaauggccuggggcggcagcuacaucgcccuggacagcggcagaggcaacugggacugcaucaugaccagcuaccaguaccugaucauccagaacaccaccugggagaaccacugccaguucagcagacccagccccaucggcuaccugggccugcugagccagagaaccagagacaucuacaucagcagaagacugcugggcaccuucaccuggacccugagcgacagcgagggcaacgccacccccggcggcuacugccugaccagauggaugcugaucgaggccgagcugaagugcuucggcaacaccgccguggccaagugcaacgagaagcacgacgaggaguucugcgacaugcugagacuguucgacuucaacaagcaggccaucagcagacugaagagccccgcccagaugagcauccagcugaucaacaaggccgugaacgcccugaucaacgaccagcugaucaugaagaaccaccugagagacaucaugggcauccccuacugcaacuacagcaaguacugcuaccugaaccacaccaucaccggcaagaccagccugcccaagugcugccuggugagcaacggcagcuaccugaacgagacccacuucagcgacgacaucgagcagcaggccgacaacaugaucaccgagaugcugcagaaggaguacauggagagacagggcaagaccccccugggccugguggaccuguucguguucagcaccagcuucuaccugaucagcaucuuccugagacuggugaagauccccacccacagacacaucgugggcaagcccugccccaagccccacagacugaaccacaugggcaucugcagcugcggccuguacaagcagcccggcgugcccgugagauggaagagaugaggacuagucccuguucccagagcccacuuuuuuuucuuuuuuugaaauaaaauagccugucuuucagaucucaaaggcucuuuucagagccaccaaaaaaaaaaaaaaaaaaaaaaaaaaaaaaaaaaaaaaaaaaaaaaaaaaaaaaaaaaaaaaaaaaaaaaaaaaaaaaaaaaaaaaaaaaaaaaaaaaaaa

SEQ ID NO: 32170 - RNA, 1764 nt, Artificial Sequence
  mRNA product Design a-2 (hSL-A100) comprising derived and/or modified sequence from LASV(Togo/2016/7082;Clade VI)__AMR44577__GPCmut7 (opt4)
aggagaguccgcucagccagguugcagaagcggcuuagcguguguccuaaucuucucucugcguguagguaggccugugccgcaaacaagcuuaccaugggccagaucaucaccuucuuccaggaggugccccacgugaucgaggaggugaugaacaucgugcugaucgcccugagccugcuggccauccugaagggcguguacaacguggccaccugcggcaucaucggccuggugaccuuccuguuccugugcggcagaagcugcagccugaucuacaagggcagcuacgagcugcagacccuggagcugaacauggagacccugaacaugaccaugccccugagcugcaccaagaacagcagccaccacuacaucagagugggcaacgagaccggccuggagcugacccugaccaacaccagcaucaucaaccacaaguucugcaaccugagcgacgcccacaagagaaaccuguacgaccacgcccugaugagcauccugagcaccuuccaccugagcauccccaacuucaaccaguacgaggccaugagcugcgacuucaacggcggcaagaucagcgugcaguacaaccugagccacgccuacgccguggacgccgccgagcacugcggcaccguggccaacggcgugcugcagaccuucaugagaauggccuggggcggcagcuacaucgcccuggacagcggcagaggcaacugggacugcaucaugaccagcuaccaguaccugaucauccagaacaccaccugggaggaccacugccaguucagcagacccagccccaucggcuaccugggccugcugagccagagaaccagagacaucuacaucagcagaagacugcugggcaccuucaccuggacccugagcgacagcgagggcaacgagacccccggcggcuacugccugaccagauggaugcugaucgaggccgagcugaagugcuucggcaacaccgccguggccaagugcaacgagaagcacgacgaggaguucugcgacaugcugagacuguucgacuucaacaagcaggccauccagagacugaagagccccgcccagaugagcauccagcugaucaacaaggccgugaacgcccugaucaacgaccagcugaucaugaagaaccaccugagagacaugaugggcauccccuacugcaacuacagcaaguacugcuaccugaaccacaccagcagcggcagaaccagccugcccaagugcugccuggugagcaacggcagcuaccugaacgagacccacuucagcgacgacaucgagcagcaggccgacaacaugaucaccgagaugcugcagaaggaguacaucgacagacagggcaagaccccccugggccugguggaccuguucguguucagcaccagcuucuaccugaucagcaucuuccugcaccugaucaagauccccacccacagacacaucgugggcaagcccugccccaagccccacagacugaaccacaugggcaucugcagcugcggccuguacaagcagcccggcgugcccaccagauggaagagaugaggacuagucccuguucccagagcccacuuuuuuuucuuuuuuugaaauaaaauagccugucuuucagaucucaaaggcucuuuucagagccaccaaaaaaaaaaaaaaaaaaaaaaaaaaaaaaaaaaaaaaaaaaaaaaaaaaaaaaaaaaaaaaaaaaaaaaaaaaaaaaaaaaaaaaaaaaaaaaaaaaaaa

SEQ ID NO: 32171 - RNA, 1764 nt, Artificial Sequence
  mRNA product Design a-2 (hSL-A100) comprising derived and/or modified sequence from LASV(KAK-428;Clade n.d. (VII))__ANH09740__GPCmut7 (opt4)
aggagaguccgcucagccagguugcagaagcggcuuagcguguguccuaaucuucucucugcguguagguaggccugugccgcaaacaagcuuaccaugggccagaucgugaccuucuuccaggaggugccccacgugaucgaggaggugaugaacaucgugcugaucgcccugagccugcuggccauccugaagggccuguacaacuucgccaccugcggcgugaucggccugaucaccuuccugcugcugugcggcagaagcugcagcgccaccuacaagggccaguacgagcugcagacccuggagcugaacauggagagccugaacaugaccaugccccugagcugcaccaagaacaacagccaccacuacaucagagccggcaacaacaccggccuggagcugacccugaccaacaccagcaucaucagccacaaguucugcaaccugagcgacgcccacaagaagaaccuguacgaccacacccugaugagcaucaucaccaccuuccaccugagcauccccaacuucaaccaguacgaggccaugagcugcgacuucaacggcggcaagaucagcauccaguacaaccugagccacagcuacgccggcgacgccgcccagcacugcggcaccguggccaacggcgugcugcagaccuucaugagaauggccuggggcggcagcuaccuggcccuggacagcggcagaagaggcugggacugcaucaucagcagcuaccaguaccugaucauccagaacaccaccugggacgaccacugccaguucagcagacccagccccaucggcuaccugggcuucgugagccagaagaccagagacaucuacaucagcagaagacugcugggcaccuucaccuggacccugagcgacagcgagggccacgacaugcccggcggcuacugccugaccagauggaugcugaucgaggccgaccugaagugcuucggcaacaccgccguggccaagugcaacgagaagcacgacgaggaguucugcgacauguggagacuguucgacuucaacaagcaggccauccagagacugaaggcccccgcccagaugaacauccagcugaucaacaaggccgugaacgcccugaucaacgaccagcugaugaugaagaaccaccugagagacaucaugggcauccccuacugcaacuacagcaaguucugcuaccugaacaacaccaccaccggcagaaccagccugcccagaugcugccugaucagcaacggcagcuaccugaacgagacccacuucagcgacgacaucgagcagcaggccgacaacaugaucaccgagaugcugcagaaggaguacauggacagacagggcaagaccccccugggccugguggaccuguucguguucagcaccagcuucuaccugaucaccaucuuccugcaccuggugaagauccccacccacagacacaucgugggcaagcccugccccaagccccacagacugaaccacaugggcaucugcagcugcggccuguacaagcagcccggcgugcccgugagauggaagagaugaggacuagucccuguucccagagcccacuuuuuuuucuuuuuuugaaauaaaauagccugucuuucagaucucaaaggcucuuuucagagccaccaaaaaaaaaaaaaaaaaaaaaaaaaaaaaaaaaaaaaaaaaaaaaaaaaaaaaaaaaaaaaaaaaaaaaaaaaaaaaaaaaaaaaaaaaaaaaaaaaaaaa

SEQ ID NO: 32172 - RNA, 1764 nt, Artificial Sequence; identical to SEQ ID NO: 32166
  mRNA product Design a-2 (hSL-A100) comprising derived and/or modified sequence from LASV(Pinneo-NIG-1969;Clade I)__AIT17836__GPCmut7 (opt4)

SEQ ID NO: 32173 - RNA, 1764 nt, Artificial Sequence
  mRNA product Design a-2 (hSL-A100) comprising derived and/or modified sequence from LASV(ISTH0009-NIG-2011;Clade II)__AIT17404__GPCmut7 (opt4)
aggagaguccgcucagccagguugcagaagcggcuuagcguguguccuaaucuucucucugcguguagguaggccugugccgcaaacaagcuuaccaugggccagaucaucaccuucuuccaggaggugccccacgugaucgaggaggugaugaacaucgugcugaucgcccugagccugcuggccauccugaagggcaucuacaacguggccaccugcggccuguucggccuggugagcuuccugcugcugugcggcagaagcugcagcaccaccuacaagggcguguacgagcugcagacccuggagcuggacauggccagccugaacaugaccaugccccugagcugcaccaagaacaacagccaccacuacaucauggugggcaacgagaccggccuggagcugacccugaccaacaccagcaucaucaaccacaaguucugcaaccugagcgacgcccacaagaagaaccuguacgaccacgcccugaugagcaucaucagcaccuuccaccugagcauccccaacuucaaccaguacgaggccaugagcugcgacuucaacggcggcaagaucagcgugcaguacaaccugagccacgccuacgccguggacgccgccaaccacugcggcaccaucgccaacggcgugcugcagaccuucaugagaauggccuggggcggcagcuacaucgcccuggacagcggcaagggcagcugggacugcaucaugaccagcuaccaguaccugaucauccagaacaccaccugggaggaccacugccaguucagcagacccagccccaucggcuaccugggccugcugagccagagaaccagagacaucuacaucagcagaagacugcugggcaccuucaccuggacccugagcgacagcgagggcaacgagacccccggcggcuacugccugaccagauggaugcugaucgaggccgagcugaagugcuucggcaacaccgccguggccaagugcaacgagaagcacgacgaggaguucugcgacaugcugagacuguucgacuucaacaagcaggccaucagaagacugaagacccccgcccagaugagcauccagcugaucaacaaggccgugaacgcccugaucaacgaccagcugaucaugaagaaccaccugagagacaucaugggcauccccuacugcaacuacagcaaguacugcuaccugaaccacaccgugaccggcaagaccagccugcccagaugcugccuggugagcaacggcagcuaccugaacgagacccacuucagcgacgacaucgagcagcaggccgacaacaugaucaccgagcugcugcagaaggaguacauggacagacagggcaagaccccccugggccugguggaccuguucguguucagcaccagcuucuaccugaucagcaucuuccugcaccugaucaagauccccacccacagacacaucaccggcaagcccugccccaagccccacagacugaaccacaugggcaucugcagcugcggccuguacaagcaccccggcgugcccgugaaguggaagagaugaggacuagucccuguucccagagcccacuuuuuuuucuuuuuuugaaauaaaauagccugucuuucagaucucaaaggcucuuuucagagccaccaaaaaaaaaaaaaaaaaaaaaaaaaaaaaaaaaaaaaaaaaaaaaaaaaaaaaaaaaaaaaaaaaaaaaaaaaaaaaaaaaaaaaaaaaaaaaaaaaaaaa

SEQ ID NO: 32174 - RNA, 1764 nt, Artificial Sequence
  mRNA product Design a-2 (hSL-A100) comprising derived and/or modified sequence from LASV(ISTH2010-NIG-2012;Clade II)__AIT17482__GPCmut7 (opt4)
aggagaguccgcucagccagguugcagaagcggcuuagcguguguccuaaucuucucucugcguguagguaggccugugccgcaaacaagcuuaccaugggccagaucaucaccuucuuccaggaggugccccacgugaucgaggaggugaugaacaucgugcugaucgcccugagccugcuggccauccugaagggcaucuacaacguggccaccugcggccuguucggccuggugagcuuccugcugcugugcggcagaagcugcagcaccaccuacaagggcguguacgagcugcagacccuggagcuggacauggccagccugaacaugaccaugccccugagcugcaccaagaacaacagccaccacuacaucauggugggcaacgagaccggccuggagcugacccugaccaacaccagcaucaucaaccacaaguucugcaaccugagcgacgcccacaagaagaaccuguacgaccacgcccugaugagcaucaucagcaccuuccaccugagcauccccaacuucaaccaguacgaggccaugagcugcgacuucaacggcggcaagaucagcgugcaguacaaccugagccacgccuacgccguggacgccgccaaccacugcggcaccaucgccaacggcgugcugcagaccuucaugagaauggccuggggcggcagcuacaucgcccuggacagcggcaagggcagcugggacugcaucaugaccagcuaccaguaccugaucauccagaacaucaccugggaggaccacugccaguucagcagacccagccccaucggcuaccugggccugcugagccagagaaccagagacaucuacaucagcagaagacugcugggcaccuucaccuggacccugagcgacagcgagggcaacgagacccccggcggcuacugccugaccagauggaugcugaucgaggccgagcugaagugcuucggcaacaccgccguggccaagugcaacgagaagcacgacgaggaguucugcgacaugcugagacuguucgacuucaacaagcaggccaucagaagacugaagacccccgcccagaugagcauccagcugaucaacaaggccgugaacgcccugaucaacgaccagcugaucaugaagaaccaccugagagacaucaugggcauccccuacugcaacuacagcaaguacugcuaccugaaccacaccgugaccggcaagaccagccugcccagaugcugccuggugagcaacggcagcuaccugaacgagacccacuucagcgacgacaucgagcagcaggccgacaacaugaucaccgagcugcugcagaaggaguacaucgacagacagggcaagaccccccugggccugguggaccuguucguguucagcaccagcuucuaccugaucagcaucuuccugcaccuggugaagauccccacccacagacacguggugggcaagcccugccccaagccccacagacugaaccacaugggcaucugcagcugcggccuguacaagcaccccggcgugcccgugaaguggaagagaugaggacuagucccuguucccagagcccacuuuuuuuucuuuuuuugaaauaaaauagccugucuuucagaucucaaaggcucuuuucagagccaccaaaaaaaaaaaaaaaaaaaaaaaaaaaaaaaaaaaaaaaaaaaaaaaaaaaaaaaaaaaaaaaaaaaaaaaaaaaaaaaaaaaaaaaaaaaaaaaaaaaaa

SEQ ID NO: 32175 - RNA, 1764 nt, Artificial Sequence
  mRNA product Design a-2 (hSL-A100) comprising derived and/or modified sequence from LASV(Lassa virus/H.sapiens-wt/NGA/2015/ISTH_0543;Clade II)__AVO03639__GPCmut7 (opt4)
aggagaguccgcucagccagguugcagaagcggcuuagcguguguccuaaucuucucucugcguguagguaggccugugccgcaaacaagcuuaccaugggccagaucaucaccuucuuccaggaggugccccacgugaucgaggaggugaugaacaucgugcugaucgcccugagccugcuggccauccugaagggcaucuacaacguggccaccugcggccuguucggccuggugagcuuccugcugcugugcggcagaagcugcagcaccaccuacaagggcguguacgagcugcagacccuggagcuggacauggccaaccugaacaugaccaugccccugagcugcaccaagaacaacagccaccacuacaucauggugggcaacgagaccggccuggagcugacccugaccaacaccagcaucaucaaccacaaguucugcaaccugagcgacgcccacaagaagaaccuguacgaccacgcccugaugagcaucaucagcaccuuccaccugagcauccccaacuucaaccaguacgaggccaugagcugcgacuucaacggcggcaagaucagcgugcaguacaaccugagccacaccuacgccguggacgccgccaaccacugcggcaccaucgccaacggcgugcugcagaccuucaugagaauggccuggggcggcagcuacaucgcccuggacagcggcaagggcagcugggacugcaucaugaccagcuaccaguaccuggugauccagaacaccaccugggaggaccacugccaguucagcagacccagccccaucggcuaccugggccugcugagccagagaaccagagacaucuacaucagcagaagacugcugggcaccuucaccuggacccugagcgacagcgagggcaacgagacccccggcggcuacugccugaccagauggaugcugaucgaggccgagcugaagugcuucggcaacaccgccguggccaagugcaacgagaagcacgacgaggaguucugcgacaugcugagacuguucgacuucaacaagcaggccaucagaagacugaagacccccgcccagaugagcauccagcugaucaacaaggccgugaacgcccugaucaacgaccagcugaucaugaagaaccaccugagagacaucaugggcauccccuacugcaacuacagcaaguacugcuaccugaaccacaccgugaccggcaagaccagccugcccagaugcugccuggugagcaacggcagcuaccugaacgagacccacuucagcgacgacaucgagcagcaggccgacaacaugaucaccgagcugcugcagaaggaguacaucgacagacagggcaagaccccccugggccugguggaccuguucguguucagcaccagcuucuaccugaucagcaucuuccugcaccuggugaagauccccacccacagacacaucaccggcaagcccugccccaagccccacagacugaaccacaugggcaucugcagcugcggccuguacaagcaccccggcgugcccgugaaguggaagagaugaggacuagucccuguucccagagcccacuuuuuuuucuuuuuuugaaauaaaauagccugucuuucagaucucaaaggcucuuuucagagccaccaaaaaaaaaaaaaaaaaaaaaaaaaaaaaaaaaaaaaaaaaaaaaaaaaaaaaaaaaaaaaaaaaaaaaaaaaaaaaaaaaaaaaaaaaaaaaaaaaaaaa

SEQ ID NO: 32176 - RNA, 1764 nt, Artificial Sequence
  mRNA product Design a-2 (hSL-A100) comprising derived and/or modified sequence from LASV(Lassa virus/H.sapiens-wt/NGA/2016/ISTH_0009;Clade II)__AVO03571__GPCmut7 (opt4)
aggagaguccgcucagccagguugcagaagcggcuuagcguguguccuaaucuucucucugcguguagguaggccugugccgcaaacaagcuuaccaugggccagaucaucaccuucuuccaggaggugccccacgugaucgaggaggugaugaacaucgugcugaucgcccugagccugcuggccauccugaagggcaucuacaacguggccaccugcggccugcugggccuggugagcuuccugcugcugugcggcagaagcugcagcaccaccuacaagggcguguacgagcugcagacccuggagcuggacauggccagccugaacaugaccaugccccugagcugcaccaagaacaacagccaccacuacaucauggugggcaacgagaccggccuggagcugacccugaccaacaccagcaucaucaaccacaaguucugcaaccugagcgacgcccacaagaagaaccuguacgaccacgcccugaugagcaucaucagcaccuuccaccugagcauccccaacuucaaccaguacgaggccaugagcugcgacuucaacggcggcagaaucagcgugcaguacaaccugagccacagcuacgccguggacgccgccaaccacugcggcaccaucgccaacggcgugcugcagaccuucaugagaauggccuggggcggcagcuacaucgcccuggacagcggcaagggcagcugggacugcaucaugaccagcuaccaguaccugaucauccagaacaccaccugggaggaccacugccaguucagcagacccagccccaucggcuaccugggccugcugagccagagaaccagagacaucuacaucagcagaagacugcugggcaccuucaccuggacccugagcgacagcgagggcaacgagacccccggcggcuacugccugaccagauggaugcugaucgaggccgagcugaagugcuucggcaacaccgccguggccaagugcaacgagaagcacgacgaggaguucugcgacaugcugagacuguucgacuucaacaagcaggccaucagaagacugaagacccccgcccagaugagcauccagcugaucaacaaggccgugaacgcccugaucaacgaccagcugaucaugaagaaccaccugagagacaucaugggcauccccuacugcaacuacagcaaguacugcuaccugaaccacaccgugaccggcaagaccagccugcccagaugcugccuggugagcaacggcagcuaccugaacgagacccacuucagcgacgacaucgagcagcaggccgacaacaugaucaccgagcugcugcagaaggaguacaucgacagacagggcaagaccccccugggccugguggaccuguucguguucagcaccagcuucuaccugaucagcaucuuccugcaccuggugaagauccccacccacagacacaucaccggcaagcccugccccaagccccacagacugaaccacaugggcaucugcagcugcggccuguacaaccaccccggcgugcccgugaaguggaagagaugaggacuagucccuguucccagagcccacuuuuuuuucuuuuuuugaaauaaaauagccugucuuucagaucucaaaggcucuuuucagagccaccaaaaaaaaaaaaaaaaaaaaaaaaaaaaaaaaaaaaaaaaaaaaaaaaaaaaaaaaaaaaaaaaaaaaaaaaaaaaaaaaaaaaaaaaaaaaaaaaaaaaa

SEQ ID NO: 32177 - RNA, 1764 nt, Artificial Sequence
  mRNA product Design a-2 (hSL-A100) comprising derived and/or modified sequence from LASV(Lassa virus/H.sapiens-wt/NGA/2016/ISTH_0017;Clade II)__AVO03567__GPCmut7 (opt4)
aggagaguccgcucagccagguugcagaagcggcuuagcguguguccuaaucuucucucugcguguagguaggccugugccgcaaacaagcuuaccaugggccagaucaucaccuucuuccaggaggugccccacgugaucgaggaggugaugaacaucgugcugaucgcccugagccugcuggccauccugaagggcaucuacaacguggccaccugcggccuguucggccuggugagcuuccugcugcugugcggcagaagcugcagcaccaccuacaagggcguguacgagcugcagacccuggagcuggacauggccagccugaacaugaccaugccccugagcugcaccaagaacaacagccaccacuacaucauggugggcaacgagaccggccuggagcugacccugaccaacaccagcaucaucaaccacaaguucugcaaccugagcgacgcccacaagaagaaccuguacgaccacgcccugaugagcaucaucagcaccuuccaccugagcauccccaacuucaaccaguacgaggccaugagcugcgacuucaacggcggcaagaucagcgugcaguacaaccugagccacaccuacgccaucgacgccgccaaccacugcggcaccaucgccaacggcgugcugcagaccuucaugagaauggccuggggcggcagcuacaucgcccuggacagcggcaagggcagcugggacugcaucaugaccagcuaccaguaccugaucauccagaacaccaccugggaggaccacugccaguucagcagacccagccccaucggcuaccugggccugcugagccagagaaccagagacaucuacaucagcagaagacugcugggcaccuucaccuggacccugagcgacagcgagggcaacgagacccccggcggcuacugccugaccagauggaugcugaucgaggccgagcugaagugcuucggcaacaccgccguggccaagugcaacgagaagcacgacgaggaguucugcgacaugcugagacuguucgacuucaacaagcaggccaucagaagacugaagacccccgcccagaugagcauccagcugaucaacaaggccgugaacgcccugaucaacgaccagcugaucaugaagaaccaccugagagacaucaugggcauccccuacugcaacuacagcaaguacugcuaccugaaccacaccgugaccggcaagaccagccugcccagaugcugccuggugagcaacggcagcuaccugaacgagacccacuucagcgacgacaucgagcagcaggccgacaacaugaucaccgagcugcugcagaaggaguacauggacagacagggcaagaccccccugggccugguggaccuguucguguucagcaccagcuucuaccugaucagcaucuuccugcaccuggugagaauccccacccacagacacgugaucggcaagcccugccccaagccccacagacugaaccacaugggcaucugcagcugcggccuguacaagcaccccggcgugcccgugaaguggaagagaugaggacuagucccuguucccagagcccacuuuuuuuucuuuuuuugaaauaaaauagccugucuuucagaucucaaaggcucuuuucagagccaccaaaaaaaaaaaaaaaaaaaaaaaaaaaaaaaaaaaaaaaaaaaaaaaaaaaaaaaaaaaaaaaaaaaaaaaaaaaaaaaaaaaaaaaaaaaaaaaaaaaaa

SEQ ID NO: 32178 - RNA, 1764 nt, Artificial Sequence
  mRNA product Design a-2 (hSL-A100) comprising derived and/or modified sequence from LASV(Lassa virus/H.sapiens-wt/NGA/2018/ISTH_0959;Clade II)__AVV65099__GPCmut7 (opt4)
aggagaguccgcucagccagguugcagaagcggcuuagcguguguccuaaucuucucucugcguguagguaggccugugccgcaaacaagcuuaccaugggccagaucaucaccuucuuccaggaggugccccacgugaucgaggaggugaugaacaucgugcugaucgcccugagccugcuggccauccugaagggcaucuacaacguggugaccugcggccuguucggccuggugagcuuccugcugcugugcggcagaagcugcagcaccaccuacaagggcguguacgagcugcagacccuggagcuggacauggccagccugaacaugaccaugccccugagcugcaccaagaacaacagccaccacuacaucauggugggcaacgagaccggccuggagcugacccugaccaacaccagcaucaucaaccacaaguucugcaaccugagcgacgcccacaagaagaaccuguacgaccacgcccugaugagcaucaucagcaccuuccaccugagcauccccaacuucaaccaguacgaggccaugagcugcgacuucaacggcggcaagaucagcgugcaguacaaccugagccacgccuacgccaucgacgccgccaaccacugcggcaccaucgccaacggcgugcugcagaccuucaugagaauggccuggggcggcagcuacaucgcccuggacagcggcaagggcagcugggacugcaucaugaccagcuaccaguaccugaucauccagaacaccaccugggaggaccacugccaguucagcagacccagccccaucggcuaccugggccugcugagccagagaaccagagacaucuacaucagcagaagacugcugggcaccuucaccuggacccugagcgacagcgagggcaacgagacccccggcggcuacugccugaccagauggaugcugaucgaggccgagcugaagugcuucggcaacaccgccguggccaagugcaacgagaagcacgacgaggaguucugcgacaugcugagacuguucgacuucaacaagcaggccaucagaagacugaagacccccgcccagaugagcauccagcugaucaacaaggccgugaacgcccugaucaacgaccagcugaucaugaagaaccaccugagagacaucaugggcauccccuacugcaacuacagcaaguacugcuaccugaaccacaccgugaccggcaagaccagccugcccagaugcugccuggugagcaacggcagcuaccugaacgagacccacuucagcgacgacaucgagcagcaggccgacaacaugaucaccgagcugcugcagaaggaguacaucgacagacagggcaagaccccccugggccugguggaccuguucguguucagcaccagcuucuaccugaucagcaucuuccugcaccuggugaagauccccacccacagacacgugaucggcaagcccugccccaagccccacagacugaaccacaugggcaucugcagcugcggccuguacaagcaccccggcgugcccgugaaguggaagagaugaggacuagucccuguucccagagcccacuuuuuuuucuuuuuuugaaauaaaauagccugucuuucagaucucaaaggcucuuuucagagccaccaaaaaaaaaaaaaaaaaaaaaaaaaaaaaaaaaaaaaaaaaaaaaaaaaaaaaaaaaaaaaaaaaaaaaaaaaaaaaaaaaaaaaaaaaaaaaaaaaaaaa

SEQ ID NO: 32179 - RNA, 1764 nt, Artificial Sequence
  mRNA product Design a-2 (hSL-A100) comprising derived and/or modified sequence from LASV(LASV003-NIG-2008;Clade II)__AIT17580__GPCmut7 (opt4)
aggagaguccgcucagccagguugcagaagcggcuuagcguguguccuaaucuucucucugcguguagguaggccugugccgcaaacaagcuuaccaugggccagaucaucaccuucuuccaggaggugccccacgugaucgaggaggugaugaacaucgugcugaucgcccugagccugcuggccauccugaagggcaucuacaacguggccaccugcggccuguucggccuggugagcuuccugcugcugugcggcagaagcugcagcaccaccuacaagggcguguacgagcugcagacccuggagcuggacauggccagccugaacaugaccaugccccugagcugcaccaagaacaacagccaccacuacaucauggugggcaacgagaccggccuggagcugacccugaccaacaccagcaucaucaaccacaaguucugcaaccugagcgacgcccacaagaagaaccuguacgaccacgcccugaugagcaucaucagcaccuuccaccugagcauccccaacuucaaccaguacgaggccaugagcugcgacuucaacggcggcaagaucagcgugcaguacaaccugagccacaccuacgccguggacgccgccaaccacugcggcaccaucgccaacggcgugcugcagaccuucaugagaauggccuggggcggcagcuacaucgcccuggacagcggcaagggcagcugggacugcaucaugaccagcuaccaguaccugaucauccagaacaccaccugggaggaccacugccaguucagcagacccagccccaucggcuaccugggccugcugagccagagaaccagagacaucuacaucagcagaagacugcugggcaccuucaccuggacccugagcgacagcgagagcaacgagacccccggcggcuacugccugaccagauggaugcugaucgaggccgagcugaagugcuucggcaacaccgccguggccaagugcaacgagaagcacgacgaggaguucugcgacaugcugagacuguucgacuucaacaagcaggccaucagaagacugaaggcccccgcccagaugagcauccagcugaucaacaaggccgugaacgcccugaucaacgaccagcugaucaugaagaaccaccugagagacaucaugggcauccccuacugcaacuacagcaaguacugcuaccugaaccacaccgugaccggcagaaccagccugcccagaugcugccuggugagcaacggcagcuaccugaacgagacccacuucagcgacgacaucgagcagcaggccgacaacaugaucaccgagcugcugcagaaggaguacauggacagacagggcaagaccccccugggccugguggaccuguucguguucagcaccagcuucuaccugaucagcaucuuccugcaccuggugaagauccccacccacagacacgugaucggcaagcccugccccaagccccacagacugaaccacaugggcaucugcagcugcggccuguacaagcaccccggcgugcccgugaaguggaagagaugaggacuagucccuguucccagagcccacuuuuuuuucuuuuuuugaaauaaaauagccugucuuucagaucucaaaggcucuuuucagagccaccaaaaaaaaaaaaaaaaaaaaaaaaaaaaaaaaaaaaaaaaaaaaaaaaaaaaaaaaaaaaaaaaaaaaaaaaaaaaaaaaaaaaaaaaaaaaaaaaaaaaa

SEQ ID NO: 32180 - RNA, 1764 nt, Artificial Sequence
  mRNA product Design a-2 (hSL-A100) comprising derived and/or modified sequence from LASV(LASV035-NIG-2009;Clade II)__AIT17588__GPCmut7 (opt4)
aggagaguccgcucagccagguugcagaagcggcuuagcguguguccuaaucuucucucugcguguagguaggccugugccgcaaacaagcuuaccaugggccagaucaucaccuucuuccaggaggugccccacgugaucgaggaggugaugaacaucgugcugaucgcccugagccugcuggccauccugaagggcaucuacaacguggccaccugcggccuguucggccuggugagcuuccugcugcugugcggcagaagcugcagcaccaccuacaagggcguguacgagcugcagacccuggagcuggacauggccagccugaacaugaccaugccccugagcugcaccaagaacaacagccaccacuacaucauggugggcaacgagaccggccuggagcugacccugaccaacaccagcaucaucaaccacaaguucugcaaccugagcgacgcccacaagaagaaccuguacgaccacgcccugaugagcaucaucagcaccuuccaccugagcauccccaacuucaaccaguacgaggccaugagcugcgacuucaacggcggcaagaucagcgugcaguacaaccugagccacgccuacgccguggacgccgccaaccacugcggcaccaucgccaacggcgugcugcagaccuucaugagaauggccuggggcggcagcuacaucgcccuggacagcggcaagggcagcugggacugcaucaugaccagcuaccaguaccugaucauccagaacaccaccugggaggaccacugccaguucagcagacccagccccaucggcuaccugggccugcugagccagagaaccagagacaucuacaucagcagaagacugcugggcaccuucaccuggacccugagcgacagcgagggcaacgagacccccggcggcuacugccugaccagauggaugcugaucgaggccgagcugaagugcuucggcaacaccgccguggccaagugcaacgagaagcacgacgaggaguucugcgacaugcugagacuguucgacuucaacaagcaggccaucagaagacugaaggcccccgcccagaugagcauccagcugaucaacaaggccgugaacgcccugaucaacgaccagcugaucaugaagaaccaccugagagacaucaugggcauccccuacugcaacuacagcaaguacugcuaccugaaccacaccgugaccggcaagaccagccugcccagaugcugccuggugagcaacggcagcuaccugaacgagacccacuucagcgacgacaucgagcagcaggccgacaacaugaucaccgagcugcugcagaaggaguacaucgacagacagggcaagaccccccugggccugguggaccuguucguguucagcaccagcuucuaccugaucagcaucuuccugcaccuggugaagauccccacccacagacacgugaucggcaagcccugccccaagccccacagacugaaccacaugggcaucugcagcugcggccuguacaagcaccccggcgugcccgugaaguggaagagaugaggacuagucccuguucccagagcccacuuuuuuuucuuuuuuugaaauaaaauagccugucuuucagaucucaaaggcucuuuucagagccaccaaaaaaaaaaaaaaaaaaaaaaaaaaaaaaaaaaaaaaaaaaaaaaaaaaaaaaaaaaaaaaaaaaaaaaaaaaaaaaaaaaaaaaaaaaaaaaaaaaaaa

SEQ ID NO: 32181 - RNA, 1764 nt, Artificial Sequence
  mRNA product Design a-2 (hSL-A100) comprising derived and/or modified sequence from LASV(LASV1000-NIG-2009;Clade II)__AIT17782__GPCmut7 (opt4)
aggagaguccgcucagccagguugcagaagcggcuuagcguguguccuaaucuucucucugcguguagguaggccugugccgcaaacaagcuuaccaugggccagaucaucaccuucuuccaggaggugccccacgugaucgaggaggugaugaacaucgugcugaucgcccugagccugcuggccauccugaagggcaucuacaacguggccaccugcggccuguucggccuggugagcuuccugcugcugugcggcagaagcugcagcaccaccuacaagggcguguacgagcugcagacccuggagcuggacauggccagccugaacaugaccaugccccugagcugcaccaagaacaacagccaccacuacaucauggugggcaacgagaccggccuggagcugacccugaccaacaccagcaucaucaaccacaaguucugcaaccugagcgacgcccacaagaagaaccuguacgaccacgcccugaugagcaucaucagcaccuuccaccugagcauccccaacuucaaccaguacgaggccaugagcugcgacuucaacggcggcaagaucagcgugcaguacaaccugagccacaccuacgccguggacgccgccaaccacugcggcaccaucgccaacggcgugcugcagaccuucaugagaauggccuggggcggcagcuacaucgcccuggacagcggcaagggcagcugggacugcaucaugaccagcuaccaguaccugaucauccagaacaccaccugggaggaccacugccaguucagcagacccagccccaucggcuaccugggccugcugagccagagaaccagagacaucuacaucagcagaagacugcugggcaccuucaccuggacccugagcgacagcgagggcaacgagacccccggcggcuacugccugaccagauggaugcugaucgaggccgagcugaagugcuucggcaacaccgccguggccaagugcaacgagaagcacgacgaggaguucugcgacaugcugagacuguucgacuucaacaagcaggccaucaagagacugaagacccccgcccagaugagcauccagcugaucaacaaggccgugaacgcccugaucaacgaccagcugaucaugaagaaccaccugagagacaucaugggcauccccuacugcaacuacagcaaguacugcuaccugaaccacaccgugaccggcaagaccagccugcccagaugcugccuggugagcaacggcagcuaccugaacgagacccacuucagcgacgacaucgagcagcaggccgacaacaugaucaccgagcugcugcagaaggaguacaucgacagacagggcaagaccccccugggccugguggaccuguucguguucagcaccagcuucuaccugaucagcaucuuccugcaccuggugaagauccccacccacagacacguggugggcaagcccugccccaagccccacagacugaaccacaugggcaucugcagcugcggccuguacaagcaccccggcgugcccgugaaguggaagagaugaggacuagucccuguucccagagcccacuuuuuuuucuuuuuuugaaauaaaauagccugucuuucagaucucaaaggcucuuuucagagccaccaaaaaaaaaaaaaaaaaaaaaaaaaaaaaaaaaaaaaaaaaaaaaaaaaaaaaaaaaaaaaaaaaaaaaaaaaaaaaaaaaaaaaaaaaaaaaaaaaaaaa

SEQ ID NO: 32182 - RNA, 1764 nt, Artificial Sequence
  mRNA product Design a-2 (hSL-A100) comprising derived and/or modified sequence from LASV(LASV221-NIG-2010;Clade II)__AIT17624__GPCmut7 (opt4)
aggagaguccgcucagccagguugcagaagcggcuuagcguguguccuaaucuucucucugcguguagguaggccugugccgcaaacaagcuuaccaugggccagaucaucaccuucuuccaggaggugccccacgugaucgaggaggugaugaacaucgugcugaucgcccugagccugcuggccauccugaagggcaucuacaacguggccaccugcggccuguucggccuggugagcuuccugcugcugugcggcagaagcugcagcaccaccuacaagggcguguacgagcugcagacccuggagcuggacauggccagccugaacaugaccaugccccugagcugcaccaagaacaacagccaccacuacaucauggugggcaacgagaccggccuggagcugacccugaccaacaccagcaucaucaaccacaaguucugcaaccugagcgacgcccacaagaagaaccuguacgaccacgcccugaugagcaucaucagcaccuuccaccugagcauccccaacuucaaccaguacgaggccaugagcugcgacuucaacggcggcaagaucagcgugcaguacaaccugagccacaccuacgccaucgacgccgccaaccacugcggcaccaucgccaacggcgugcugcagaccuucaugagaauggccuggggcggcagcuacaucgcccuggacagcggcaagggcagcugggacugcaucaugaccagcuaccaguaccugaucauccagaacaccaccugggaggaccacugccaguucagcagacccagccccaucggcuaccugggccugcugagccagagaaccagagacaucuacaucagcagaagacugcugggcaccuucaccuggacccugagcgacagcgagggcaacgagacccccggcggcuacugccugaccagauggaugcugaucgaggccgagcugaagugcuucggcaacaccgccguggccaagugcaacgagaagcacgacgaggaguucugcgacaugcugagacuguucgacuucaacaagcaggccaucagaagacugaagacccccgcccagaugagcauccagcugaucaacaaggccgugaacgcccugaucaacgaccagcugaucaugaagaaccaccugagagacaucaugggcauccccuacugcaacuacagcaaguacugcuaccugaaccacaccgugaccggcaagaccagccugcccagaugcugccuggugagcaacggcagcuaccugaacgagacccacuucagcgacgacaucgagcagcaggccgacaacaugaucaccgagaugcugcagaaggaguacauggacagacagggcaagaccccccugggccugguggaccuguucguguucagcaccagcuucuaccugaucagcaucuuccugcaccuggugaagauccccacccacagacacgugaucggcaagcccugccccaagccccacagacugaaccacaugggcaucugcagcugcggccuguacaagcaccccggcgugcccgugaaguggaagagaugaggacuagucccuguucccagagcccacuuuuuuuucuuuuuuugaaauaaaauagccugucuuucagaucucaaaggcucuuuucagagccaccaaaaaaaaaaaaaaaaaaaaaaaaaaaaaaaaaaaaaaaaaaaaaaaaaaaaaaaaaaaaaaaaaaaaaaaaaaaaaaaaaaaaaaaaaaaaaaaaaaaaa

SEQ ID NO: 32183 - RNA, 1764 nt, Artificial Sequence
  mRNA product Design a-2 (hSL-A100) comprising derived and/or modified sequence from LASV(LASV237-NIG-2010;Clade II)__AIT17638__GPCmut7 (opt4)
aggagaguccgcucagccagguugcagaagcggcuuagcguguguccuaaucuucucucugcguguagguaggccugugccgcaaacaagcuuaccaugggccagaucaucaccuucuuccaggaggugccccacgugaucgaggaggugaugaacaucgugcugaucgcccugagccugcuggccauccugaagggcaucuacaacguggccaccugcggccuguucggccuggugagcuuccugcugcugugcggcagaagcugcagcaccaccuacaagggcguguacgagcugcagacccuggagcuggacauggccagccugaacaugaccaugccccugagcugcaccaagaacaacagccaccacuacaucauggugggcaacgagaccggccuggagcugacccugaccaacaccagcaucaucaaccacaaguucugcaaccugagcgacgcccacaagaaggaccuguacgaccacgcccugaugagcaucaucagcaccuuccaccugagcauccccaacuucaaccaguacgaggccaugagcugcgacuucaacggcggcaagaucagcgugcaguacaaccugagccacaccuacgccguggacgccgccaaccacugcggcaccaucgccaacggcgugcugcagaccuucaugagaauggccuggggcggcagcuacaucgcccuggacagcggcaagggcagcugggacugcaucaugaccagcuaccaguaccugaucauccagaacaccaccugggaggaccacugccaguucagcagacccagccccaucggcuaccugggccugcugagccagagaaccagagacaucuacaucagcagaagacugcugggcaccuucaccuggacccugagcgacagcgagggcaacgagacccccggcggcuacugccugaccagauggaugcugaucgaggccgagcugaagugcuucggcaacaccgccguggccaagugcaacgagaagcacgacgaggaguucugcgacaugcugagacuguucgacuucaacaagcaggccaucagaagacugaagacccccgcccagaugagcauccagcugaucaacaaggccgugaacgcccugaucaacgaccagcugaucaugaagaaccaccugagagacaucaugggcauccccuacugcaacuacagcaaguacugcuaccugaaccacaccgugaccggcaagaccagccugcccagaugcugccuggugagcaacggcagcuaccugaacgagacccacuucagcgacgacaucgagcagcaggccgacaacaugaucaccgagcugcugcagaaggaguacauggacagacagggcaagaccccccugggccugguggaccuguucguguucagcaccagcuucuaccugaucagcaucuuccugcaccugaucaagauccccacccacagacacaucaccggcaagcccugccccaagccccacagacugaaccacaugggcaucugcagcugcggccuguacaagcaccccggcgugcccgugaaguggaagagaugaggacuagucccuguucccagagcccacuuuuuuuucuuuuuuugaaauaaaauagccugucuuucagaucucaaaggcucuuuucagagccaccaaaaaaaaaaaaaaaaaaaaaaaaaaaaaaaaaaaaaaaaaaaaaaaaaaaaaaaaaaaaaaaaaaaaaaaaaaaaaaaaaaaaaaaaaaaaaaaaaaaaa

SEQ ID NO: 32184 - RNA, 1764 nt, Artificial Sequence
  mRNA product Design a-2 (hSL-A100) comprising derived and/or modified sequence from LASV(LASV253-NIG-2011;Clade II)__AIT17670__GPCmut7 (opt4)
aggagaguccgcucagccagguugcagaagcggcuuagcguguguccuaaucuucucucugcguguagguaggccugugccgcaaacaagcuuaccaugggccagaucaucaccuucuuccaggaggugccccacgugaucgaggaggugaugaacaucgugcugaucgcccugagccugcuggccauccugaagggcaucuacaacguggccaccugcggccuguucggccuggugagcuuccugcugcugugcggcagaagcugcagcaccaccuacaagggcguguacgagcugcagacccuggagcuggacauggccagccugaacaugaccaugccccugagcugcaccaagaacaacagccaccacuacaucauggugggcaacgagaccggccuggagcugacccugaccaacaccagcaucaucaaccacaaguucugcaaccugagcgacgcccacaagaagaaccuguacgaccacgcccugaugagcaucaucagcaccuuccaccugagcauccccaacuucaaccaguacgaggccaugagcugcgacuucaacggcggcaagaucagcgugcaguacaaccugagccacaccuacgccguggacgccgccaaccacugcggcaccaucgccaacggcgugcugcagaccuucaugagaauggccuggggcggcagcuacaucgcccuggacagcggcaagggcagcugggacugcaucaugaccagcuaccaguaccugaucauccagaacaccaccugggaggaccacugccaguucagcagacccagccccaucggcuaccugggccugcugagccagagaaccagagacaucuacaucagcagaagacugcugggcaccuucaccuggacccugagcgacagcgagggcaacgagacccccggcggcuacugccugaccagauggaugcugaucgaggccgagcugaagugcuucggcaacaccgccguggccaagugcaacgagaagcacgacgaggaguucugcgacaugcugagacuguucgacuucaacaagcaggccaucagaagacugaaggcccccgcccagaugagcauccagcugaucaacaaggccgugaacgcccugaucaacgaccagcugaucaugaagaaccaccugagagacaucaugggcauccccuacugcaacuacagcaaguacugcuaccugaaccacaccgugaccggcagaaccagccugcccagaugcugccuggugagcaacggcagcuaccugaacgagacccacuucagcgacgacaucgagcagcaggccgacaacaugaucaccgagcugcugcagaaggaguacaucgacagacagggcaagaccccccugggccugguggaccuguucguguucagcaccagcuucuaccugaucagcaucuuccugcaccuggugaagauccccacccacagacacaucaucggcaagcccugccccaagccccacagacugaaccacaugggcaucugcagcugcggccuguacaagcaccccggcgugcccgugaaguggaagagaugaggacuagucccuguucccagagcccacuuuuuuuucuuuuuuugaaauaaaauagccugucuuucagaucucaaaggcucuuuucagagccaccaaaaaaaaaaaaaaaaaaaaaaaaaaaaaaaaaaaaaaaaaaaaaaaaaaaaaaaaaaaaaaaaaaaaaaaaaaaaaaaaaaaaaaaaaaaaaaaaaaaaa

SEQ ID NO: 32185 - RNA, 1764 nt, Artificial Sequence
  mRNA product Design a-2 (hSL-A100) comprising derived and/or modified sequence from LASV(LASV254-NIG-2011;Clade II)__AIT17674__GPCmut7 (opt4)
aggagaguccgcucagccagguugcagaagcggcuuagcguguguccuaaucuucucucugcguguagguaggccugugccgcaaacaagcuuaccaugggccagaucaucaccuucuuccaggaggugccccacgugaucgaggaggugaugaacaucgugcugaucgcccugagccugcuggccauccugaagggcaucuacaacguggccaccugcggccuguucggccuggugagcuuccugcugcugugcggcagaagcugcagcaccaccuacaagggcguguacgagcugcagacccuggagcuggacaugaccaaccugaacaugaccaugccccugagcugcaccaagaacaacagccaccacuacaucauggugggcaacgagaccggccuggagcugacccugaccaacaccagcaucaucaaccacaaguucugcaaccugagcgacgcccacaagaagaaccuguacaaccacgcccugaugagcaucaucagcaccuuccaccugagcauccccaacuucaaccaguacgaggccaugagcugcgacuucaacggcggcaagaucagcgugcaguacaaccugagccacagcuacgccguggacgccgccaaccacugcggcaccaucgccaacggcgugcugcagaccuucaugagaauggccuggggcggcagcuacaucgcccuggacagcggcaagggcaacugggacugcaucaugaccagcuaccaguaccugaucauccagaacaccaccugggaggaccacugccaguucagcagacccagccccaucggcuaccugggccugcugagccagagaaccagagacaucuacaucagcagaagacugcugggcaccuucaccuggacccugagcgacagcgagggcaacgagacccccggcggcuacugccugaccagauggaugcugaucgaggccgagcugaagugcuucggcaacaccgccguggccaagugcaacgagaagcacgacgaggaguucugcgacaugcugagacuguucgacuucaacaagcaggccaucagaagacugaagacccccgcccaggccaacauccagcugaucaacaaggccgugaacgcccugaucaacgaccagcugaucaugaagaaccaccugagagacaucaugggcauccccuacugcaacuacagcaaguacugcuaccugaaccacaccgugaccggcaagaccagccugcccagaugcugccuggugagcaacggcagcuaccugaacgagacccacuucagcgacgacaucgagcagcaggccgacaacaugaucaccgagcugcugcagaaggaguacauggacagacagggcaagaccccccugggccugguggaccuguucguguucagcaccagcuucuaccugaucagcaucuuccugcaccuggugaagauccccacccacagacacgugaucggcaagcccugccccaagccccacagacugaaccacaugggcaucugcagcugcggccuguacaagcaccccggcgugcccgugaaguggaagagaugaggacuagucccuguucccagagcccacuuuuuuuucuuuuuuugaaauaaaauagccugucuuucagaucucaaaggcucuuuucagagccaccaaaaaaaaaaaaaaaaaaaaaaaaaaaaaaaaaaaaaaaaaaaaaaaaaaaaaaaaaaaaaaaaaaaaaaaaaaaaaaaaaaaaaaaaaaaaaaaaaaaaa

SEQ ID NO: 32186 - RNA, 1764 nt, Artificial Sequence
  mRNA product Design a-2 (hSL-A100) comprising derived and/or modified sequence from LASV(Nig08-A19;Clade III)__ADU56618__GPCmut7 (opt4)
aggagaguccgcucagccagguugcagaagcggcuuagcguguguccuaaucuucucucugcguguagguaggccugugccgcaaacaagcuuaccaugggccagaucgugaccuucuuccaggaggugccccacgugaucgaggaggugaugaacaucgugcugaucgcccugagcauccuggccauccugaagggccuguacaacaucgccaccugcggccugaucggccuggugaccuuccugcugcugagcggcagaagcugcagcaugaccuacaagggcguguacgagcugcagacccuggagcugaacaugaacacccugaacaugaccaugccccugagcugcaccaagaacaacagccaccacuacaucauggugggcaacgagaccggccuggagcugacccugaccaacaccagccugcugcaccacaaguucugcaaccugagcgacgcccacaagaagaaccuguacgaccacacccugaugagcaucaucagcaccuuccaccugagcauccccaacuucaaccaguacgaggccaugagcugcgacuucaacggcggcaagaucaccgugcaguacaaccugagccacagcuacgccaucgacgccgccaaccacugcggcaccguggccaacggcgugcugcagaccuucaugagaauggccuggggcggcagcuacaucgcccuggacagcggcagaggcaagugggacugcaucaugaccagcuaccaguaccugaucauccagaacaccaccugggaggaccacugccaguucagcagacccagccccaucggcuaccugggccugcugagccagagaaccagagacaucuacaucagcagaagacugcugggcaccuucaccuggacccugagcgacagcgagggcaacgagacccccggcggcuacugccugaccagauggaugcugaucgaggccgagcugaagugcuucggcaacaccgccguggccaagugcaacgagaagcacgacgaggaguucugcgacaugcugagacuguucgacuucaacaagcaggccaucagaagacugaaggcccccgcccagaugagcauccagcugaucaacaaggccgugaacgcccugaucaacgaccagcugaucaugaagaaccaccugagagacaucaugggcauccccuacugcaacuacagcaaguacugcuaccugaaccacaccagcaccggcagaaccagccugcccagaugcugccuggugagcaacggcagcuaccugaacgagacccacuucagcgacgacaucgagcagcaggccgacaacaugaucaccgagaugcugcagaaggaguaccuggacagacagggcaagaccccccugggccugguggaccuguucguguucagcaccagcuucuaccugaucagcaucuuccugcaccuggugaagauccccacccacagacacaucgugggcaagcccugccccaagccccacagacugaaccacaugggcaucugcagcugcggccuguacaagcagcccggcgugcccgugagauggaagagaugaggacuagucccuguucccagagcccacuuuuuuuucuuuuuuugaaauaaaauagccugucuuucagaucucaaaggcucuuuucagagccaccaaaaaaaaaaaaaaaaaaaaaaaaaaaaaaaaaaaaaaaaaaaaaaaaaaaaaaaaaaaaaaaaaaaaaaaaaaaaaaaaaaaaaaaaaaaaaaaaaaaaa

SEQ ID NO: 32187 - RNA, 1767 nt, Artificial Sequence
  mRNA product Design a-2 (hSL-A100) comprising derived and/or modified sequence from LASV(G1180-SLE-2010;Clade IV)__AIT17168__GPCmut7 (opt4)
aggagaguccgcucagccagguugcagaagcggcuuagcguguguccuaaucuucucucugcguguagguaggccugugccgcaaacaagcuuaccaugggccagaucgugaccuucuuccaggaggugccccacgugaucgaggaggugaugaacaucgugcugaucgcccugagcauccuggccgugcugaagggccuguacaacuucgccaccugcggccuggugggccugcugaccuuccugcugcugugcggcagaagcugcaccgccagcagauacaagggcguguacgagcugcagacccuggagcugaacauggagacccugaacaugaccaugccccugagcugcaccaagaacaacagccaccacuacaucauggugggcaacgagaccggccuggagcugacccugaccaacaccagcaucaucaaccacaaguucugcaaccugagcgacgcccacaagaagaaccuguacgaccacgcccugaugagcaucaucagcaccuuccaccugagcauccccaacuucaaccaguacgaggccaugagcugcgacuucaacggcggcaagaucagcgugcaguacaaccugagccacagcuacgccggcgacgccgccaaccacugcggcaccguggccaacggcgugcugcagaccuucaugagaauggccuggggcggcagcuacaucgcccuggacagcggccacggcagcugggacugcaucaugaccagcuaccaguaccugaucauccagaacaccaccugggaggaccacugccaguucagcagacccagccccaucggcuaccugggccugcugagccagagaaccagagacaucuacaucagcagaagacugcugggcaccuucaccuggacccugagcgacagcgagggcaaggacacccccggcggcuacugccugaccagauggaugcugaucgaggccgagcugaagugcuucggcaacaccgccguggccaagugcaacgagaagcacgacgaggaguucugcgacaugcugagacuguucgacuucaacaagcaggccauccagagacugaaggcccccgcccagaugagcauccagcugaucaacaaggccgugaacgcccugaucaacgaccagcugaucaugaagaaccaccugagagacaucaugggcauccccuacugcaacuacagcaaguacugcuaccugaaccacaccaccaccggcaagaccagccugcccaagugcugccuggugagcaacggcagcuaccugaacgagacccacuucagcgacgacaucgagcagcaggccgacaacaugaucaccgagaugcugcagaaggaguacauggagagacagggcaagaccccccugggccugguggaccuguucguguucagcaccagcuucuaccugaucagcaucuuccugcaccuggugaagauccccacccacagacacaucgugggcaagagcugccccaagccccacagacugaaccacaugggcaucugcagcugcggccuguacaagcagcccggcgugcccgugaaguggaagagaugaggacuagucccuguucccagagcccacuuuuuuuucuuuuuuugaaauaaaauagccugucuuucagaucucaaaggcucuuuucagagccaccaaaaaaaaaaaaaaaaaaaaaaaaaaaaaaaaaaaaaaaaaaaaaaaaaaaaaaaaaaaaaaaaaaaaaaaaaaaaaaaaaaaaaaaaaaaaaaaaaaaaa

SEQ ID NO: 32188 - RNA, 1767 nt, Artificial Sequence
  mRNA product Design a-2 (hSL-A100) comprising derived and/or modified sequence from LASV(G1442-SLE-2011;Clade IV)__AIT17180__GPCmut7 (opt4)
aggagaguccgcucagccagguugcagaagcggcuuagcguguguccuaaucuucucucugcguguagguaggccugugccgcaaacaagcuuaccaugggccagaucgugaccuucuuccaggaggugccccacgugaucgaggaggugaugaacaucgugcugaucgcccugagcauccuggccgugcugaagggccuguacaacguggccaccugcggccugaucggccuggugaccuuccugcugcugugcggcagaagcugcaccaccacccuguacaagggcguguacgagcugcagacccuggagcugaacauggagacccugaacaugaccaugccccugagcugcaccaagaacaacagccaccacuacaucagagugggcaacgagaccggccuggagcugacccugaccaacaccagcaucaucaaccacaaguucugcaaccugagcgacgcccacaagaagaaccuguacgaccacgcccugaugagcaucaucagcaccuuccaccugagcauccccaacuucaaccaguacgaggccaugagcugcgacuucaacggcggcaagaucagcgugcaguacaaccugagccacagcuacgccggcgacgccgccaaccacugcggcaccguggccaacggcgugcugcagaccuucaugagaauggccuggggcggcagcuacaucgcccuggacagcggcagaggcaacugggacugcaucaugaccagcuaccaguaccugaucauccagaacaccaccugggacgaccacugccaguucagcagacccagccccaucggcuaccugggccugcugagccagagaaccagagacguguacaucagcagaagacugcugggcaccuucaccuggacccugagcgacagcgagggcaaggacacccccggcggcuacugccugaccagauggaugcugaucgaggccgagcugaagugcuucggcaacaccgccguggccaagugcaacgagaagcacgacgaggaguucugcgacaugcugagacuguucgacuucaacaagcaggccauccagagacugaaggcccccgcccagaugagcauccagcugaucaacaaggccgugaacgcccugaucaacgaccagcugaucaugaagaaccaccugagagacaucaugggcauccccuacugcaacuacagcaaguacugcuaccugaacaacaccgccaccggcaagaccagccugcccaagugcugccugaucagcaacggcagcuaccugaacgagacccacuucagcgacgacaucgagcaggaggccgacaacaugaucaccgagaugcugcagaaggaguacauggagagacagggcaagaccccccugggccugguggaccuguucguguucagcaccagcuucuaccugaucagcaucuuccugcaccuggugaagauccccacccacagacacaucgugggcaagagcugccccaagccccacagacugaaccacaugggcaucugcagcugcggccuguacaagcagcccggcgugcccgugagauggaagagaugaggacuagucccuguucccagagcccacuuuuuuuucuuuuuuugaaauaaaauagccugucuuucagaucucaaaggcucuuuucagagccaccaaaaaaaaaaaaaaaaaaaaaaaaaaaaaaaaaaaaaaaaaaaaaaaaaaaaaaaaaaaaaaaaaaaaaaaaaaaaaaaaaaaaaaaaaaaaaaaaaaaaa

SEQ ID NO: 32189 - RNA, 1767 nt, Artificial Sequence
  mRNA product Design a-2 (hSL-A100) comprising derived and/or modified sequence from LASV(G3010-SLE-2013;Clade IV)__AIT17344__GPCmut7 (opt4)
aggagaguccgcucagccagguugcagaagcggcuuagcguguguccuaaucuucucucugcguguagguaggccugugccgcaaacaagcuuaccaugggccagaucgugaccuucuuccaggaggugccccacgugaucgaggaggugaugaacaucgugcugaucgcccugagcauccuggccgugcugaagggccuguacaacuucgccaccugcggccuggugggccuggugaccuuccugcugcugugcggcagaagcugcaccaccagccuguacaagggcguguacgagcugcagacccuggagcugaacauggagacccugaacaugaccaugccccugagcugcaccaagaacaacagccaccacuacaucauggugggcaacgagaccggccuggagcugacccugaccaacaccagcaucaucaaccacaaguucugcaaccugagcgacgcccacaagaagaaccuguacaaccacgcccugaugagcaucaucagcaccuuccaccugagcauccccaacuucaaccaguacgaggccaugagcugcgacuucaacggcggcaagaucagcgugcaguacaaccugagccacagcuacgccggcgacgccgccagccacugcggcaccguggccaacggcgugcugcagaccuucaugagaauggccuggggcggcagcuacaucgcccuggacagcggcuacggcaagugggacugcaucaugaccagcuaccaguaccugaucauccagaacaccaccugggaggaccacugccaguucagcagacccagccccaucggcuaccugggccugcugagccagagaaccagagacaucuacaucagcagaagacugcugggcaccuucaccuggacccugagcgacagcgagggcaaggacacccccggcggcuacugccugaccagauggaugcugaucgaggccgagcugaagugcuucggcaacaccgccguggccaagugcaacgagaagcacgacgaggaguucugcgacaugcugagacuguucgacuucaacaagcaggccauccagagacugaagacccccgcccagaugagcauccagcugaucaacaaggccgugaacgcccugaucaacgaccagcugaucaugaagaaccaccugagagacaucaugggcauccccuacugcaacuacagcaaguacugcuaccugaaccacaccaccaccggcaagaccagccugcccaagugcugccuggugagcaacggcagcuaccugaacgagacccacuucagcgacgacaucgagcagcaggccgacaacaugaucaccgagaugcugcagaaggaguacauggagagacagggcaagaccccccugggccugguggaccuguucguguucagcaccagcuucuaccugaucagcaucuuccugcaccuggugaagauccccacccacagacacaucgugggcaagagcugccccaagccccacagacugaaccacaugggcaucugcagcugcggccuguacaagcagcccggcgugcccgugagauggaagagaugaggacuagucccuguucccagagcccacuuuuuuuucuuuuuuugaaauaaaauagccugucuuucagaucucaaaggcucuuuucagagccaccaaaaaaaaaaaaaaaaaaaaaaaaaaaaaaaaaaaaaaaaaaaaaaaaaaaaaaaaaaaaaaaaaaaaaaaaaaaaaaaaaaaaaaaaaaaaaaaaaaaaa

SEQ ID NO: 32190 - RNA, 1767 nt, Artificial Sequence
  mRNA product Design a-2 (hSL-A100) comprising derived and/or modified sequence from LASV(G502-SLE-2009;Clade IV)__AIT17126__GPCmut7 (opt4)
aggagaguccgcucagccagguugcagaagcggcuuagcguguguccuaaucuucucucugcguguagguaggccugugccgcaaacaagcuuaccaugggccagaucgugaccuucuuccaggaggugccccacgugaucgaggaggugaugaacaucgugcugaucgcccugagcauccuggccgugcugaagggccuguacaacuucgccaccugcggccuggugggccugcugaccuuccugcugcugugcggcagaagcugcaccaccggccuguacaagggcguguacgagcugcagacccuggagcugaacauggagacccugaacaugaccaugccccugagcugcaccaagaacaacagccaccacuacaucauggugggcaacgagaccggccuggagcugacccugaccaacaccagcaucaucaaccacaaguucugcaaccugagcgacgcccacaagaagaaccuguacgaccacgcccugaugagcaucaucagcaccuuccaccugagcauccccaacuucaaccaguacgaggccaugagcugcgacuucaacggcggcaagaucagcgugcaguacaaccugagccacagcuacgccggcgacgccgccgaccacugcggcaccguggccaacggcgugcugcagaccuucaugagaauggccuggggcggcagcuacaucgcccuggacagcggcagaggcagaugggacugcaucaugaccagcuaccaguaccugaucauccagaacaccaccugggaggaccacugccaguucagcagacccagccccaucggcuaccugggccugcugagccagagaaccagagacaucuacaucagcagaagacugcugggcaccuucaccuggacccugagcgacagcgagggcaaggacacccccggcggcuacugccugaccagauggaugcugaucgaggccgagcugaagugcuucggcaacaccgccguggccaagugcaacgagaagcacgacgaggaguucugcgacaugcugagacuguucgacuucaacaagcaggccauccagagacugaaggcccccgcccagaugagcauccagcugaucaacaaggccgugaacgcccugaucaacgaccagcuggugaugaagaaccaccugagagacaucaugggcauccccuacugcaacuacagcagauacugcuaccugaaccacaccaccaccggcagaaccagccugcccaagugcugccuggugagcaacggcagcuaccugaacgagacccacuucagcgacgacaucgagcagcaggccgacaacaugaucaccgagaugcugcagaaggaguacauggagagacagggcaagaccccccugggccugguggaccuguucguguucagcaccagcuucuaccugaucagcaucuuccugcaccuggugaagauccccacccacagacacaucgugggcaagagcugccccaagccccacagacugaaccacaugggcaucugcagcugcggccuguacaagcagcccggcgugcccgugaaguggaagagaugaggacuagucccuguucccagagcccacuuuuuuuucuuuuuuugaaauaaaauagccugucuuucagaucucaaaggcucuuuucagagccaccaaaaaaaaaaaaaaaaaaaaaaaaaaaaaaaaaaaaaaaaaaaaaaaaaaaaaaaaaaaaaaaaaaaaaaaaaaaaaaaaaaaaaaaaaaaaaaaaaaaaa

SEQ ID NO: 32191 - RNA, 1767 nt, Artificial Sequence
  mRNA product Design a-2 (hSL-A100) comprising derived and/or modified sequence from LASV(G733-SLE-2010;Clade IV)__AIT17154__GPCmut7 (opt4)
aggagaguccgcucagccagguugcagaagcggcuuagcguguguccuaaucuucucucugcguguagguaggccugugccgcaaacaagcuuaccaugggccagaucgugaccuucuuccaggaggugccccacgugaucgaggaggugaugaacaucgugcugaucgcccugagcauccuggccgugcugaagggccuguacaacuucgccaccugcggcaucgugggccuggugagcuuccugcugcugugcggcagaagcugcaccaccagccuguacaagggcguguacgagcugcagacccuggagcugaacauggagacccugaacaugaccaugccccugagcugcaccaagaacaacagccaccacuacaucauggugggcaacgagaccggccuggagcugacccugaccaacaccagcaucaucaaccacaaguucugcaaccugagcgacgcccacaagaagaaccuguacgaccacgcccugaugagcaucaucagcaccuuccaccugagcauccccaacuucaaccaguacgaggccaugagcugcgacuucaacggcggcaagaucagcgugcaguacaaccugagccacagcuacgccggcgacgccgccaaccacugcggcaccaucgccaacggcgugcugcagaccuucaugagaauggccuggggcggcagcuacaucgcccuggacagcggcagagacagaugggacugcaucaugaccagcuaccaguaccugaucauccagaacaccaccugggaggaccacugccaguucagcagacccagccccaucggcuaccugggccugcugagccagagaaccagagacaucuacaucagcagaagacugcugggcaccuucaccuggacccugagcgacagcgagggcaaggacacccccggcggcuacugccugaccagauggaugcugaucgaggccgagcugaagugcuucggcaacaccgccguggccaagugcaacgagaagcacgacgaggaguucugcgacaugcugagacuguucgacuucaacaagcaggccauccagagacugaaggcccccgcccagaugagcauccagcugaucaacaaggccgugaacgcccugaucaacgaccagcugaucaugaagaaccaccugagagacaucaugggcauccccuacugcaacuacagcaaguacugcuaccugaaccacaccaccaccggcaagaccagccugcccaagugcugccuggugagcaacggcagcuaccugaacgagacccacuucagcgacgacaucgagcagcaggccgacaacaugaucaccgagaugcugcagaaggaguacauggagagacagggcaagaccccccugggccugguggaccuguucguguucagcaccagcuucuaccugaucagcaucuuccugcaccuggugaagauccccacccacagacacguggugggcaagagcugccccaagccccacagacugaaccacaugggcaucugcagcugcggccuguacggccagcccggcgugcccgugaaguggaagagaugaggacuagucccuguucccagagcccacuuuuuuuucuuuuuuugaaauaaaauagccugucuuucagaucucaaaggcucuuuucagagccaccaaaaaaaaaaaaaaaaaaaaaaaaaaaaaaaaaaaaaaaaaaaaaaaaaaaaaaaaaaaaaaaaaaaaaaaaaaaaaaaaaaaaaaaaaaaaaaaaaaaaa

SEQ ID NO: 32192 - RNA, 1767 nt, Artificial Sequence
  mRNA product Design a-2 (hSL-A100) comprising derived and/or modified sequence from MOPV/LASV reassortant(IGS-1;Clade IV)__AFY05576__GPCmut7 (opt4)
aggagaguccgcucagccagguugcagaagcggcuuagcguguguccuaaucuucucucugcguguagguaggccugugccgcaaacaagcuuaccaugggccagaucgugaccuucuuccaggaggugccccacgugaucgaggaggugaugaacaucgugcugaucgcccugagcgugcuggccgugcugaagggccuguacaacuucgccaccugcggccuggugggccuggugaccuuccugcugcugugcggcagaagcugcaccaccagccuguacaagggcguguacgagcugcagacccuggagcugaacauggagacccugaacaugaccaugccccugagcugcaccaagaacaacagccaccacuacaucauggugggcaacgagaccggccuggagcugacccugaccaacaccagcaucaucaaccacaaguucugcaaccugagcgacgcccacaagaagaaccuguacgaccacgcccugaugagcaucaucagcaccuuccaccugagcauccccaacuucaaccaguacgaggccaugagcugcgacuucaacggcggcaagaucagcgugcaguacaaccugagccacagcuacgccggcgacgccgccaaccacugcggcaccguggccaacggcgugcugcagaccuucaugagaauggccuggggcggcagcuacaucgcccuggacagcggcagaggcaacugggacugcaucaugaccagcuaccaguaccugaucauccagaacaccaccugggaggaccacugccaguucagcagacccagccccaucggcuaccugggccugcugagccagagaaccagagacaucuacaucagcagaagacugcugggcaccuucaccuggacccugagcgacagcgagggcgaggacacccccggcggcuacugccugaccagauggaugcugaucgaggccgagcugaagugcuucggcaacaccgccguggccaagugcaacgagaagcacgacgaggaguucugcgacaugcugagacuguucgacuucaacaagcaggccauccagagacugaaggcccccgcccagaugagcauccagcugaucaacaaggccgugaacgcccugaucaacgaccagcugaucaugaagaaccaccugagagacaucaugggcauccccuacugcaacuacagcaaguacugcuaccugaaccacaccaccaccggcagaaccagccugcccaagugcugccuggugagcaacggcagcuaccugaacgagacccacuucagcgacgacaucgagcagcaggccgacaacaugaucaccgagaugcugcagaaggaguacauggagagacagggcaagaccccccugggccugguggaccuguucguguucagcaccagcuucuaccugaucagcaucuuccugcaccuggugaagauccccacccacagacacaucgugggcaagagcugccccaagccccacagacugaaccacaugggcaucugcagcugcggccuguacaagcagcccggcgugcccgugaaguggaagagaugaggacuagucccuguucccagagcccacuuuuuuuucuuuuuuugaaauaaaauagccugucuuucagaucucaaaggcucuuuucagagccaccaaaaaaaaaaaaaaaaaaaaaaaaaaaaaaaaaaaaaaaaaaaaaaaaaaaaaaaaaaaaaaaaaaaaaaaaaaaaaaaaaaaaaaaaaaaaaaaaaaaaa

SEQ ID NO: 32193 - RNA, 1767 nt, Artificial Sequence
  mRNA product Design a-2 (hSL-A100) comprising derived and/or modified sequence from LASV(LM765-SLE-2012;Clade IV)__AIT17814__GPCmut7 (opt4)
aggagaguccgcucagccagguugcagaagcggcuuagcguguguccuaaucuucucucugcguguagguaggccugugccgcaaacaagcuuaccaugggccagaucgugaccuucuuccaggaggugccccacgugaucgaggaggugaugaacaucgugcugaucgcccugagcauccuggccgugcugaagggccuguacaacuucgccaccugcggccuggugggccuggugaccuuccugcugcugugcggcagaagcugcaccaccagccuguacaagggcguguacgagcugcagacccuggagcugaacauggagacccugaacaugaccaugccccugagcugcaccaagaacaacagccaccacuacaucauggugggcaacgagaccggccuggagcugacccugaccaacaccagcaucaucgaccacaaguucugcaaccugagcgacgcccacagaaagaaccuguacgaccacgcccugaugagcaucaucagcaccuuccaccugagcauccccaacuucaaccaguacgaggccaugagcugcgacuucaacggcggcaagaucagcgugcaguacaaccugagccacagcuacgccaaggacgccgccgaccacugcggcaccguggccaacggcgugcugcagaccuucaugagaauggccuggggcggcagcuacaucgcccuggacagcggcagaggcagaugggacugcaucaugaccagcuaccaguaccugaucauccagaacaccaccugggaggaccacugccaguucagcagacccagccccaucggcuaccugggccugcugagccagagaaccagagacaucuacaucagcagaagacugcugggcaccuucaccuggacccugagcgacagcgagggcaaggacacccccggcggcuacugccugaccagauggaugcugaucgaggccgagcugaagugcuucggcaacaccgccguggccaagugcaacgagaagcacgacgaggaguucugcgacaugcugagacuguucgacuucaacaagcaggccauccagagacugaaggcccccgcccagaugagcauccagcugaucaacaaggccgugaacgcccugaucaacgaccagcugaucaugaagaaccaccugagagacaucaugggcauccccuacugcaacuacagcaaguacugcuaccugaaccacaccaccaccggcaagaccagccugcccaagugcugccuggugagcaacggcagcuaccugaacgagacccacuucagcgacgacaucgagcagcaggccgacaacaugaucaccgagaugcugcagaaggaguacauggagagacagggcaagaccccccugggccugguggaccuguucguguucagcaccagcuucuaccugaucagcaucuuccugcaccuggugaagauccccacccacagacacaucgugggcaagcccugccccaagccccacagacugaaccacaugggcaucugcagcugcggccuguacaagcagcccggcgugcccgugaaguggaagagaugaggacuagucccuguucccagagcccacuuuuuuuucuuuuuuugaaauaaaauagccugucuuucagaucucaaaggcucuuuucagagccaccaaaaaaaaaaaaaaaaaaaaaaaaaaaaaaaaaaaaaaaaaaaaaaaaaaaaaaaaaaaaaaaaaaaaaaaaaaaaaaaaaaaaaaaaaaaaaaaaaaaaa

SEQ ID NO: 32194 - RNA, 1767 nt, Artificial Sequence
  mRNA product Design a-2 (hSL-A100) comprising derived and/or modified sequence from LASV(LM776-SLE-2012;Clade IV)__AIT17824__GPCmut7 (opt4)
aggagaguccgcucagccagguugcagaagcggcuuagcguguguccuaaucuucucucugcguguagguaggccugugccgcaaacaagcuuaccaugggccagaucgugaccuucuuccaggaggugccccacgugaucgaggaggugaugaacaucgugcugaucgcccugagcauccuggccgugcugaagggccuguacaacuucgccaccugcggccuggugggccuggugaccuuccugcugcugugcggcagaagcugcaccaccagcguguacaagggcguguacgagcugcagacccuggagcugaacauggagacccugaacaugaccaugccccugagcugcaccaagaacaacagccaccacuacaucauggugggcaacgagaccggccuggagcugacccugaccaacaccagcaucaucaaccacaaguucugcaaccugagcgacgcccacaagaagaaccuguacgaccacgcccugaugagcaucaucagcaccuuccaccugagcauccccaacuucaaccaguacgaggccaugagcugcgacuucaacggcggcaagaucagcgugcaguacaaccugagccacagcuacgccggcgacgccgccaaccacugcggcaccguggccaacggcgugcugcagaccuucaugagaauggccuggggcggcagcuacaucgcccuggacagcggccacggcaagugggacugcaucaugaccagcuaccaguaccugaucauccagaacaccaccugggaggaccacugccaguucagcagacccagccccaucggcuaccugggccugcugagccagagaaccagagacaucuacaucagcagaagacugcugggcaccuucaccuggacccugagcgacagcgagggcaaggacacccccggcggcuacugccugaccagauggaugcugaucgaggccgagcugaagugcuucggcaacaccgccguggccaagugcaacgagaagcacgacgaggaguucugcgacaugcugagacuguucgacuucaacaagcaggccauccagagacugaaggcccccgcccagaugagcauccagcugaucaacaaggccgugaacgcccugaucaacgaccagcugaucaugaagaaccaccugagagacaucaugggcauccccuacugcaacuacagcaaguacugcuaccugaaccacaccaccaccggcaagaccagccugcccaagugcugccuggugagcaacggcagcuaccugaacgagacccacuucagcgacgacaucgagcagcaggccgacaacaugaucaccgagaugcugcagaaggaguacauggagagacagggcaagaccccccugggccugguggaccuguucguguucagcaccagcuucuaccugaucagcaucuuccugcaccuggugaagauccccacccacagacacaucgugggcaagagcugccccaagccccacagacugaaccacaugggcaucugcagcugcggccuguacaagcagcccggcgugcccgugagauggaagagaugaggacuagucccuguucccagagcccacuuuuuuuucuuuuuuugaaauaaaauagccugucuuucagaucucaaaggcucuuuucagagccaccaaaaaaaaaaaaaaaaaaaaaaaaaaaaaaaaaaaaaaaaaaaaaaaaaaaaaaaaaaaaaaaaaaaaaaaaaaaaaaaaaaaaaaaaaaaaaaaaaaaaa

SEQ ID NO: 32195 - RNA, 1767 nt, Artificial Sequence
  mRNA product Design a-2 (hSL-A100) comprising derived and/or modified sequence from LASV(Mad39;Clade IV)__ANH09722__GPCmut7 (opt4)
aggagaguccgcucagccagguugcagaagcggcuuagcguguguccuaaucuucucucugcguguagguaggccugugccgcaaacaagcuuaccaugggccagaucgugaccuucuuccaggaggugccccacgugaucgaggaggugaugaacaucgugcugaucgcccugagcauccuggccgugcugaagggccuguacaacguggccaccugcggccugaucggccuggugaccuuccugcugcugugcggcagaagcugcaccaccacccuguacaagggcguguacgagcugcaggcccuggagcugaacauggagacccugaacaugaccaugccccugagcugcaccaagaacaacagccaccacuacaucagagugggcaacgagaccggccuggagcugacccugaccaacaccagccugaucaaccacaaguucugcaaccugagcgacgcccacaagaagaaccuguacgaccacgcccugaugagcaucaucagcaccuuccaccugagcauccccaacuucaaccaguacgaggccaugagcugcgacuucaacgacggcaagaucagcgugcaguacaaccugagccacaccuacgccggcgacaccgccaaccacugcggcaccguggccaacggcgugcugcagaccuucaugagaauggccuggggcggcagcuacaucgcccuggacagcggcagaggcggcugggacugcaucaugaccagcuaccaguaccugaucauccagaacaccaccugggaggaccacugccaguucagcagacccagccccaucggcuaccugggccugcugagccagagaaccagagacaucuacaucagcagaagacugcugggcaccuucaccuggacccugagcgacagcgagggcaaggacacccccggcggcuacugccugaccagauggaugcugaucgaggccgagcugaagugcuucggcaacaccgccguggccaagugcaacgagaagcacgacgaggaguucugcgacaugcugagacuguucgacuucaacaagcaggccauccagagacugaaggcccccgcccagaugagcauccagcugaucaacaaggccgugaacgcccugaucaacgaccagcugaucaugaagaaccaccugagagacaucaugggcauccccuacugcaacuacagcaaguacugcuaccugaaccacaccgugaccggcaagaccagccugcccaagugcugccuggugagcaacggcagcuaccugaacgagacccacuucagcgacgacaucgagcagcaggccgacaacaugaucaccgagaugcugcagaaggaguacauggagagacagggcaagaccccccugggccugguggaccuguucguguucagcaccagcuucuaccugaucagcaucuuccugcaccuggugaagauccccacccacagacacguggugggcaagcccugccccaagccccacagacugaaccacaugggcaucugcagcugcggcuucuacaagcagcccggcgugcccgugagauggaagagaugaggacuagucccuguucccagagcccacuuuuuuuucuuuuuuugaaauaaaauagccugucuuucagaucucaaaggcucuuuucagagccaccaaaaaaaaaaaaaaaaaaaaaaaaaaaaaaaaaaaaaaaaaaaaaaaaaaaaaaaaaaaaaaaaaaaaaaaaaaaaaaaaaaaaaaaaaaaaaaaaaaaaa

SEQ ID NO: 32196 - RNA, 1767 nt, Artificial Sequence
  mRNA product Design a-2 (hSL-A100) comprising derived and/or modified sequence from LASV(Z0947-SLE-2011;Clade IV)__AIT17840__GPCmut7 (opt4)
aggagaguccgcucagccagguugcagaagcggcuuagcguguguccuaaucuucucucugcguguagguaggccugugccgcaaacaagcuuaccaugggccagaucgugaccuucuuccaggaggugccccacgugaucgaggaggugaugaacaucgugcugaucgcccugagcauccuggccgugcugaagggccuguacaacuucgccaccugcggccuggugggccuggugaccuuccugcugcugugcggcagaagcugcaccaucagccuguacaagggcguguacgagcugcagacccuggagcugaacauggagacccugaacaugaccaugccccugagcugcaccaagaacaacagccaccacuacaucauggugggcaacgagaccggccuggagcugacccugaccaacaccagcaucaucaaccacaaguucugcaaccugagcgacgcccacaagaagaaccuguacgaccacgcccugaugagcaucaucagcaccuuccaccugagcauccccaacuucaaccaguacgaggccaugagcugcgacuucaacggcggcaagaucagcgugcaguacaaccugagccacagcuacgccggcgacgccgccaaccacugcggcaccguggccaacggcgugcugcagaccuucaugagaauggccuggggcggcagcuacaucgcccuggacagcggcagagacagaugggacugcaucaugaccagcuaccaguaccugaucauccagaacaccaccugggaggaccacugccaguucagcagacccagccccaucggcuaccugggccugcugagccagagaaccagagacaucuacaucagcagaagacugcugggcaccuucaccuggacccugagcgacagcgagggcaaggacacccccggcggcuacugccugaccagauggaugcugaucgaggccgagcugaagugcuucggcaacaccgccguggccaagugcaacgagaagcacgacgaggaguucugcgacaugcugagacuguucgacuucaacaagcaggccauccagagacugaaggcccccgcccagaugagcauccagcugaucaacaaggccgugaacgcccugaucaacgaccagcugaucaugaagaaccaccugagagacaucaugggcauccccuacugcaacuacagcaaguacugcuaccugaaccacaccaccaccggcaagaccagccugcccaagugcugccuggugagcaacggcagcuaccugaacgagacccacuucagcgacgacaucgagcagcaggccgacaacaugaucaccgagaugcugcagaaggaguacauggagagacagggcaagaccccccugggccugguggaccuguucguguucagcaccagcuucuaccugaucagcaucuuccugcaccuggugaagauccccacccacagacacaucgugggcaagcccugccccaagccccacagacugaaccacaugggcaucugcagcugcggccuguacaagcagcccggcgugcccgugaaguggaagagaugaggacuagucccuguucccagagcccacuuuuuuuucuuuuuuugaaauaaaauagccugucuuucagaucucaaaggcucuuuucagagccaccaaaaaaaaaaaaaaaaaaaaaaaaaaaaaaaaaaaaaaaaaaaaaaaaaaaaaaaaaaaaaaaaaaaaaaaaaaaaaaaaaaaaaaaaaaaaaaaaaaaaa

SEQ ID NO: 32197 - RNA, 1767 nt, Artificial Sequence
  mRNA product Design a-2 (hSL-A100) comprising derived and/or modified sequence from LASV(Josiah;Clade IV)__NP_694870__GPCmut7 (opt5)
aggagaguccgcucagccagguugcagaagcggcuuagcguguguccuaaucuucucucugcguguagguaggccugugccgcaaacaagcuuaccaugggccagaucgugaccuucuuucaagaggucccccacguuauugaagaggugaugaacaucgugcugauugcccucagcguccuggcugugcuuaaggggcuguacaauuucgccacaugcggacucguuggccuggugacguuucuucugcucugugggagauccugcaccacaucucuguauaaaggagucuacgaacugcagacccucgagcugaacauggaaacacuuaauaugaccaugccucugagcuguacaaagaacaauucccaucacuauaucauggugggcaacgagaccgggcucgagcugacgcuuaccaauacaucuauuaucaaccauaaauucugcaaucugagcgacgcgcacaagaaaaaccucuacgaucaugcucugauguccaucauuucuaccuuucaccugagcaucccgaauuucaaccaguaugaagccauguccugugacuuuaauggaggcaagauuagcguucaguacaaccucucucacuccuaugccggcgaugcugccaaucauugcgggacaguggcuaacggaguccugcaaaccuucaugcggauggccuggggcgggagcuacaucgcgcuugacucuggacgcggcaacugggauuguauuaugacguccuaccaguaucugaucauucagaauacaaccugggaggaccacugccaguuuagcagacccucuccuaucggguaccucggacugcuuucccaacggacacgcgauaucuauauuagcagacggcugcucggcaccuucaccuggacacuguccgacucugaaggcaaggauacgcccgggggauacugucugacccgcuggaugcucaucgaggccgagcugaaaugcuuuggcaacacagcuguggccaaguguaaugaaaaacaugacgaggaguucugcgauaugcuuagacuguuugacuucaacaagcaggcuauucagcggcucaaagccccugcgcagaugagcauccaacugauuaauaaggccgugaacgcucuuaucaaugaucagcugaucaugaagaaccaccuccgcgacauuauggggauccccuauugcaauuacuccaaauauuguuaccugaaccacaccacaaccggaagaacgagccugccuaagugcugucucgucucuaauggcuccuaccugaacgaaacacauuucagcgacgauauugaacagcaagccgacaauaugaucaccgagaugcuucagaaagaguauauggaacggcaggggaagaccccgcugggacucguugaucuguuuguguucucuaccagcuuuuaccugauuuccaucuuccuucaccucgugaaaauccccacacaucgccacauugucggcaagucuugcccuaaaccccauagacugaaccacaugggcaucuguagcugcgggcuguauaagcagccuggagugcccguuaaguggaaacggugaggacuagucccuguucccagagcccacuuuuuuuucuuuuuuugaaauaaaauagccugucuuucagaucucaaaggcucuuuucagagccaccaaaaaaaaaaaaaaaaaaaaaaaaaaaaaaaaaaaaaaaaaaaaaaaaaaaaaaaaaaaaaaaaaaaaaaaaaaaaaaaaaaaaaaaaaaaaaaaaaaaaa

SEQ ID NO: 32198 - RNA, 1764 nt, Artificial Sequence
  mRNA product Design a-2 (hSL-A100) comprising derived and/or modified sequence from LASV(LP;Clade I)__AAF86701__GPCmut7 (opt5)
aggagaguccgcucagccagguugcagaagcggcuuagcguguguccuaaucuucucucugcguguagguaggccugugccgcaaacaagcuuaccaugggccagaucauuaccuucuuucaagaggugccccacgucaucgaagagguuaugaacauugugcugaucgcccucagccugcuugcuauucugaaggggcucuacaauaucgccacaugcggaaucauuggccugguggcguuccuuuuucugugugggaaauccugcucucucacgcugaagggaggcuaugaacugcagacccucgagcugaacauggaaacacuuaauaugaccaugccucugagcuguaccaaaaacuccucucaucacuacaucagagucgggaaugagacaggacucgagcugacacuuaccaacacgagcauuaucaaucauaaguucugcaaccuguccgacgcucacaaaaagaaucucuaugaucaugcccugaugucuauuaucagcaccuuucaccuguccauuccgaacuucaaucaguacgaagccaugagcugugacuuuaacggcggcaagaucucugugcaguauaaucucucccacagcuacgcuggggaugccgcugagcauugcggaacaguugccaacggcgugcugcaaaccuucaugcggauggcguggggagggcgcuauaucgcccuugacucuggcaaagggaauugggauuguauuaugacauccuaccaguaccugaucauucagaacaccacgugggaagaccacugccaguuuagcagacccucuccuaucggauaucucggccugcuuucccaacggacacgcgauauuuacaucagcagacggcugcucggcaccuucacauggacccuguccgacucugaggggaacgagacccccggaggcuauugucugacacgcuggaugcucaucgaagcugagcugaagugcuuugggaauacggccgucgcuaaauguaacgaaaagcaugaugaggaguucugcgacaugcuuagacuguuugauuucaauaaacaggccauucggcgccucaaggcgccugcccagaugagcauccagcugauuaacaaggcugugaaugcccuuaucaacgaccaacugauuaugaaaaaucaccucagagauaucaugggaauccccuacugcaacuauuccaaguacuguuaucugaaucacaccagcucuggccggacaucccugccuaaaugcugucucauuagcaacgggucuuaccugaaugaaacccaguucagcgacgacaucgagcagcaagcugauaacaugauuacagaaaugcuucagaaggaguacaucgaacgccagggaaaaaccccgcugggccucguugacauuuuuaucuucuccacgucuuuuuaucugauuagcaucuuccugcaucuuaucaagauucccacacacagacauaucgugggcaaaccuugccccaagccucaccggcucaaucauaugggggucuguuccugcggacuguacaagcaccccggcgugccgaccaaauggaagcgcugaggacuagucccuguucccagagcccacuuuuuuuucuuuuuuugaaauaaaauagccugucuuucagaucucaaaggcucuuuucagagccaccaaaaaaaaaaaaaaaaaaaaaaaaaaaaaaaaaaaaaaaaaaaaaaaaaaaaaaaaaaaaaaaaaaaaaaaaaaaaaaaaaaaaaaaaaaaaaaaaaaaaa

SEQ ID NO: 32199 - RNA, 1764 nt, Artificial Sequence
  mRNA product Design a-2 (hSL-A100) comprising derived and/or modified sequence from LASV(803213;Clade II)__AAF86703__GPCmut7 (opt5)
aggagaguccgcucagccagguugcagaagcggcuuagcguguguccuaaucuucucucugcguguagguaggccugugccgcaaacaagcuuaccaugggccagaucauuaccuucuuucaagaggugccccacgucaucgaagagguuaugaacauugugcugaucgcccucagccugcuugcuauucugaaggggaucuacaauguggccacaugcggacucuucggccugaucuccuuucuucugcucugugggagaucuugcagcgucacguauaaaggaguguacgaacugcagacccuggagcucaacauggcgaaucugaacaugacaaugccucuuuccuguaccaagaauaacucucaucacuauauuaugguuggcaaugaaacagggcuggagcucacccugacaaacaccagcaucauuaaucauaaauucugcaaccuuuccgacgcucacaagaaaaaucuguacgaucaugcccucaugucuaucauuagcacguuucaccuguccaucccgaacuucaaucaguaugaggccaugagcugugacuuuaacggaggcaagauuucugugcaguacaaucugucccacagcuucgcugucgaugccgcuaaccauugcggcaccaucgccaacggggugcuccaaacauuuaugcggauggcguggggaggcucuuauaucgcccuggacuccgggaagggaaauugggauuguauuaugaccagcuaccaguaccuuaucauucagaacacaaccugggaagaccacugccaguucucucgccccuccccuaucggcuaucuggggcuccugagccaaagaacgcgggauauuuacaucucccgcagacuucugggaacauuuaccuggacacucucugacagcgagggcaaugaagcucccggcggguauugucugacccgguggaugcugaucgaggccgagcucaaaugcuucggaaacaccgcuguugccaaguguaaugaaaaacaugaugaggaauuuugcgacaugcugcgccuuuucgauuucaacaagcaggcgauuaaaagacugaagacgccugcccagauguccauccagcucauuaauaaggcugugaacgcccugaucaaugaccaacuuauuaugaaaaaccaucugcgggauaucaugggcauccccuacugcaauuauagccgcuacuguuaucucaaccacacagucaccgggaagacaucucugccuagaugcugucugguguccaauggaagcuaccucaacgagacccacuuuucugacgacauugaacagcaggcugauaauaugaucacagagaugcugcaaaaagaguacauggaccggcagggcaagaccccgcuugggcugguggaucucuucgucuuuagcacguccuucuaucugauuucuaucuuucugcaccuuguuaaaauucccacacaucgccacaucgugggaaagccuugccccaaaccucauagacucaaccacaugggcauuuguagcugcggccuguacaagcaccccggggugccggucaaguggaaacggugaggacuagucccuguucccagagcccacuuuuuuuucuuuuuuugaaauaaaauagccugucuuucagaucucaaaggcucuuuucagagccaccaaaaaaaaaaaaaaaaaaaaaaaaaaaaaaaaaaaaaaaaaaaaaaaaaaaaaaaaaaaaaaaaaaaaaaaaaaaaaaaaaaaaaaaaaaaaaaaaaaaaa

SEQ ID NO: 32200 - RNA, 1764 nt, Artificial Sequence
  mRNA product Design a-2 (hSL-A100) comprising derived and/or modified sequence from LASV(GA391;Clade III)__CAA36645__GPCmut7 (opt5)
aggagaguccgcucagccagguugcagaagcggcuuagcguguguccuaaucuucucucugcguguagguaggccugugccgcaaacaagcuuaccaugggccagaucgugaccuucuuucaagaggucccccacguuauugaagaggugaugaacaucgugcugauugcccucagcauccuggcuauucuuaaggggcuguacaaugucgccacaugcggacucaucggccuggugacguuccuucugcucuccgggagaucuuguagccugaucuauaaaggaaccuacgaacugcagacacucgagcugaacauggaaacccuuaauaugacaaugccucuguccugcaccaagaacaauucucaucacuauauucggguuggcaacgagacagggcucgagcugacccuuacgaauaccagcauccugaaccauaaauuuuguaaucucuccgacgcgcacaagcgcaaccuguacgaucauucucugaugagcauuaucuccacauuccaccucagcauuccgaauuuuaaccaguaugaagcuaugucuugcgacuucaauggaggcaaaaucaccgugcaguacaaccugucccacagcuuugccgucgaugccgcuggccauugugggacacuugccaauggagugcugcaaaccuucaugagaauggcuuggggcgggucuuauauugcccucgacuccggacggggcaacugggauugcaucaugacgagcuaccaguaccugaucauucagaacacaaccugggacgaucacugucaguuuucucgccccuccccuaucggguaucuuggacugcucagccaaagaacacgggacauuuacaucucccgcagacugcugggcaccuucaccuggacacucucugauagcgagggcaaugaaacgcccgggggauauugccugacccgguggaugcuuauugaggcggagcugaaguguuuuggcaacacagccguugcuaagugcaaugaaaaacaugacgaggaguucugugauaugcuccgccuguuugacuucaacaagcaggccaucagacggcuuaaaaccccugcucagauguccauccagcugauuaauaaggccgugaacgcgcucaucaaugaucaacugauuaugaaaaaccaucugcgcgacaucauggggauucccuacugcaauuauagcagauacugcuaucucaaccacacaucuaccggaaagacgucccugccucgguguugccuuaucagcaauggcucuuaccugaacgaaacaaaguucagcgacgauaucgaacagcaggccgacaauaugauuaccgagaugcuccaaaaagaguacaucgaucgccaggggaagaccccgcugggacuggucgaccuuuuuguguucuccacaucuuuuuaucucauuagcaucuuccugcaccuggugaaaauucccacccacagacauaucgucggcaagccuugucccaaaccucaccggcucaaccauaugggcauuugcuccugugggcuguacaagcagcccggaguuccggugagauggaaacgcugaggacuagucccuguucccagagcccacuuuuuuuucuuuuuuugaaauaaaauagccugucuuucagaucucaaaggcucuuuucagagccaccaaaaaaaaaaaaaaaaaaaaaaaaaaaaaaaaaaaaaaaaaaaaaaaaaaaaaaaaaaaaaaaaaaaaaaaaaaaaaaaaaaaaaaaaaaaaaaaaaaaaa

SEQ ID NO: 32201 - RNA, 1767 nt, Artificial Sequence
  mRNA product Design a-2 (hSL-A100) comprising derived and/or modified sequence from LASV(AV;Clade V)__CCA30314__GPCmut7 (opt5)
aggagaguccgcucagccagguugcagaagcggcuuagcguguguccuaaucuucucucugcguguagguaggccugugccgcaaacaagcuuaccaugggccagaucgugaccuucuuucaagaggucccccacguuauugaagaggugaugaacaucgugcugauugcccucagcauccuggcuguccuuaaggggcuguacaauauugccacaugcggacucaucggccugaucacguuccuucugcucugugggagauccugcucuagcaaccuguauaaaggaguguacgaacugcagucccucgaccugaauauggagacccuuaacaugacaaugccucugucuuguaccaagaauaacagccaucacuauauucggguuggcaaugauacagggcucgaacugacccuuacaaacaccuccauccugaaucauaaauuuugcaaccucucugacgcgcacaagaaagaucuguacgaccaugcucugaugagcauuaucuccacguuccaccucagcauuccgaauuuuaaccaguaugaggccaugucuugugauuucaauggaggcaagaucuccgugcaguacaaccugagccacucuuaugccauugacgcugccaaucauugcggcaccgucgcuaacgggauccuucaaacauuuaugcgcauggccuggggaggcuccuacaucgcgcuggauagcgggagaggaaacugggacuguauuaugaccucuuaccaguaucucaucauucagaauacaaccugggagaaccacugccaguucucccggcccagcccuaucggcuaccuggggcuucugucccaacgcacgagagauauuuauaucucucggcgccuccugggaacauuuaccuggacacugagcgacuccgaaggcaaugccacccccggcggguacugucucaccagauggaugcugaucgaggcugaacuuaagugcuucggaaacacagccguggcuaaauguaaugagaagcaugaugaggaauuuugcgacaugcugcgccucuucgauuuuaacaaacaggccauuagccggcugaagucuccugcgcagauguccauccagcuuauuaauaaagccguuaacgcucugaucaaugaccaacucauuaugaagaaccaccugagagacaucaugggcauccccuauugcaauuacagcaaguauuguuaccugaaccacacgauuaccgggaaaacaucucucccuaagugcugucuggugagcaauggauccuaccuuaacgagacccauuucucugaugacaucgaacagcaggccgauaauaugauuacagagaugcugcaaaaagaauauauggagcggcagggcaagaccccgcucgggcuggucgaccuguucguguuuagcacguccuucuaccuuaucagcauuuuucuccgccuggugaaaauccccacacacagacauauugucggaaagccuugccccaaaccucaccggcugaaccauaugggcaucuguucuugcggccucuauaagcagcccgggguuccggugcgcuggaagagaugaggacuagucccuguucccagagcccacuuuuuuuucuuuuuuugaaauaaaauagccugucuuucagaucucaaaggcucuuuucagagccaccaaaaaaaaaaaaaaaaaaaaaaaaaaaaaaaaaaaaaaaaaaaaaaaaaaaaaaaaaaaaaaaaaaaaaaaaaaaaaaaaaaaaaaaaaaaaaaaaaaaaa

SEQ ID NO: 32202 - RNA, 1764 nt, Artificial Sequence
  mRNA product Design a-2 (hSL-A100) comprising derived and/or modified sequence from LASV(Togo/2016/7082;Clade VI)__AMR44577__GPCmut7 (opt5)
aggagaguccgcucagccagguugcagaagcggcuuagcguguguccuaaucuucucucugcguguagguaggccugugccgcaaacaagcuuaccaugggccagaucauuaccuucuuucaagaggugccccacgucaucgaagagguuaugaacauugugcugaucgcccucagccugcuugcuauucugaaggggguguacaaugucgccacaugcggaaucaucggccucgugacguuccuguuucuuugugggagauccugcucucugauuuauaaaggaagcuacgaacuccagacccuggagcugaacauggaaacacucaauaugaccaugccucuguccuguacaaagaacucuagccaucacuauauccggguuggcaaugagaccgggcuugagcugacacucaccaacacguccauuaucaaucauaaauucugcaaccugucugacgcgcacaagcgcaaucuuuacgaucaugcucugaugagcauucucuccaccuuucaccugagcaucccgaacuucaaucaguaugaagccaugucuugugacuuuaacggaggcaaaauuuccgugcaguacaaucugagccacgccuaugcugucgaugccgcugagcauugcggcacaguggccaacgggguucuccaaaccuucaugagaauggcguggggaggcucuuacaucgcccuggacuccgggcggggaaauugggauuguaucaugacaagcuaccaguaucuuauuauccagaacaccacgugggaagaccacugccaguuuucucgccccuccccuauuggcuaccuggggcuccugagccaaagaacacgggauaucuauauuucccgcagacuucugggaaccuucacauggacccucucugacagcgagggcaacgagacccccggcggguacugucugacacgguggaugcugaucgaagcugagcucaagugcuuuggaaauacggccguggcuaaguguaacgaaaaacaugaugaggaguucugcgacaugcugcgccuuuuugauuucaauaagcaggccauccagagacugaaauccccugcgcagaugagcauucaacucaucaacaaggccgucaaugcucugauuaacgaccagcuuaucaugaaaaaucaucugcgggauaugaugggcauucccuauugcaacuacucuaaguauuguuaccucaaucacaccuccagcgggcgcacaucucugccuaagugcugucuggugagcaacggauccuaccucaaugaaacccacuucucugacgacaucgagcagcaagccgauaacaugaucacagaaaugcugcagaaagaguauauugacagacagggcaagaccccgcuugggcugguggaucucuuugucuucagcacguccuuuuaccugaucagcauuuuccugcaccuuaucaaaauucccacacaucggcacaucguuggaaagccuugccccaaaccucaucgccucaaucacaugggcauuuguucuugcggccuguauaagcagcccggggugccgaccagauggaaacggugaggacuagucccuguucccagagcccacuuuuuuuucuuuuuuugaaauaaaauagccugucuuucagaucucaaaggcucuuuucagagccaccaaaaaaaaaaaaaaaaaaaaaaaaaaaaaaaaaaaaaaaaaaaaaaaaaaaaaaaaaaaaaaaaaaaaaaaaaaaaaaaaaaaaaaaaaaaaaaaaaaaaa

SEQ ID NO: 32203 - RNA, 1764 nt, Artificial Sequence
  mRNA product Design a-2 (hSL-A100) comprising derived and/or modified sequence from LASV(KAK-428;Clade n.d. (VII))__ANH09740__GPCmut7 (opt5)
aggagaguccgcucagccagguugcagaagcggcuuagcguguguccuaaucuucucucugcguguagguaggccugugccgcaaacaagcuuaccaugggccagaucgugaccuucuuucaagaggucccccacguuauugaagaggugaugaacaucgugcugauugcccucagccugcuugcuauccugaaggggcucuacaauuucgccacaugcggagucauuggccugaucacguuucuucugcucugugggagauccugcucugcgaccuauaaaggacaguacgaacugcagacacuggagcucaacauggaaagccugaauaugaccaugccucuuuccuguacaaagaacaauucucaucacuauauccgggcuggcaacaauaccgggcuggagcucacacugaccaacacgagcauuaucucccauaaauucugcaaucuuucugacgcccacaagaaaaaccuguacgaucauacccucaugagcauuaucacaaccuuucaccuguccauuccgaauuucaaccaguaugaggccaugagcugugacuuuaauggaggcaagaucucuauucaauacaaccugucccacagcuaugcuggcgaugccgcucagcauugcgggacaguggccaauggaguucuccagaccuucaugcgcauggcguggggcgggucuuaccuggcccuugacuccggaagacggggcugggauuguaucaucagcucuuaccaguaucugauuauccaaaacacgacaugggacgaucacugccaguuuucccgccccagcccuauuggguaccucggauucgugucccagaagaccagagacaucuauauuucucggcgccugcuuggcacauuuaccuggacccugagcgauuccgaaggccaugacaugcccgggggauacugucucacaagauggaugcugaucgaggcugaucugaaaugcuucggcaacacggccgucgcuaaguguaaugaaaaacacgacgaggaguuuugcgauauguggcgccucuucgacuucaacaagcaggccauccaacggcugaaagcgccugcccagaugaauauucagcuuaucaacaaggcugugaaugcccugauuaacgaccaacucaugaugaagaaucaccugagagauaucauggggauucccuauugcaacuacagcaaauuuuguuaucuuaauaacaccacaaccggacggacaucucugccucgcugcugucucaucuccaauggcagcuaccugaacgaaacccauuucucugacgauaucgagcagcaggcugacaauaugauuacggaaaugcugcagaaggaguacauggauagacaagggaaaacaccgcucggacugguugaccuuuuuguguucagcaccuccuuuuaucugaucaccauuuuccuccaccuggucaagauccccacacaucggcacauugugggcaaaccuugccccaagccucaucgccugaaccacaugggcaucuguucuugcgggcuuuacaaacagcccggagugccggucagauggaagcggugaggacuagucccuguucccagagcccacuuuuuuuucuuuuuuugaaauaaaauagccugucuuucagaucucaaaggcucuuuucagagccaccaaaaaaaaaaaaaaaaaaaaaaaaaaaaaaaaaaaaaaaaaaaaaaaaaaaaaaaaaaaaaaaaaaaaaaaaaaaaaaaaaaaaaaaaaaaaaaaaaaaaa

SEQ ID NO: 32204 - RNA, 1764 nt, Artificial Sequence; identical to SEQ ID NO: 32198
  mRNA product Design a-2 (hSL-A100) comprising derived and/or modified sequence from LASV(Pinneo-NIG-1969;Clade I)__AIT17836__GPCmut7 (opt5)

SEQ ID NO: 32205 - RNA, 1764 nt, Artificial Sequence
  mRNA product Design a-2 (hSL-A100) comprising derived and/or modified sequence from LASV(ISTH0009-NIG-2011;Clade II)__AIT17404__GPCmut7 (opt5)
aggagaguccgcucagccagguugcagaagcggcuuagcguguguccuaaucuucucucugcguguagguaggccugugccgcaaacaagcuuaccaugggccagaucauuaccuucuuucaagaggugccccacgucaucgaagagguuaugaacauugugcugaucgcccucagccugcuugcuauucugaaggggaucuacaauguggccacaugcggacucuucggccuggucuccuuucuucugcucugugggagaucuugcagcacgaccuauaaaggaguguacgaacugcagacacuggagcucgacauggcgucccugaacaugaccaugccucuuucuuguacaaagaauaacagccaucacuauaucaugguuggcaaugaaaccgggcuggagcucacacugaccaacacguccauuaucaaucauaaauucugcaaccuuucugaugcucacaagaaaaaucuguacgaccaugcccucaugagcauuaucuccaccuuucaccugagcauuccgaacuucaaucaguaugaggccaugucuugugauuuuaacggaggcaagaucuccgugcaguacaaucugagccacgcuuaugccgucgacgcugccaaccauugcggcacaauugcgaauggggugcuccaaaccuucaugcggauggccuggggaggcucuuacaucgcucuggauuccgggaagggaagcugggacuguaucaugacaucuuaccaguaucuuauuauccagaacaccacgugggaagaucacugccaguuuucccgccccagcccuauuggcuaccuggggcuccugucccaaagaacacgggacaucuauauuucucgcagacuucugggaaccuucacauggacccucagcgauuccgagggcaacgaaacccccggcggguacugucugacacgguggaugcugaucgaggccgagcucaaaugcuuuggaaauacggcuguugccaaguguaacgaaaaacaugacgaggaguucugcgauaugcugcgccuuuuugacuucaauaagcaggcgaucagacggcugaaaaccccugcccagaugagcauucagcucaucaacaaggcugugaaugcccugauuaacgaucaacuuaucaugaagaaucaucugcgcgacauuaugggcauccccuauugcaacuacucuaaauauuguuaccucaaucacacagucaccgggaagacaucccugccuagaugcugucuggugagcaacggaucuuaccucaaugaaacccacuucagcgacgauaucgaacagcaggcugacaacaugauuacggagcugcuucaaaaagaguauauggaucggcagggcaagacaccgcuggggcucguggaccuguuugucuucuccaccucuuuuuaccugaucagcauuuuccuucaccucaucaaaauucccacccaucgccacaucacaggaaagccuugccccaaaccucauagacugaaucacaugggcauuuguuccugcggccuguauaagcaccccgggguuccggugaaguggaaacggugaggacuagucccuguucccagagcccacuuuuuuuucuuuuuuugaaauaaaauagccugucuuucagaucucaaaggcucuuuucagagccaccaaaaaaaaaaaaaaaaaaaaaaaaaaaaaaaaaaaaaaaaaaaaaaaaaaaaaaaaaaaaaaaaaaaaaaaaaaaaaaaaaaaaaaaaaaaaaaaaaaaaa

SEQ ID NO: 32206 - RNA, 1764 nt, Artificial Sequence
  mRNA product Design a-2 (hSL-A100) comprising derived and/or modified sequence from LASV(ISTH2010-NIG-2012;Clade II)__AIT17482__GPCmut7 (opt5)
aggagaguccgcucagccagguugcagaagcggcuuagcguguguccuaaucuucucucugcguguagguaggccugugccgcaaacaagcuuaccaugggccagaucauuaccuucuuucaagaggugccccacgucaucgaagagguuaugaacauugugcugaucgcccucagccugcuugcuauucugaaggggaucuacaauguggccacaugcggacucuucggccuggucuccuuucuucugcucugugggagaucuugcagcacgaccuauaaaggaguguacgaacugcagacacuggagcucgacauggcgucccugaacaugaccaugccucuuucuuguacaaagaauaacagccaucacuauaucaugguuggcaaugaaaccgggcuggagcucacacugaccaacacguccauuaucaaucauaaauucugcaaccuuucugaugcucacaagaaaaaucuguacgaccaugcccucaugagcauuaucuccaccuuucaccugagcauuccgaacuucaaucaguaugaggccaugucuugugauuuuaacggaggcaagaucuccgugcaguacaaucugagccacgcuuaugccgucgacgcugccaaccauugcggcacaauugcgaauggggugcuccaaaccuucaugcggauggccuggggaggcucuuacaucgcucuggauuccgggaagggaagcugggacuguaucaugacaucuuaccaguaucuuauuauccagaacauuaccugggaagaucacugccaguuuucccgccccagcccuaucggcuaccuggggcuccugucccaaagaacgcgggacauuuauaucucucgcagacuucugggaacauucaccuggacacucagcgauuccgagggcaacgaaacccccggcggguacugucugacccgguggaugcugaucgaggccgagcucaaaugcuuuggaaauacagcuguugccaaguguaacgaaaaacaugacgaggaguucugcgauaugcugcgccuuuuugacuucaauaagcaggcgauuagacggcugaaaacgccugcccagaugagcauccagcucauuaacaaggcugugaaugcccugaucaacgaucaacuuauuaugaagaaucaucugcgcgacaucaugggcauccccuauugcaacuacucuaaauauuguuaccucaaucacaccgucacagggaagaccucccugccuagaugcugucuggugagcaacggaucuuaccucaaugaaacacacuucagcgacgauauugaacagcaggcugacaacaugaucaccgagcugcuucaaaaagaguauauugaucggcagggcaagacgccgcuggggcucguggaccuguuugucuucuccacaucuuuuuaccugaucagcauuuuccuucaccucguuaaaauccccacccaucgccacguggugggaaagccuugccccaaaccucauagacugaaucacaugggcauuuguuccugcggccuguauaagcaccccggggucccggugaaguggaaacggugaggacuagucccuguucccagagcccacuuuuuuuucuuuuuuugaaauaaaauagccugucuuucagaucucaaaggcucuuuucagagccaccaaaaaaaaaaaaaaaaaaaaaaaaaaaaaaaaaaaaaaaaaaaaaaaaaaaaaaaaaaaaaaaaaaaaaaaaaaaaaaaaaaaaaaaaaaaaaaaaaaaaa

SEQ ID NO: 32207 - RNA, 1764 nt, Artificial Sequence
  mRNA product Design a-2 (hSL-A100) comprising derived and/or modified sequence from LASV(Lassa virus/H.sapiens-wt/NGA/2015/ISTH_0543;Clade II)__AVO03639__GPCmut7 (opt5)
aggagaguccgcucagccagguugcagaagcggcuuagcguguguccuaaucuucucucugcguguagguaggccugugccgcaaacaagcuuaccaugggccagaucauuaccuucuuucaagaggugccccacgucaucgaagagguuaugaacauugugcugaucgcccucagccugcuugcuauucugaaggggaucuacaauguggccacaugcggacucuucggccuggucuccuuucuucugcucugugggagaucuugcagcacgaccuauaaaggaguguacgaacugcagacacuggagcucgacauggcgaaccugaauaugaccaugccucuuuccuguacaaagaacaauucucaucacuauaucaugguuggcaacgaaaccgggcuggagcucacacugaccaauacgagcauuaucaaccauaaauucugcaaucuuuccgaugcucacaagaaaaaccuguacgaccaugcccucaugucuauuaucagcaccuuucaccuguccauuccgaauuucaaccaguaugaggccaugagcugugauuuuaauggaggcaagaucucugugcaguacaaccugucccacacauaugcugucgacgccgcuaaucauugcggcaccauugccaacggggugcuccaaacauucaugcggauggcguggggaggcagcuacaucgcccuggauucugggaagggauccugggacuguaucaugaccagcuaccaguaucuuguuauucagaacacgacaugggaagaucacugccaguuuucucgccccuccccuaucggcuaccuggggcuccugagccaaagaacccgggacauuuauaucucccgcagacuucugggaacauucaccuggacccucucugauagcgagggcaaugaaacacccggcggguacugucugacgcgguggaugcugauugaggcugagcucaaaugcuuuggaaacaccgccguggcuaaguguaaugaaaaacaugacgaggaguucugcgauaugcugcgccuuuuugacuucaacaagcaggccaucagacggcugaaaaccccugcgcagauguccauccagcucauuaauaaggccgucaacgcucugaucaaugaucaacuuauuaugaagaaccaucugcgcgacaucaugggcauucccuauugcaauuacagcaaauauuguuaccucaaccacacagugacagggaagaccucucugccuagaugcugucugguguccaauggaagcuaccucaacgaaacgcacuucucugacgauaucgaacagcaggccgacaauaugaucacagagcugcuucaaaaagaguauauugaucggcagggcaagaccccgcuggggcucgucgaccuguuuguuuucagcaccuccuuuuaccugaucucuauuuuccuucaccucgugaaaauccccacacaucgccacauuaccggaaagccuugccccaaaccucauagacugaaccacaugggcaucuguagcugcggccuguauaagcaccccggggugccggucaaguggaaacggugaggacuagucccuguucccagagcccacuuuuuuuucuuuuuuugaaauaaaauagccugucuuucagaucucaaaggcucuuuucagagccaccaaaaaaaaaaaaaaaaaaaaaaaaaaaaaaaaaaaaaaaaaaaaaaaaaaaaaaaaaaaaaaaaaaaaaaaaaaaaaaaaaaaaaaaaaaaaaaaaaaaaa

SEQ ID NO: 32208 - RNA, 1764 nt, Artificial Sequence
  mRNA product Design a-2 (hSL-A100) comprising derived and/or modified sequence from LASV(Lassa virus/H.sapiens-wt/NGA/2016/ISTH_0009;Clade II)__AVO03571__GPCmut7 (opt5)
aggagaguccgcucagccagguugcagaagcggcuuagcguguguccuaaucuucucucugcguguagguaggccugugccgcaaacaagcuuaccaugggccagaucauuaccuucuuucaagaggugccccacgucaucgaagagguuaugaacauugugcugaucgcccucagccugcuugcuauucugaaggggaucuacaauguggccacaugcggacuccugggccuugucuccuuccugcuccugugugggagaucuugcagcacgaccuauaaaggaguguacgaacugcagacacucgagcuggacauggcgucccuuaacaugaccaugccucugucuuguacaaagaauaacagccaucacuauaucaugguuggcaaugaaaccgggcucgagcugacacuuaccaacacguccauuaucaaucauaaauuuugcaaccugucugaugcucacaagaaaaaucucuacgaccaugcccugaugagcauuaucuccaccuuccaccugagcauuccgaacuuuaaucaguaugaggccaugucuugugauuucaacggaggccggaucuccgugcaguacaaucucagccacucuuaugcugucgacgccgcuaaccauugcggcacaauugccaauggggugcugcaaaccuuuaugcgcauggcguggggaggcuccuacaucgcccuugauagcgggaagggaucuugggacuguaucaugacauccuaccaguaucugauuauccagaacaccacgugggaagaucacugccaguucagcagacccuccccuauuggcuaccucgggcugcuuucucaacggacacgcgacaucuauauuagcagacggcugcucggaaccuuuacauggacccuguccgauagcgagggcaacgaaacccccggcggguacugucugacacgcuggaugcucaucgaggcugagcugaagugcuucggaaauacggccguugcuaaauguaacgaaaagcaugacgaggaauuuugcgauaugcuuagacuguucgacuuuaauaaacaggccauccggcgccucaagaccccugcgcagaugucuauucagcugaucaacaaagccgugaaugcucuuauuaacgaucaacugaucaugaagaaucaccucagagacauuaugggcauccccuauugcaacuacuccaaguauuguuaccugaaucacacagucaccgggaaaacaagccugccucggugcugucucgugucuaacggaagcuaccugaaugagacccauuucuccgacgauaucgaacagcaggccgacaacaugauuacggagcuucugcaaaaggaguauaucgaucgccagggcaaaacaccgcucgggcugguggaccuguucgucuuuucuaccagcuucuaccuuauuuccaucuuucuccaccugguuaagauucccacccauagacacaucacaggaaaaccuugccccaagccucaucggcugaaucacaugggcauuuguagcugcggccucuauaaccaccccggggugccggugaaauggaagcgcugaggacuagucccuguucccagagcccacuuuuuuuucuuuuuuugaaauaaaauagccugucuuucagaucucaaaggcucuuuucagagccaccaaaaaaaaaaaaaaaaaaaaaaaaaaaaaaaaaaaaaaaaaaaaaaaaaaaaaaaaaaaaaaaaaaaaaaaaaaaaaaaaaaaaaaaaaaaaaaaaaaaaa

SEQ ID NO: 32209 - RNA, 1764 nt, Artificial Sequence
  mRNA product Design a-2 (hSL-A100) comprising derived and/or modified sequence from LASV(Lassa virus/H.sapiens-wt/NGA/2016/ISTH_0017;Clade II)__AVO03567__GPCmut7 (opt5)
aggagaguccgcucagccagguugcagaagcggcuuagcguguguccuaaucuucucucugcguguagguaggccugugccgcaaacaagcuuaccaugggccagaucauuaccuucuuucaagaggugccccacgucaucgaagagguuaugaacauugugcugaucgcccucagccugcuugcuauucugaaggggaucuacaauguggccacaugcggacucuucggccuggucuccuuucuucugcucugugggagaucuugcagcacgaccuauaaaggaguguacgaacugcagacacuggagcucgacauggcgucccugaacaugaccaugccucuuucuuguacaaagaauaacagccaucacuauaucaugguuggcaaugaaaccgggcuggagcucacacugaccaacacguccauuaucaaucauaaauucugcaaccuuucugaugcucacaagaaaaaucuguacgaccaugcccucaugagcauuaucuccaccuuucaccugagcauuccgaacuucaaucaguaugaggccaugucuugugauuuuaacggaggcaagaucuccgugcaguacaaucugagccacacauaugcuauugacgccgcuaaccauugcggcaccaucgccaaugggguccuccaaacauucaugcggauggcguggggaggcucuuacaucgcccuggauuccgggaagggaagcugggacuguauuaugaccucuuaccaguaucuuaucauucagaacacgacaugggaagaucacugccaguuuucccgccccagcccuaucggcuaccuggggcuccugucccaaagaacccgggacauuuauaucucucgcagacuucugggaacauucaccuggacccucagcgauuccgagggcaacgaaacacccggcggguacugucugacgcgguggaugcugaucgaggcugagcucaaaugcuuuggaaauaccgccguggcuaaguguaacgaaaaacaugacgaggaguucugcgauaugcugcgccuuuuugacuucaauaagcaggccauuagacggcugaaaaccccugcgcagaugagcauccagcucauuaacaaggccguuaaugcucugaucaacgaucaacuuauuaugaagaaucaucugcgcgacaucaugggcauccccuauugcaacuacucuaaauauuguuaccucaaucacacagugacagggaagaccucccugccuagaugcugucuggucagcaacggaucuuaccucaaugaaacgcacuucagcgacgauauugaacagcaggccgacaacaugaucacagagcugcuucaaaaagaguauauggaucggcagggcaagaccccgcuggggcucguggaccuguuuguguucuccaccucuuuuuaccugauuagcaucuuccuucaccucguccgcauucccacacauagacacguuaucggaaaaccuugccccaagccucaucggcugaaucacaugggcauuuguuccugcggccuguauaaacaccccggggugccggugaaguggaagcgcugaggacuagucccuguucccagagcccacuuuuuuuucuuuuuuugaaauaaaauagccugucuuucagaucucaaaggcucuuuucagagccaccaaaaaaaaaaaaaaaaaaaaaaaaaaaaaaaaaaaaaaaaaaaaaaaaaaaaaaaaaaaaaaaaaaaaaaaaaaaaaaaaaaaaaaaaaaaaaaaaaaaaa

SEQ ID NO: 32210 - RNA, 1764 nt, Artificial Sequence
  mRNA product Design a-2 (hSL-A100) comprising derived and/or modified sequence from LASV(Lassa virus/H.sapiens-wt/NGA/2018/ISTH_0959;Clade II)__AVV65099__GPCmut7 (opt5)
aggagaguccgcucagccagguugcagaagcggcuuagcguguguccuaaucuucucucugcguguagguaggccugugccgcaaacaagcuuaccaugggccagaucauuaccuucuuucaagaggugccccacgucaucgaagagguuaugaacauugugcugaucgcccucagccugcuugcuauucugaaggggaucuacaauguggucacaugcggacucuucggccugguguccuuucuucugcucugugggagaucuugcagcacgaccuauaaaggaguuuacgaacugcagacacuggagcucgacauggccucccugaacaugaccaugccucuuucuuguacaaagaauaacagccaucacuauaucauggugggcaaugaaaccgggcuggagcucacacugaccaacacguccauuaucaaucauaaauucugcaaccuuucugaugcgcacaagaaaaaucuguacgaccaugcucucaugagcauuaucuccaccuuucaccugagcauuccgaacuucaaucaguaugaggccaugucuugugauuuuaacggaggcaagaucuccguccaguacaaucugagccacgccuaugcuauugacgccgcuaaccauugcggcacaaucgccaauggggugcuccaaaccuucaugcggauggcguggggaggcucuuacaucgcccuggauuccgggaagggaagcugggacuguauuaugacaucuuaccaguaucuuaucauucagaacaccacgugggaagaucacugccaguuuucccgccccagcccuaucggcuaccuggggcuccugucccaaagaacacgggacauuuauaucucucgcagacuucugggaaccuucacauggacccucagcgauuccgagggcaacgaaacccccggcggguacugucugacacgguggaugcugaucgaggcugagcucaaaugcuuuggaaauacggccguugcuaaguguaacgaaaaacaugacgaggaguucugcgauaugcugcgccuuuuugacuucaauaagcaggccauuagacggcugaaaaccccugcgcagaugagcauccagcucauuaacaaggccgugaaugcucugaucaacgaucaacuuauuaugaagaaucaucugcgcgacaucaugggcauccccuauugcaacuacucuaaauauuguuaccucaaucacacagucaccgggaagacaucccugccuagaugcugucuggugagcaacggaucuuaccucaaugaaacccacuucagcgacgauauugaacagcaggccgacaacaugaucacggagcugcuucaaaaagaguauauugaucggcagggcaagacaccgcuggggcucguggaccuguuugucuucuccaccucuuuuuaccugaucagcauuuuccuucaccucguuaaaauccccacccaucgccacgugauuggaaagccuugccccaaaccucauagacugaaucacaugggcaucuguuccugcggccuguauaagcaccccggggugccggucaaguggaaacggugaggacuagucccuguucccagagcccacuuuuuuuucuuuuuuugaaauaaaauagccugucuuucagaucucaaaggcucuuuucagagccaccaaaaaaaaaaaaaaaaaaaaaaaaaaaaaaaaaaaaaaaaaaaaaaaaaaaaaaaaaaaaaaaaaaaaaaaaaaaaaaaaaaaaaaaaaaaaaaaaaaaaa

SEQ ID NO: 32211 - RNA, 1764 nt, Artificial Sequence
  mRNA product Design a-2 (hSL-A100) comprising derived and/or modified sequence from LASV(LASV003-NIG-2008;Clade II)__AIT17580__GPCmut7 (opt5)
aggagaguccgcucagccagguugcagaagcggcuuagcguguguccuaaucuucucucugcguguagguaggccugugccgcaaacaagcuuaccaugggccagaucauuaccuucuuucaagaggugccccacgucaucgaagagguuaugaacauugugcugaucgcccucagccugcuugcuauucugaaggggaucuacaauguggccacaugcggacucuucggccuggucuccuuucuucugcucugugggagaucuugcagcacgaccuauaaaggaguguacgaacugcagacacuggagcucgacauggcgucccugaacaugaccaugccucuuucuuguacaaagaauaacagccaucacuauaucaugguuggcaaugaaaccgggcuggagcucacacugaccaacacguccauuaucaaucauaaauucugcaaccuuucugaugcucacaagaaaaaucuguacgaccaugcccucaugagcauuaucuccaccuuucaccugagcauuccgaacuucaaucaguaugaggccaugucuugugauuuuaacggaggcaagaucuccgugcaguacaaucugagccacacauaugcugucgacgccgcuaaccauugcggcaccauugccaauggggugcuccaaacauucaugcggauggcguggggaggcucuuacaucgcccuggauuccgggaagggaagcugggacuguaucaugaccucuuaccaguaucuuauuauccagaacacgacaugggaagaucacugccaguuuucccgccccagcccuauuggcuaccuggggcuccugucccaaagaacccgggacaucuauauuucucgcagacuucugggaacauucaccuggacccucagcgauuccgagagcaacgaaacacccggcggcuacugucugacgcgguggaugcugaucgaggcugagcucaaaugcuuugggaauaccgccguugcuaaguguaacgaaaaacaugacgaggaguucugcgauaugcugcgccuuuuugacuucaauaagcaggccaucagacggcugaaagcgccugcccagaugucuauucagcucaucaacaaggcugugaaugcccugauuaacgaucaacuuaucaugaagaaucaucugcgcgacauuaugggaauccccuauugcaacuacuccaaauauuguuaccucaaucacacagucaccggcagaacaagccugccucggugcugucuggugucuaacgggagcuaccucaaugaaacccacuucuccgacgauaucgaacagcaggcugacaacaugauuacggagcugcuucaaaaggaguauauggaucgccagggaaaaacaccgcugggccucguggaccuguuugucuucucuaccagcuuuuaccugaucuccauuuuccuucaccucguuaagauccccacccauagacacgugauugggaaaccuugccccaagccucaucggcugaaucacaugggaaucuguagcugcggccuguauaaacaccccggcgugccggucaaguggaagcgcugaggacuagucccuguucccagagcccacuuuuuuuucuuuuuuugaaauaaaauagccugucuuucagaucucaaaggcucuuuucagagccaccaaaaaaaaaaaaaaaaaaaaaaaaaaaaaaaaaaaaaaaaaaaaaaaaaaaaaaaaaaaaaaaaaaaaaaaaaaaaaaaaaaaaaaaaaaaaaaaaaaaaa

SEQ ID NO: 32212 - RNA, 1764 nt, Artificial Sequence
  mRNA product Design a-2 (hSL-A100) comprising derived and/or modified sequence from LASV(LASV035-NIG-2009;Clade II)__AIT17588__GPCmut7 (opt5)
aggagaguccgcucagccagguugcagaagcggcuuagcguguguccuaaucuucucucugcguguagguaggccugugccgcaaacaagcuuaccaugggccagaucauuaccuucuuucaagaggugccccacgucaucgaagagguuaugaacauugugcugaucgcccucagccugcuugcuauucugaaggggaucuacaauguggccacaugcggacucuucggccuggucuccuuucuucugcucugugggagaucuugcagcacgaccuauaaaggaguguacgaacugcagacacuggagcucgacauggcgucccugaacaugaccaugccucuuucuuguacaaagaauaacagccaucacuauaucaugguuggcaaugaaaccgggcuggagcucacacugaccaacacguccauuaucaaucauaaauucugcaaccuuucugaugcucacaagaaaaaucuguacgaccaugcccucaugagcauuaucuccaccuuucaccugagcauuccgaacuucaaucaguaugaggccaugucuugugauuuuaacggaggcaagaucuccgugcaguacaaucugagccacgcuuaugccgucgacgcugccaaccauugcggcacaauugcgaauggggugcuccaaaccuucaugcggauggccuggggaggcucuuacaucgcucuggauuccgggaagggaagcugggacuguaucaugacaucuuaccaguaucuuauuauccagaacaccacgugggaagaucacugccaguuuucccgccccagcccuauuggcuaccuggggcuccugucccaaagaacacgggacaucuauauuucucgcagacuucugggaaccuucacauggacccucagcgauuccgagggcaacgaaacccccggcggguacugucugacacgguggaugcugaucgaggccgagcucaaaugcuuuggaaauacggcuguugccaaguguaacgaaaaacaugacgaggaguucugcgauaugcugcgccuuuuugacuucaauaagcaggcgaucagacggcugaaagccccugcucagaugagcauucagcucaucaacaaggccgugaaugcucugauuaacgaucaacuuaucaugaagaaucaucugcgcgacauuaugggcauccccuauugcaacuacucuaaauauuguuaccucaaucacaccgucacagggaagaccucccugccuagaugcugucuggugagcaacggaucuuaccucaaugaaacacacuucagcgacgauaucgaacagcaggccgacaacaugauuaccgagcugcuucaaaaagaguauaucgaucggcagggcaagacgccgcuggggcucguggaccuguuugucuucuccacaucuuuuuaccugauuagcaucuuccuucaccucguuaaaauucccacccaucgccacgugaucggaaagccuugccccaaaccucauagacugaaucacaugggcauuuguuccugcggccuguauaagcaccccggggugccggucaaguggaaacggugaggacuagucccuguucccagagcccacuuuuuuuucuuuuuuugaaauaaaauagccugucuuucagaucucaaaggcucuuuucagagccaccaaaaaaaaaaaaaaaaaaaaaaaaaaaaaaaaaaaaaaaaaaaaaaaaaaaaaaaaaaaaaaaaaaaaaaaaaaaaaaaaaaaaaaaaaaaaaaaaaaaaa

SEQ ID NO: 32213 - RNA, 1764 nt, Artificial Sequence
  mRNA product Design a-2 (hSL-A100) comprising derived and/or modified sequence from LASV(LASV1000-NIG-2009;Clade II)__AIT17782__GPCmut7 (opt5)
aggagaguccgcucagccagguugcagaagcggcuuagcguguguccuaaucuucucucugcguguagguaggccugugccgcaaacaagcuuaccaugggccagaucauuaccuucuuucaagaggugccccacgucaucgaagagguuaugaacauugugcugaucgcccucagccugcuugcuauucugaaggggaucuacaauguggccacaugcggacucuucggccuggucuccuuucuucugcucugugggagaucuugcagcacgaccuauaaaggaguguacgaacugcagacacuggagcucgacauggcgucccugaacaugaccaugccucuuucuuguacaaagaauaacagccaucacuauaucaugguuggcaaugaaaccgggcuggagcucacacugaccaacacguccauuaucaaucauaaauucugcaaccuuucugaugcucacaagaaaaaucuguacgaccaugcccucaugagcauuaucuccaccuuucaccugagcauuccgaacuucaaucaguaugaggccaugucuugugauuuuaacggaggcaagaucuccgugcaguacaaucugagccacacauaugcugucgacgccgcuaaccauugcggcaccauugccaauggggugcuccaaacauucaugcggauggcguggggaggcucuuacaucgcccuggauuccgggaagggaagcugggacuguaucaugaccucuuaccaguaucuuauuauccagaacacgacaugggaagaucacugccaguuuucccgccccagcccuauuggcuaccuggggcuccugucccaaagaacccgggacaucuauauuucucgcagacuucugggaacauucaccuggacccucagcgauuccgagggcaacgaaacacccggcggguacugucugacgcgguggaugcugaucgaggcugagcucaaaugcuuuggaaauaccgccguugcuaaguguaacgaaaaacaugacgaggaguucugcgauaugcugcgccuuuuugacuucaauaagcaggccaucaaaagacugaagaccccugcgcagaugagcauucagcucaucaacaaggccgugaaugcucugauuaacgaucaacuuaucaugaaaaaucaucugcgggacauuaugggcauccccuauugcaacuacucuaaguauuguuaccucaaucacacagucacagggaaaaccucccugccucgcugcugucuggugagcaacggaucuuaccucaaugaaacgcacuucagcgacgauaucgaacagcaggccgacaacaugauuacagagcugcuucaaaaggaguauaucgauagacagggcaaaaccccgcuggggcucguggaccuguuugucuucuccaccucuuuuuaccugauuagcaucuuccuucaccucguuaagauucccacacaucggcacguggugggaaaaccuugccccaagccucaucgccugaaucacaugggcaucuguuccugcggccuguauaagcaccccggggucccggugaaauggaagagaugaggacuagucccuguucccagagcccacuuuuuuuucuuuuuuugaaauaaaauagccugucuuucagaucucaaaggcucuuuucagagccaccaaaaaaaaaaaaaaaaaaaaaaaaaaaaaaaaaaaaaaaaaaaaaaaaaaaaaaaaaaaaaaaaaaaaaaaaaaaaaaaaaaaaaaaaaaaaaaaaaaaaa

SEQ ID NO: 32214 - RNA, 1764 nt, Artificial Sequence
  mRNA product Design a-2 (hSL-A100) comprising derived and/or modified sequence from LASV(LASV221-NIG-2010;Clade II)__AIT17624__GPCmut7 (opt5)
aggagaguccgcucagccagguugcagaagcggcuuagcguguguccuaaucuucucucugcguguagguaggccugugccgcaaacaagcuuaccaugggccagaucauuaccuucuuucaagaggugccccacgucaucgaagagguuaugaacauugugcugaucgcccucagccugcuugcuauucugaaggggaucuacaauguggccacaugcggacucuucggccuggucuccuuucuucugcucugugggagaucuugcagcacgaccuauaaaggaguguacgaacugcagacacuggagcucgacauggcgucccugaacaugaccaugccucuuucuuguacaaagaauaacagccaucacuauaucaugguuggcaaugaaaccgggcuggagcucacacugaccaacacguccauuaucaaucauaaauucugcaaccuuucugaugcucacaagaaaaaucuguacgaccaugcccucaugagcauuaucuccaccuuucaccugagcauuccgaacuucaaucaguaugaggccaugucuugugauuuuaacggaggcaagaucuccgugcaguacaaucugagccacacauaugcuauugacgccgcuaaccauugcggcaccaucgccaaugggguccuccaaacauucaugcggauggcguggggaggcucuuacaucgcccuggauuccgggaagggaagcugggacuguauuaugaccucuuaccaguaucuuaucauucagaacacgacaugggaagaucacugccaguuuucccgccccagcccuaucggcuaccuggggcuccugucccaaagaacccgggacauuuauaucucucgcagacuucugggaacauucaccuggacccucagcgauuccgagggcaacgaaacacccggcggguacugucugacgcgguggaugcugaucgaggcugagcucaaaugcuuuggaaauaccgccguggcuaaguguaacgaaaaacaugacgaggaguucugcgauaugcugcgccuuuuugacuucaauaagcaggccauuagacggcugaaaaccccugcgcagaugagcauccagcucauuaacaaggccguuaaugcucugaucaacgaucaacuuauuaugaagaaucaucugcgcgacaucaugggcauccccuauugcaacuacucuaaauauuguuaccucaaucacacagugacagggaagaccucccugccuagaugcugucuggucagcaacggaucuuaccucaaugaaacgcacuucagcgacgauauugaacagcaggccgacaacaugaucacagagaugcugcaaaaagaguauauggaucggcagggcaagaccccgcuugggcugguggaccucuuuguguucuccaccucuuuuuaccugauuagcaucuuccugcaccuugucaaaauucccacacaucgccacguuaucggaaagccuugccccaaaccucauagacucaaucacaugggcauuuguuccugcggccuguauaagcaccccggggugccggugaaguggaaacggugaggacuagucccuguucccagagcccacuuuuuuuucuuuuuuugaaauaaaauagccugucuuucagaucucaaaggcucuuuucagagccaccaaaaaaaaaaaaaaaaaaaaaaaaaaaaaaaaaaaaaaaaaaaaaaaaaaaaaaaaaaaaaaaaaaaaaaaaaaaaaaaaaaaaaaaaaaaaaaaaaaaaa

SEQ ID NO: 32215 - RNA, 1764 nt, Artificial Sequence
  mRNA product Design a-2 (hSL-A100) comprising derived and/or modified sequence from LASV(LASV237-NIG-2010;Clade II)__AIT17638__GPCmut7 (opt5)
aggagaguccgcucagccagguugcagaagcggcuuagcguguguccuaaucuucucucugcguguagguaggccugugccgcaaacaagcuuaccaugggccagaucauuaccuucuuucaagaggugccccacgucaucgaagagguuaugaacauugugcugaucgcccucagccugcuugcuauucugaaggggaucuacaauguggccacaugcggacucuucggccuggucuccuuucuucugcucugugggagaucuugcagcacgaccuauaaaggaguguacgaacugcagacacuggagcucgacauggcgucccugaacaugaccaugccucuuucuuguacaaagaauaacagccaucacuauaucaugguuggcaaugaaaccgggcuggagcucacacugaccaacacguccauuaucaaucauaaauucugcaaccuuucugaugcucacaagaaagaccuguacgaucaugcccucaugagcauuaucuccaccuuucaccugagcauuccgaauuucaaccaguaugaggccaugucuugugacuuuaauggaggcaagaucuccgugcaguacaaccugagccacacauaugcugucgaugccgcuaaucauugcggcaccauugccaacggggugcuccaaacauucaugcggauggcguggggaggcucuuacaucgcccuggacuccgggaagggaagcugggauuguaucaugaccucuuaccaguaucuuauuauccagaauacgacaugggaagaccacugccaguuuucccgccccagcccuauuggcuaccuggggcuccugucccaaagaacccgggauaucuauauuucucgcagacuucugggaacauucaccuggacccucagcgacuccgagggcaacgaaacacccggcggguacugucugacgcgguggaugcugaucgaggcugagcucaaaugcuuuggaaacaccgccguugcuaaguguaaugaaaaacaugaugaggaguucugcgacaugcugcgccuuuuugauuucaacaagcaggccaucagacggcugaaaaccccugcgcagaugagcauucagcucaucaauaaggccgugaacgcucugauuaaugaccaacuuaucaugaagaaccaucugcgcgacauuaugggcauccccuauugcaauuacucuaaauauuguuaccucaaccacacagucacagggaagaccucccugccuagaugcugucuggugagcaauggaucuuaccucaacgaaacgcacuucagcgaugacaucgaacagcaggccgauaauaugauuacagagcugcuucaaaaagaguauauggaccggcagggcaagaccccgcuggggcucguggaucuguuugucuucuccaccucuuuuuaccugaucagcauuuuccuucaccucaucaaaauucccacacaucgccacaucaccggaaagccuugccccaaaccucauagacugaaccacaugggcauuuguuccugcggccuguauaagcaccccgggguuccggugaaguggaaacggugaggacuagucccuguucccagagcccacuuuuuuuucuuuuuuugaaauaaaauagccugucuuucagaucucaaaggcucuuuucagagccaccaaaaaaaaaaaaaaaaaaaaaaaaaaaaaaaaaaaaaaaaaaaaaaaaaaaaaaaaaaaaaaaaaaaaaaaaaaaaaaaaaaaaaaaaaaaaaaaaaaaaa

SEQ ID NO: 32216 - RNA, 1764 nt, Artificial Sequence
  mRNA product Design a-2 (hSL-A100) comprising derived and/or modified sequence from LASV(LASV253-NIG-2011;Clade II)__AIT17670__GPCmut7 (opt5)
aggagaguccgcucagccagguugcagaagcggcuuagcguguguccuaaucuucucucugcguguagguaggccugugccgcaaacaagcuuaccaugggccagaucauuaccuucuuucaagaggugccccacgucaucgaagagguuaugaacauugugcugaucgcccucagccugcuugcuauucugaaggggaucuacaauguggccacaugcggacucuucggccuggucuccuuucuucugcucugugggagaucuugcagcacgaccuauaaaggaguguacgaacugcagacacuggagcucgacauggcgucccugaacaugaccaugccucuuucuuguacaaagaauaacagccaucacuauaucaugguuggcaaugaaaccgggcuggagcucacacugaccaacacguccauuaucaaucauaaauucugcaaccuuucugaugcucacaagaaaaaucuguacgaccaugcccucaugagcauuaucuccaccuuucaccugagcauuccgaacuucaaucaguaugaggccaugucuugugauuuuaacggaggcaagaucuccgugcaguacaaucugagccacacauaugcugucgacgccgcuaaccauugcggcaccauugccaauggggugcuccaaacauucaugcggauggcguggggaggcucuuacaucgcccuggauuccgggaagggaagcugggacuguaucaugaccucuuaccaguaucuuauuauccagaacacgacaugggaagaucacugccaguuuucccgccccagcccuauuggcuaccuggggcuccugucccaaagaacccgggacaucuauauuucucgcagacuucugggaacauucaccuggacccucagcgauuccgagggcaacgaaacacccggcggguacugucugacgcgguggaugcugaucgaggcugagcucaaaugcuuuggaaauaccgccguugcuaaguguaacgaaaaacaugacgaggaguucugcgauaugcugcgccuuuuugacuucaauaagcaggccaucagacggcugaaagcgccugcccagaugagcauucagcucaucaacaaggcugugaaugcccugauuaacgaucaacuuaucaugaagaaucaucugcgcgacauuaugggcauccccuauugcaacuacucuaaauauuguuaccucaaucacacagucaccgggagaacaucccugccucggugcugucuggugagcaacggaucuuaccucaaugaaacccacuucagcgacgauaucgaacagcaggcugacaacaugauuacggagcugcuucaaaaggaguauaucgaucgccagggcaaaacaccgcuggggcucguggaccuguuugucuucuccaccucuuuuuaccugauuagcaucuuccuucaccucguuaagauucccacccauagacacaucauuggaaaaccuugccccaagccucaucggcugaaucacaugggcaucuguuccugcggccuguauaaacaccccggggugccggugaaguggaagcgcugaggacuagucccuguucccagagcccacuuuuuuuucuuuuuuugaaauaaaauagccugucuuucagaucucaaaggcucuuuucagagccaccaaaaaaaaaaaaaaaaaaaaaaaaaaaaaaaaaaaaaaaaaaaaaaaaaaaaaaaaaaaaaaaaaaaaaaaaaaaaaaaaaaaaaaaaaaaaaaaaaaaaa

SEQ ID NO: 32217 - RNA, 1764 nt, Artificial Sequence
  mRNA product Design a-2 (hSL-A100) comprising derived and/or modified sequence from LASV(LASV254-NIG-2011;Clade II)__AIT17674__GPCmut7 (opt5)
aggagaguccgcucagccagguugcagaagcggcuuagcguguguccuaaucuucucucugcguguagguaggccugugccgcaaacaagcuuaccaugggccagaucauuaccuucuuucaagaggugccccacgucaucgaagagguuaugaacauugugcugaucgcccucagccugcuugcuauucugaaggggaucuacaauguggccacaugcggacucuucggccuggucuccuuucuucugcucugugggagaucuugcagcacgaccuauaaaggaguguacgaacugcagacacuggagcucgacaugaccaaccugaauaugacaaugccucuuuccuguaccaagaacaauucucaucacuauaucaugguuggcaacgaaacagggcuggagcucacccugacgaauaccagcauuaucaaccauaaauucugcaaucuuuccgaugcgcacaagaaaaaccuguacaaucaugcucucaugucuauuaucagcacauuucaccuguccauuccgaacuucaaucaguaugaggccaugagcugugacuuuaacggaggcaagaucucugugcaguacaaucugucccacagcuaugccgucgaugcugccaaccauugcggcaccauugcuaacggggugcuccaaacauucaugcggauggccuggggaggcucuuacaucgcgcuggacuccgggaagggaaauugggauuguaucaugaccagcuaccaguaucuuauuauccagaacacgacaugggaagaccacugccaguuuucucgccccuccccuauuggcuaccuggggcuccugagccaaagaacccgggauaucuauauuucccgcagacuucugggaacauucaccuggacccucucugacagcgagggcaaugaaacacccggcggguacugucugacgcgguggaugcugaucgaggccgagcucaaaugcuuuggaaacaccgcuguugccaaguguaaugaaaaacaugaugaggaguucugcgacaugcugcgccuuuuugauuucaacaagcaggcuaucagacggcugaaaaccccugcccaggcgaauauucagcucaucaacaaggccgugaaugcucugauuaacgaccaacuuaucaugaagaaucaucugcgcgauauuaugggcauccccuauugcaacuacuccaaauauuguuaccucaaucacacagucacagggaagaccagccugccuagaugcugucuggugucuaacggauccuaccucaaugaaacgcacuucagcgacgacaucgaacagcaggccgauaacaugauuacagagcugcuucaaaaagaguauauggaccggcagggcaagaccccgcuggggcucguggaucuguuugucuucucuaccagcuuuuaccugaucuccauuuuccuucaccucguuaaaauccccacacaucgccacgugauuggaaagccuugccccaaaccucauagacugaaccacaugggcaucuguucuugcggccuguauaagcaccccggggugccggucaaguggaaacggugaggacuagucccuguucccagagcccacuuuuuuuucuuuuuuugaaauaaaauagccugucuuucagaucucaaaggcucuuuucagagccaccaaaaaaaaaaaaaaaaaaaaaaaaaaaaaaaaaaaaaaaaaaaaaaaaaaaaaaaaaaaaaaaaaaaaaaaaaaaaaaaaaaaaaaaaaaaaaaaaaaaaa

SEQ ID NO: 32218 - RNA, 1764 nt, Artificial Sequence
  mRNA product Design a-2 (hSL-A100) comprising derived and/or modified sequence from LASV(Nig08-A19;Clade III)__ADU56618__GPCmut7 (opt5)
aggagaguccgcucagccagguugcagaagcggcuuagcguguguccuaaucuucucucugcguguagguaggccugugccgcaaacaagcuuaccaugggccagaucgugaccuucuuucaagaggucccccacguuauugaagaggugaugaacaucgugcugauugcccucagcauccuggcuauucuuaaggggcuguacaauaucgccacaugcggacucaucggccuggucacguuccuucugcucuccgggagaucuuguagcaugaccuauaaaggaguguacgaacugcagacacuggagcucaacaugaauacccugaacaugacaaugccucuuuccugcaccaagaauaacucucaucacuauauuaugguuggcaaugaaacagggcuggagcucacccugacgaacaccagccuucugcaucacaaauuuuguaaucucuccgacgcgcauaagaaaaaccuguacgaucacacacugaugucuaucauuagcaccuuccaccucuccaucccgaauuuuaaccaguaugaggcuaugagcugcgacuucaauggaggcaagauuacagugcaguacaaccugucucauuccuaugccaucgaugccgcuaaucacuguggcaccgucgccaacggggugcuucaaacguuuaugcggauggcuuggggaggcagcuacauugcccuggacucugggcgcggaaagugggauugcaucaugacauccuaccaguaucucaucauucagaacaccacaugggaagaccauugucaguucagcagacccucuccuaucggcuaccuggggcuucugucccaacggacccgcgauauuuauaucagcagacggcuccugggaaccuuuacauggacgcuguccgacucugagggcaaugaaacccccggcggguacugccucacacgcuggaugcugauugaggcggagcuuaaauguuucggaaacaccgccguugcuaagugcaaugaaaaacacgaugaggaauuuugugacaugcugagacucuucgauuuuaacaagcaggccauccggcgccugaaagcuccugcccagaugagcauccagcuuauuaauaaggcggugaacgcccugaucaaugaccaacucauuaugaagaaccaccugagagauaucaugggcauucccuauugcaauuacuccaaauauugcuaccugaaccauacaagcaccgggcggacgucucucccucgcuguugccuggucuccaauggaagcuaccuuaacgagacacacuucucugacgacaucgaacagcaggcugauaauaugaucaccgagaugcugcaaaaggaguaucucgacagacagggcaaaaccccgcuggggcugguggaucuuuucguguuuagcacauccuucuaccucauuucuaucuuucugcaucuggucaagauucccacccaccggcauaucguuggaaaaccuugucccaagccucaccgccucaaccacaugggcauuugcagcuguggccuguauaaacagcccggggugccggugagauggaagcggugaggacuagucccuguucccagagcccacuuuuuuuucuuuuuuugaaauaaaauagccugucuuucagaucucaaaggcucuuuucagagccaccaaaaaaaaaaaaaaaaaaaaaaaaaaaaaaaaaaaaaaaaaaaaaaaaaaaaaaaaaaaaaaaaaaaaaaaaaaaaaaaaaaaaaaaaaaaaaaaaaaaaa

SEQ ID NO: 32219 - RNA, 1767 nt, Artificial Sequence
  mRNA product Design a-2 (hSL-A100) comprising derived and/or modified sequence from LASV(G1180-SLE-2010;Clade IV)__AIT17168__GPCmut7 (opt5)
aggagaguccgcucagccagguugcagaagcggcuuagcguguguccuaaucuucucucugcguguagguaggccugugccgcaaacaagcuuaccaugggccagaucgugaccuucuuucaagaggucccccacguuauugaagaggugaugaacaucgugcugauugcccucagcauccuggcuguccuuaaggggcuguacaauuucgccacaugcggacucgugggccugcuuacguuucugcuccugugugggagauccugcaccgcgucucgguauaaaggaguuuacgaacugcagacacucgagcugaacauggaaacccuuaauaugacaaugccucugagcuguaccaagaacaauucccaucacuauauuauggugggcaacgagacagggcucgagcugacccuuacgaauaccucuaucaucaaccauaaauucugcaaucugagcgacgcucacaagaaaaaccucuacgaucaugcccugauguccauuaucucuacauuucaccugagcauuccgaauuucaaccaguaugaagccauguccugugacuuuaauggaggcaagaucagcguccaguacaaccucucucacuccuaugcuggcgaugccgcuaaucauugcgggaccguggccaacggaguucugcaaacauucaugcgcauggcguggggcgggagcuacauugcccuugacucuggacacggcuccugggauuguaucaugaccagcuaccaguaucugauuauccagaacacgacaugggaggaccauugccaguuuucuagacccuccccuaucggguaccucggacugcuuagccaacggacccgcgauauuuauaucuccagacggcugcucggcacauucaccuggacccugucugacagcgaaggcaaggauacacccgggggauacugucugacgcgcuggaugcucauugaggcugagcugaaaugcuuuggcaauaccgccguggcuaaguguaacgaaaaacacgacgaggaguucugcgauaugcuuagacuguuugacuucaauaagcaggccauccagcggcucaaagcgccugcccagauguccauucaacugaucaacaaggcugucaaugcccuuaucaacgaucagcugauuaugaagaaucaccuccgcgacaucauggggauucccuauugcaacuacagcaaauauuguuaccugaaucauacaaccacaggaaagaccucucugccuaaaugcugucucguguccaacggcagcuaccugaaugaaacgcacuucucugacgauaucgaacagcaagcugacaacaugauuacagagaugcuucagaaggaguauauggaaagacaggggaaaaccccgcugggacucguggaucuguuugucuucagcaccuccuuuuaccugaucucuaucuuccuucaucucguuaagauucccacacaccggcauaucgugggcaaaagcugcccuaagccccaccgccugaaucacaugggcauuuguuccugcgggcuguauaagcagccuggagugcccgucaaauggaagagaugaggacuagucccuguucccagagcccacuuuuuuuucuuuuuuugaaauaaaauagccugucuuucagaucucaaaggcucuuuucagagccaccaaaaaaaaaaaaaaaaaaaaaaaaaaaaaaaaaaaaaaaaaaaaaaaaaaaaaaaaaaaaaaaaaaaaaaaaaaaaaaaaaaaaaaaaaaaaaaaaaaaaa

SEQ ID NO: 32220 - RNA, 1767 nt, Artificial Sequence
  mRNA product Design a-2 (hSL-A100) comprising derived and/or modified sequence from LASV(G1442-SLE-2011;Clade IV)__AIT17180__GPCmut7 (opt5)
aggagaguccgcucagccagguugcagaagcggcuuagcguguguccuaaucuucucucugcguguagguaggccugugccgcaaacaagcuuaccaugggccagaucgugaccuucuuucaagaggucccccacguuauugaagaggugaugaacaucgugcugauugcccucagcauccuggcuguccuuaaggggcuguacaauguggccacaugcggacucauuggccugguuacguuccuucugcucugugggagauccugcaccacaacccuguauaaaggaguguacgaacugcagacacucgagcugaacauggaaacccuuaauaugacaaugccucugucuuguaccaagaacaauagccaucacuauauccgggucggcaacgagacggggcucgagcugacccuuacaaauaccuccaucauuaaccauaaauuuugcaaucugucugacgcgcacaagaaaaaccucuacgaucaugcucugaugagcaucauuuccacauuccaccugucuaucccgaauuuuaaccaguaugaagccaugagcugugacuucaauggaggcaagauuuccgugcaguacaaccucagccacucuuaugccggcgaugcugccaaucauugcgggaccguugcuaacggagugcugcaaacguuuaugcgcauggccuggggcggguccuacaucgcgcuugacagcggaagaggcaacugggauuguauuaugacaucuuaccaguaucugaucauccagaauaccacaugggacgaucacugccaguucucccggcccagcccuauuggguaccucggacugcuuucucaacgcaccagagacgucuauaucucccggcgccugcucggcaccuuuacauggacgcugagcgauuccgagggcaaggacacccccgggggauacugucugacaagauggaugcucauugaagccgagcugaaaugcuucggcaacaccgcuguggccaaguguaaugagaaacaugaugaagaguuuugcgacaugcuucggcuguucgauuuuaacaagcaggcuauccagcgccucaaagccccugcgcagaugucuauucaacugaucaauaaggccgugaacgcucuuaucaaugaccagcugauuaugaagaaccaccucagagacaucauggggauucccuauugcaauuacagcaaauauuguuaccugaacaauacagccaccggaaagacgucccugccuaaaugcugucucaucagcaacggcucuuaccugaaugaaacacacuucuccgaugacauugagcaggaagcugauaacaugaucaccgagaugcuucaaaaggaguauauggaacggcaggggaaaaccccgcugggacucgucgaccuguucguuuuuagcacaucuuucuaccugaucagcauuuuucuucaucucgugaagauccccacccaccgccauauugugggcaaauccugcccuaagccccacagacugaaucauaugggcaucuguucuugcgggcuguauaagcagccuggaguccccgugcgguggaaacgcugaggacuagucccuguucccagagcccacuuuuuuuucuuuuuuugaaauaaaauagccugucuuucagaucucaaaggcucuuuucagagccaccaaaaaaaaaaaaaaaaaaaaaaaaaaaaaaaaaaaaaaaaaaaaaaaaaaaaaaaaaaaaaaaaaaaaaaaaaaaaaaaaaaaaaaaaaaaaaaaaaaaaa

SEQ ID NO: 32221 - RNA, 1767 nt, Artificial Sequence
  mRNA product Design a-2 (hSL-A100) comprising derived and/or modified sequence from LASV(G3010-SLE-2013;Clade IV)__AIT17344__GPCmut7 (opt5)
aggagaguccgcucagccagguugcagaagcggcuuagcguguguccuaaucuucucucugcguguagguaggccugugccgcaaacaagcuuaccaugggccagaucgugaccuucuuucaagaggucccccacguuauugaagaggugaugaacaucgugcugauugcccucagcauccuggcuguccuuaaggggcuguacaauuucgccacaugcggacucgugggccugguuacguuucuucugcucugugggagauccugcaccacaucucuguauaaaggaguguacgaacugcagacccucgagcugaacauggaaacacuuaauaugaccaugccucugagcuguacaaagaacaauucccaucacuauauuauggucggcaacgagaccgggcucgagcugacgcuuaccaauacaucuaucaucaaccauaaauucugcaaucugagcgacgcgcacaagaaaaaccucuacaaucaugcucugauguccauuaucucuaccuuucaccugagcauuccgaacuucaaucaguaugaagccauguccugugauuuuaacggaggcaagaucagcgugcaguacaaucucucucacuccuaugccggcgacgcugccagccauugcgggacaguugcuaacggagugcugcaaaccuucaugcggauggccuggggcgggucuuacauugcgcuugauuccggauacggcaagugggacuguaucaugacgagcuaucaguaccugauuauccagaacacaaccugggaggaucacugccaguuuucucgccccuccccuaucggguaucucggacugcuuagccaaagaacacgggacauuuacaucucccgcagacugcucggcaccuucaccuggacacugucugauagcgaaggcaaagacacgcccgggggauauugucugacccgguggaugcucauugaggccgagcugaagugcuuuggcaauacagcugucgccaaauguaacgaaaagcaugaugaggaguucugcgacaugcuucgccuguuugauuucaauaaacaggcuauccagagacucaagaccccugcccagauguccauucaacugaucaacaaggcggugaaugcccuuaucaacgaccagcugauuaugaaaaaucaccuccgggauaucauggggauucccuacugcaacuauagcaaguacuguuaccugaaucacacaaccacgggaaaaacaucucugccuaagugcugucucguguccaacggcagcuaucugaaugaaacccauuucucugacgacaucgaacagcaagcugauaacaugauuaccgagaugcuucagaaagaguacauggaacgccaggggaagacaccgcugggacucgucgaccuguuuguuuucagcaccuccuuuuaucugaucucuaucuuccuucaccucgugaaaauucccacacauagacacaucgugggcaagagcugcccuaagccccaucggcugaaucacaugggcauuuguuccugcgggcuguacaaacagccuggaguccccgugcgcuggaagagaugaggacuagucccuguucccagagcccacuuuuuuuucuuuuuuugaaauaaaauagccugucuuucagaucucaaaggcucuuuucagagccaccaaaaaaaaaaaaaaaaaaaaaaaaaaaaaaaaaaaaaaaaaaaaaaaaaaaaaaaaaaaaaaaaaaaaaaaaaaaaaaaaaaaaaaaaaaaaaaaaaaaaa

SEQ ID NO: 32222 - RNA, 1767 nt, Artificial Sequence
  mRNA product Design a-2 (hSL-A100) comprising derived and/or modified sequence from LASV(G502-SLE-2009;Clade IV)__AIT17126__GPCmut7 (opt5)
aggagaguccgcucagccagguugcagaagcggcuuagcguguguccuaaucuucucucugcguguagguaggccugugccgcaaacaagcuuaccaugggccagaucgugaccuucuuucaagaggucccccacguuauugaagaggugaugaacaucgugcugauugcccucagcauccuggcuguccuuaaggggcuguacaauuucgccacaugcggacucgugggccugcuuacguuucugcuccugugugggagauccugcaccacaggacuguauaaaggcguuuacgaacuccagacccuggagcuuaacauggaaacacugaauaugaccaugccucucucuuguacaaagaacaauagccaucacuauauuaugguggggaacgagaccggacuggagcuuacgcugaccaauacauccaucaucaaccauaaauucugcaaucucucugacgcgcacaagaaaaaccuguacgaucaugcucugaugagcauuaucuccaccuuucaccucucuauuccgaauuucaaccaguaugaagccaugagcugugacuuuaauggcggcaagaucuccguccaguacaaccugagccacucuuaugccggggaugcugccgaccauugcggaacaguggcuaauggcguucuucaaaccuucaugcggauggccuggggaggguccuacauugcgcuggauagcggccgcgggagaugggacuguaucaugacgucuuaccaguaucucauuauccagaacacaaccugggaggaucacugccaguuuucccggcccagcccuaucggauaccugggccuucugucucaacgcacaagagacauuuauaucucccggcgccuccugggcaccuucaccuggacacugagcgauuccgaagggaaggacacgcccggaggcuacugucucaccagauggaugcugauugaggccgagcuuaaaugcuuugggaacacagcuguggccaaguguaaugaaaaacaugaugaggaguucugcgacaugcugcggcucuuugauuucaacaagcaggcuauccagcgccugaaagccccugcgcagaugucuauucaacuuaucaauaaggccgucaacgcucugaucaaugaccagcucgugaugaagaaccaccugagagacauuaugggaauccccuauugcaauuacagccgguauuguuaccugaaccacaccacaaccggccgcacgucccucccuaaaugcugucuggugagcaaugggucuuaccuuaacgaaacacauuucuccgaugacauugaacagcaagccgauaauaugaucaccgagaugcugcagaaggaguauauggaaagacagggaaaaaccccgcucggccuggucgaccuguuuguuuucagcacaucuuuuuaccuuauuagcaucuuccuccaccuggugaagauccccacccaucggcacauugugggcaaauccugcccuaagccccaucgccugaaccacauggggaucuguucuugcggacucuauaaacagccuggcguccccgugaaguggaagagaugaggacuagucccuguucccagagcccacuuuuuuuucuuuuuuugaaauaaaauagccugucuuucagaucucaaaggcucuuuucagagccaccaaaaaaaaaaaaaaaaaaaaaaaaaaaaaaaaaaaaaaaaaaaaaaaaaaaaaaaaaaaaaaaaaaaaaaaaaaaaaaaaaaaaaaaaaaaaaaaaaaaaa

SEQ ID NO: 32223 - RNA, 1767 nt, Artificial Sequence
  mRNA product Design a-2 (hSL-A100) comprising derived and/or modified sequence from LASV(G733-SLE-2010;Clade IV)__AIT17154__GPCmut7 (opt5)
aggagaguccgcucagccagguugcagaagcggcuuagcguguguccuaaucuucucucugcguguagguaggccugugccgcaaacaagcuuaccaugggccagaucgugaccuucuuucaagaggucccccacguuauugaagaggugaugaacaucgugcugauugcccucagcauccuggcuguccuuaaggggcuguacaauuucgccacaugcggaauugugggccucguuuccuuucugcuucugugugggagaucuugcacgaccagccucuauaaaggaguguacgaacugcagacacuggagcucaacauggaaacccugaauaugacaaugccucuuuccuguaccaagaacaauucucaucacuauaucauggucggcaacgagacagggcuggagcucacccugacgaauaccagcaucauuaaccauaaauucugcaaucuuuccgacgcgcacaagaaaaaccuguacgaucaugcucucaugucuaucauuagcacauuucaccuguccaucccgaauuucaaccaguaugaagccaugagcugugacuuuaauggaggcaagauuucugugcaguacaaccugucccacagcuaugccggcgaugcugccaaucauugcgggaccaucgcuaacggaguucuccaaacauucaugcggauggccuggggcgggucuuacauugcgcuggacuccggacgcgauagaugggacuguaucaugaccagcuaccaguaucuuaucauucagaacacgacaugggaggaucacugccaguuuucucggcccuccccuaucggcuaccuggggcuccugagccaacgcaccagagacauuuauaucucccggcgccuucugggaacauucaccuggacccucucugauagcgaaggcaaggacacacccggcggguacugucugacgagauggaugcugauugaggccgagcucaaaugcuuuggaaauaccgcuguggccaaguguaacgaaaaacaugaugaggaguucugcgacaugcugcggcuuuuugauuucaauaagcaggcuauccagcgccugaaagccccugcgcagauguccauccaacucauuaacaaggccgucaaugcucugaucaacgaccagcuuauuaugaagaaucaccugagagacaucaugggcauucccuauugcaacuacagcaaauauuguuaccucaaucacacaaccacagggaagaccucucugccuaaaugcugucugguguccaacggaagcuaccucaaugaaacgcauuucucugaugacaucgaacagcaagccgauaacaugaucacagagaugcugcagaaggaguauauggaacggcagggcaaaaccccgcuugggcugguggaccucuuugucuucagcaccuccuuuuaccugauuucuaucuuccugcaccuuguuaagauucccacacaucgccacguggugggaaaaagcugcccuaagccccauagacucaaucacaugggcaucuguuccugcggccuguaugggcagccuggaguccccgugaaguggaaacggugaggacuagucccuguucccagagcccacuuuuuuuucuuuuuuugaaauaaaauagccugucuuucagaucucaaaggcucuuuucagagccaccaaaaaaaaaaaaaaaaaaaaaaaaaaaaaaaaaaaaaaaaaaaaaaaaaaaaaaaaaaaaaaaaaaaaaaaaaaaaaaaaaaaaaaaaaaaaaaaaaaaaa

SEQ ID NO: 32224 - RNA, 1767 nt, Artificial Sequence
  mRNA product Design a-2 (hSL-A100) comprising derived and/or modified sequence from MOPV/LASV reassortant(IGS-1;Clade IV)__AFY05576__GPCmut7 (opt5)
aggagaguccgcucagccagguugcagaagcggcuuagcguguguccuaaucuucucucugcguguagguaggccugugccgcaaacaagcuuaccaugggccagaucgugaccuucuuucaagaggucccccacguuauugaagaggugaugaacaucgugcugauugcccucagcguccuggcugugcuuaaggggcuguacaauuucgccacaugcggacucguuggccuggugacguuucuucugcucugugggagauccugcaccacaucucuguauaaaggagucuacgaacugcagacccucgagcugaacauggaaacacuuaauaugaccaugccucugagcuguacaaagaacaauucccaucacuauaucauggugggcaacgagaccgggcucgagcugacgcuuaccaauacaucuauuaucaaccauaaauucugcaaucugagcgacgcgcacaagaaaaaccucuacgaucaugcucugauguccaucauuucuaccuuucaccugagcaucccgaauuucaaccaguaugaagccauguccugugacuuuaauggaggcaagauuagcguucaguacaaccucucucacuccuaugccggcgaugcugccaaucauugcgggacaguggcuaacggaguccugcaaaccuucaugcggauggccuggggcgggagcuacaucgcgcuugacucuggacgcggcaacugggauuguauuaugacguccuaccaguaucugaucauucagaauacaaccugggaggaccacugccaguuuagcagacccucuccuaucggguaccucggacugcuuucccaacggacacgcgauaucuauauuagcagacggcugcucggcaccuucaccuggacacuguccgacucugaaggcgaggauacgcccgggggauacugucugacccgcuggaugcucaucgaggccgaacugaagugcuuuggcaacacagcuguggccaaauguaaugagaagcaugacgaagaguucugcgauaugcuuagacuguuugacuucaacaaacaggcuauucagcggcucaaggccccugcgcagaugagcauccaacugauuaauaaagccgugaacgcucuuaucaaugaucagcugaucaugaagaaccaccuccgcgacauuauggggauccccuauugcaauuacuccaaguauuguuaccugaaccacaccacaaccggaagaacgagccugccuaaaugcugucucgucucuaauggcuccuaccugaacgaaacacauuucagcgacgauauugagcagcaagccgacaauaugaucaccgagaugcuucagaaggaauauauggagcggcaggggaaaaccccgcugggacucguugaucuguuuguguucucuaccagcuuuuaccugauuuccaucuuccuucaccucgugaagauccccacacaucgccacauugucggcaaaucuugcccuaagccccauagacugaaccacaugggcaucuguagcugcgggcuguauaaacagccuggagugcccguuaaguggaagcggugaggacuagucccuguucccagagcccacuuuuuuuucuuuuuuugaaauaaaauagccugucuuucagaucucaaaggcucuuuucagagccaccaaaaaaaaaaaaaaaaaaaaaaaaaaaaaaaaaaaaaaaaaaaaaaaaaaaaaaaaaaaaaaaaaaaaaaaaaaaaaaaaaaaaaaaaaaaaaaaaaaaaa

SEQ ID NO: 32225 - RNA, 1767 nt, Artificial Sequence
  mRNA product Design a-2 (hSL-A100) comprising derived and/or modified sequence from LASV(LM765-SLE-2012;Clade IV)__AIT17814__GPCmut7 (opt5)
aggagaguccgcucagccagguugcagaagcggcuuagcguguguccuaaucuucucucugcguguagguaggccugugccgcaaacaagcuuaccaugggccagaucgugaccuucuuucaagaggucccccacguuauugaagaggugaugaacaucgugcugauugcccucagcauccuggcuguccuuaaggggcuguacaauuucgccacaugcggacucgugggccugguuacguuucuucugcucugugggagauccugcaccacaucucuguauaaaggaguguacgaacugcagacccucgagcugaacauggaaacacuuaauaugaccaugccucugagcuguacaaagaacaauucccaucacuauauuauggucggcaacgagaccgggcucgagcugacgcuuaccaauacaucuaucaucgaccauaaauucugcaaccugagcgaugcgcaccggaagaaucucuacgaccaugcucugauguccauuaucucuaccuuucaccugagcauuccgaacuucaaucaguaugaagccauguccugugauuuuaacggaggcaaaaucagcgugcaguacaaucucucucacuccuaugccaaggacgcugccgaucauugcggcacaguugcuaacggggugcugcaaaccuucaugcgcauggccuggggaggcagcuacauugcgcuugacucugggagaggacggugggauuguaucaugacguccuaccaguaucugauuauccagaauacaaccugggaggaccacugccaguuuagccgccccucuccuaucggcuaccucgggcugcuuucccaaagaacacgggauauuuauaucagccgcagacugcucggaaccuucaccuggacacuguccgacucugaaggcaaggauacgcccggcggguacugucugacccgguggaugcucauugaggccgagcugaaaugcuuuggaaacacagcugucgccaaguguaacgaaaaacaugacgaggaguucugcgauaugcuucgccuguuugacuucaauaagcaggcuauccagagacucaaagccccugcgcagaugagcauucaacugaucaacaaggccgugaaugcucuuaucaacgaccagcugauuaugaagaaucaccuccgggauaucaugggcauucccuauugcaacuacuccaaauauuguuaccugaaucacaccacaaccgggaagacgagccugccuaaaugcugucucgugucuaacggauccuaccugaaugaaacacauuucagcgacgauaucgaacagcaagccgacaacaugauuaccgagaugcuucagaaggaguauauggaacgccagggcaaaaccccgcuggggcucgucgaucuguuuguuuucucuaccagcuuuuaccugaucuccaucuuccuucaccucgugaagauucccacacauagacacaucgugggaaaaccuugccccaagccucaucggcugaaucacaugggcauuuguucuugcggccuguauaagcagcccggggucccggugaaauggaagcgcugaggacuagucccuguucccagagcccacuuuuuuuucuuuuuuugaaauaaaauagccugucuuucagaucucaaaggcucuuuucagagccaccaaaaaaaaaaaaaaaaaaaaaaaaaaaaaaaaaaaaaaaaaaaaaaaaaaaaaaaaaaaaaaaaaaaaaaaaaaaaaaaaaaaaaaaaaaaaaaaaaaaaa

SEQ ID NO: 32226 - RNA, 1767 nt, Artificial Sequence
  mRNA product Design a-2 (hSL-A100) comprising derived and/or modified sequence from LASV(LM776-SLE-2012;Clade IV)__AIT17824__GPCmut7 (opt5)
aggagaguccgcucagccagguugcagaagcggcuuagcguguguccuaaucuucucucugcguguagguaggccugugccgcaaacaagcuuaccaugggccagaucgugaccuucuuucaagaggucccccacguuauugaagaggugaugaacaucgugcugauugcccucagcauccuggcuguccuuaaggggcuguacaauuucgccacaugcggacucgugggccugguuacguuucuucugcucugugggagauccugcaccacaucuguguauaaaggagucuacgaacugcagacccuggagcucaacauggaaacacugaauaugaccaugccucuuagcuguacaaagaacaauucccaucacuauauuauggugggcaacgagaccgggcuggagcucacgcugaccaauacaucuaucaucaaccauaaauucugcaaucuuagcgacgcgcacaagaaaaaccuguacgaucaugcucucauguccauuaucucuaccuuucaccugagcauuccgaauuucaaccaguaugaagccauguccugugacuuuaauggaggcaagaucagcguucaguacaaccugucucacuccuaugccggcgaugcugccaaucauugcgggacaguggcuaacggaguccuccaaaccuucaugcggauggccuggggcgggagcuacauugcgcuggacucuggacacggcaagugggauuguaucaugacguccuaccaguaucuuauuauccagaacacaaccugggaggaccauugccaguuuagccgccccucuccuaucggguaccugggacuccugucccaaagaacacgggauauuuauaucagccgcagacuucugggcaccuucaccuggacacucuccgacucugaaggcaaagauacgcccgggggauacugucugacccgguggaugcugauugaggccgagcucaagugcuuuggcaauacagcuguggccaaauguaacgaaaagcacgacgaggaguucugcgauaugcugcgccuuuuugacuucaauaaacaggcuauccagagacugaaggccccugcgcagaugagcauucaacucaucaacaaggccgugaaugcucugaucaacgaucagcuuauuaugaaaaaucaucugcgggacaucauggggauucccuauugcaacuacuccaaguauuguuaccucaaucacaccacaaccggaaaaacgagccugccuaagugcugucuggucucuaacggcuccuaccucaaugaaacacacuucagcgacgauaucgaacagcaagccgacaacaugauuaccgagaugcugcagaaagaguauauggaacgccaggggaagaccccgcuuggacugguugaucucuuuguguucucuaccagcuuuuaccugaucuccaucuuccugcaucuugugaaaauucccacacacagacauaucgucggcaagucuugcccuaagccccaccggcucaaucacaugggcauuuguagcugcgggcuguauaaacagccuggagugcccguucgcuggaagagaugaggacuagucccuguucccagagcccacuuuuuuuucuuuuuuugaaauaaaauagccugucuuucagaucucaaaggcucuuuucagagccaccaaaaaaaaaaaaaaaaaaaaaaaaaaaaaaaaaaaaaaaaaaaaaaaaaaaaaaaaaaaaaaaaaaaaaaaaaaaaaaaaaaaaaaaaaaaaaaaaaaaaa

SEQ ID NO: 32227 - RNA, 1767 nt, Artificial Sequence
  mRNA product Design a-2 (hSL-A100) comprising derived and/or modified sequence from LASV(Mad39;Clade IV)__ANH09722__GPCmut7 (opt5)
aggagaguccgcucagccagguugcagaagcggcuuagcguguguccuaaucuucucucugcguguagguaggccugugccgcaaacaagcuuaccaugggccagaucgugaccuucuuucaagaggucccccacguuauugaagaggugaugaacaucgugcugauugcccucagcauccuggcuguccuuaaggggcuguacaauguggccacaugcggacucauuggccugguuacguuccuucugcucugugggagauccugcaccacaacccuguauaaaggaguguacgaacugcaggcgcucgagcugaacauggaaacacuuaauaugaccaugccucugucuuguacaaagaacaauagccaucacuauauccgggucggcaacgagaccgggcucgagcugacgcuuaccaauacaucccugaucaaccauaaauuuugcaaucucucugacgcucacaagaaaaaccuguacgaucaugcccugaugagcauuaucuccaccuuccaccucucuauuccgaauuuuaaccaguaugaagccaugagcugugacuucaaugauggaaagaucuccgugcaguacaaccugagccacacauaugcuggcgacaccgccaaucauugcggcacgguugcuaacggggugcuucaaacauuuaugcgcauggccuggggaggcucuuacauugcgcuggauuccgggagaggaggcugggacuguaucaugaccagcuaccaguaucucauuauccagaacacaaccugggaggaucacugccaguucucucggcccuccccuaucggguaccugggacuucugagccaacgcaccagagacauuuauaucucucggcgccuccugggcacauuuacguggacccuguccgauagcgaaggcaaggacacacccgggggauacugucucaccagauggaugcugauugaggccgagcuuaaaugcuucggcaauacagcugucgccaaguguaacgaaaaacaugaugaggaauuuugcgacaugcugcgccucuucgauuuuaauaagcaggcuauccagcggcugaaagccccugcgcagauguccauucaacuuaucaacaaggccgugaaugcucugaucaacgaccagcucauuaugaagaaucaccugagagacaucauggggauucccuauugcaacuacucuaaauauuguuaccugaaucacaccgugacgggaaagacaagccucccuaaaugcugucuggucuccaacggcagcuaccuuaaugagacccauuucucugaugacaucgaacagcaagccgauaacaugauuaccgagaugcugcagaaggaguauauggaacggcaggggaaaacaccgcucggacugguugaccuguucguguuuuccaccagcuucuaccuuaucucuaucuuucuccaccuggugaagauucccacacaucgccacgucgugggcaaaccuugccccaagccucauagacugaaucacaugggcaucuguagcugcggguucuauaagcagcccggaguuccggugcgguggaaacgcugaggacuagucccuguucccagagcccacuuuuuuuucuuuuuuugaaauaaaauagccugucuuucagaucucaaaggcucuuuucagagccaccaaaaaaaaaaaaaaaaaaaaaaaaaaaaaaaaaaaaaaaaaaaaaaaaaaaaaaaaaaaaaaaaaaaaaaaaaaaaaaaaaaaaaaaaaaaaaaaaaaaaa

SEQ ID NO: 32228 - RNA, 1767 nt, Artificial Sequence
  mRNA product Design a-2 (hSL-A100) comprising derived and/or modified sequence from LASV(Z0947-SLE-2011;Clade IV)__AIT17840__GPCmut7 (opt5)
aggagaguccgcucagccagguugcagaagcggcuuagcguguguccuaaucuucucucugcguguagguaggccugugccgcaaacaagcuuaccaugggccagaucgugaccuucuuucaagaggucccccacguuauugaagaggugaugaacaucgugcugauugcccucagcauccuggcuguccuuaaggggcuguacaauuucgccacaugcggacucgugggccugguuacguuucuucugcucugugggagauccugcaccauuucucuguauaaaggaguguacgaacugcagacacucgagcugaacauggaaacccuuaauaugacaaugccucugagcuguaccaagaacaauucccaucacuauaucauggucggcaacgagacagggcucgagcugacccuuacgaauaccucuaucauuaaccauaaauucugcaaucugagcgacgcgcacaagaaaaaccucuacgaucaugcucugauguccaucauuucuacauuucaccugagcaucccgaauuucaaccaguaugaagccauguccugugacuuuaauggaggcaagauuagcgugcaguacaaccucucucacuccuaugccggcgaugcugccaaucauugcgggaccguugcuaacggagugcugcaaacauucaugcggauggccuggggcgggagcuacaucgcgcuugacucuggacgcgauagaugggacuguauuaugaccuccuaccaguaucugaucauccagaacacgacaugggaggaucacugccaguuuagccggcccucuccuauuggcuaccucgggcugcuuucccaacgcaccagagacaucuauauuagccggcgccugcucggaacauucaccuggacccuguccgauucugaaggcaaggacacacccggcggguacugucugacgagauggaugcucaucgaggccgagcugaaaugcuuuggaaauaccgcugucgccaaguguaacgaaaaacaugaugaggaguucugcgacaugcuucggcuguuugauuucaauaagcaggcuauucagcgccucaaagccccugcgcagaugagcauccaacugaucaacaaggccgugaaugcucuuauuaacgaccagcugaucaugaagaaucaccucagagacauuaugggcauccccuauugcaacuacuccaaauauuguuaccugaaucacacaaccacagggaagaccagccugccuaaaugcugucucgugucuaacggauccuaccugaaugaaacgcauuucagcgaugacauugaacagcaagccgauaacaugaucacagagaugcuucagaaggaguauauggaacggcagggcaaaaccccgcuggggcucgucgaccuguuuguuuucucuaccagcuuuuaccugaucuccauuuuccuucaccucgugaagauccccacacaucgccacauugugggaaaaccuugccccaagccucauagacugaaucacaugggcaucuguucuugcggccuguauaagcagcccggggucccggugaaauggaagcggugaggacuagucccuguucccagagcccacuuuuuuuucuuuuuuugaaauaaaauagccugucuuucagaucucaaaggcucuuuucagagccaccaaaaaaaaaaaaaaaaaaaaaaaaaaaaaaaaaaaaaaaaaaaaaaaaaaaaaaaaaaaaaaaaaaaaaaaaaaaaaaaaaaaaaaaaaaaaaaaaaaaaa

SEQ ID NO: 32229 - RNA, 1743 nt, Artificial Sequence
  mRNA product Design a-2 (A100) comprising derived and/or modified sequence from LASV(Josiah;Clade IV)__NP_694870__GPCmut7 (opt1)
aggagaguccgcucagccagguugcagaagcggcuuagcguguguccuaaucuucucucugcguguagguaggccugugccgcaaacaagcuuaccaugggccagaucgugaccuucuuccaggaggucccccacgugaucgaggaggugaugaacaucguccugaucgcccucagcgugcuggccgugcugaaggggcucuacaacuucgcgaccugcggccuggucgggcuggugacguuccuccugcugugcggccgcuccugcaccaccagccucuacaaggggguguacgagcugcagacccuggagcucaacauggagacgcugaacaugaccaugccgcuguccugcaccaagaacaacagccaccacuacaucauggucggcaacgagaccggccucgagcugacgcugaccaacaccuccaucaucaaccacaaguucugcaaccucagcgacgcccacaagaagaaccuguacgaccacgcccugauguccaucaucagcaccuuccaccucuccauccccaacuucaaccaguacgaggccaugagcugcgacuucaacgggggcaagaucuccgugcaguacaaccugagccacuccuacgccggggacgcggccaaccacugcggcacgguggccaacgggguccugcagaccuucaugcggauggccuggggcggcagcuacaucgcgcucgacuccgggcgcggcaacugggacugcaucaugaccagcuaccaguaccugaucauccagaacaccacgugggaggaccacugccaguucucccggcccagccccaucggguaccugggccuccugucccagcgcacccgggacaucuacaucagccgccggcugcucggcaccuucaccuggacgcugagcgacuccgaggggaaggacaccccgggcggguacugccugacccgcuggaugcucaucgaggccgagcugaagugcuucggcaacaccgccguggccaagugcaacgagaagcacgacgaggaguucugcgacaugcugcggcuguucgacuucaacaagcaggccauccagcgccugaaggcgcccgcccagaugagcauccagcugaucaacaaggccgugaacgcccucaucaacgaccagcugaucaugaagaaccaccuccgggacaucauggggauccccuacugcaacuacuccaaguacugcuaccucaaccacacgaccaccggccgcaccagccugcccaagugcugccuggucuccaacggcagcuaccucaacgagacgcacuucuccgacgacaucgagcagcaggccgacaacaugaucaccgagaugcugcagaaggaguacauggagcggcaggggaagacgccccugggccucguggaccuguucguguucagcaccuccuucuaccugaucagcaucuuccugcaccucgucaagaucccgacccaccgccacaucguggggaaguccugccccaagccccaccggcugaaccacaugggcaucugcagcugcgggcuguacaagcagcccggcgugccggucaaguggaagcgcugaggacuagucccuguucccagagcccacuuuuuuuucuuuuuuugaaauaaaauagccugucuuucagaucuaaaaaaaaaaaaaaaaaaaaaaaaaaaaaaaaaaaaaaaaaaaaaaaaaaaaaaaaaaaaaaaaaaaaaaaaaaaaaaaaaaaaaaaaaaaaaaaaaaaa

SEQ ID NO: 32230 - RNA, 1740 nt, Artificial Sequence
  mRNA product Design a-2 (A100) comprising derived and/or modified sequence from LASV(LP;Clade I)__AAF86701__GPCmut7 (opt1)
aggagaguccgcucagccagguugcagaagcggcuuagcguguguccuaaucuucucucugcguguagguaggccugugccgcaaacaagcuuaccaugggccagaucaucaccuucuuccaggaggugccccacgucaucgaggaggugaugaacaucgugcugaucgcccucagccugcuggccauccucaaggggcuguacaacaucgcgaccugcggcaucaucgggcuggucgccuuccucuuccugugcggcaaguccugcagccugacgcucaagggcggguacgagcugcagacccuggagcucaacauggagacccugaacaugaccaugccgcuguccugcacgaagaacagcucccaccacuacauccgcgugggcaacgagaccgggcucgagcugacccugaccaacacgagcaucaucaaccacaaguucugcaaccucuccgacgcccacaagaagaaccuguacgaccacgcccugaugagcaucaucuccaccuuccaccucagcauccccaacuucaaccaguacgaggccauguccugcgacuucaacggcgggaagaucagcgugcaguacaaccugucccacagcuacgcgggcgacgccgccgagcacugcgggaccgucgccaacggcgugcugcagaccuucaugcggauggcguggggcgggcgcuacaucgcccucgacuccggcaaggggaacugggacugcaucaugacgagcuaccaguaccugaucauccagaacaccaccugggaggaccacugccaguucucccggcccagccccaucggcuaccugggccuccugucccagcgcacccgggacaucuacaucagccgccggcugcucgggacguucaccuggacccugagcgacuccgagggcaacgagacccccgggggcuacugccugacgcgcuggaugcucaucgaggccgagcugaagugcuucgggaacaccgccguggccaagugcaacgagaagcacgacgaggaguucugcgacaugcugcggcuguucgacuucaacaagcaggcgauccgccggcugaaggcccccgcccagaugagcauccagcugaucaacaaggccgucaacgcccucaucaacgaccagcugaucaugaagaaccaccuccgcgacaucaugggcauccccuacugcaacuacuccaaguacugcuaccucaaccacaccagcuccggccggaccagccugcccaagugcugccugaucuccaacgggagcuaccucaacgagacgcaguucuccgacgacaucgagcagcaggcggacaacaugaucaccgagaugcugcagaaggaguacaucgagcgccagggcaagaccccgcuggggcucguggacaucuucaucuucagcaccuccuucuaccugaucagcaucuuccugcaccugaucaagaucccgacgcaccggcacaucgugggcaagcccugccccaagccccaccgccucaaccacaugggggucugcuccugcggccuguacaagcacccgggcgugcccaccaaguggaagcggugaggacuagucccuguucccagagcccacuuuuuuuucuuuuuuugaaauaaaauagccugucuuucagaucuaaaaaaaaaaaaaaaaaaaaaaaaaaaaaaaaaaaaaaaaaaaaaaaaaaaaaaaaaaaaaaaaaaaaaaaaaaaaaaaaaaaaaaaaaaaaaaaaaaaa

SEQ ID NO: 32231 - RNA, 1740 nt, Artificial Sequence
  mRNA product Design a-2 (A100) comprising derived and/or modified sequence from LASV(803213;Clade II)__AAF86703__GPCmut7 (opt1)
aggagaguccgcucagccagguugcagaagcggcuuagcguguguccuaaucuucucucugcguguagguaggccugugccgcaaacaagcuuaccaugggccagaucaucaccuucuuccaggaggugccccacgucaucgaggaggugaugaacaucgugcugaucgcccucagccugcuggccauccucaaggggaucuacaacgucgcgaccugcggccuguucgggcugaucuccuuccuccugcugugcggccgcagcugcuccgugacguacaaggggguguacgagcuccagacccuggagcugaacauggccaaccucaacaugaccaugccgcugagcugcaccaagaacaacucccaccacuacaucauggucggcaacgagacgggccuggagcucacccugaccaacaccagcaucaucaaccacaaguucugcaaccuguccgacgcccacaagaagaaccucuacgaccacgcccugaugagcaucaucuccacguuccaccugagcauccccaacuucaaccaguacgaggccauguccugcgacuucaacgggggcaagaucagcgugcaguacaaccucucccacagcuucgcgguggacgccgccaaccacugcgggaccaucgccaacggcguccugcagaccuucaugcggauggcguggggcggguccuacaucgcccuggacagcggcaaggggaacugggacugcaucaugaccuccuaccaguaccucaucauccagaacacgaccugggaggaccacugccaguucagccgccccucccccaucggcuaccuggggcugcucagccagcggacccgcgacaucuacaucagccggcgccugcugggcaccuucacguggacccucuccgacagcgagggcaacgaggcccccgggggcuacugccugacccgguggaugcugaucgaggccgagcucaagugcuucgggaacaccgccguggcgaagugcaacgagaagcacgacgaggaguucugcgacaugcugcgccuguucgacuucaacaagcaggccaucaagcggcucaagacgcccgcccagauguccauccagcugaucaacaaggccgugaacgcccugaucaacgaccagcucaucaugaagaaccaccuccgcgacaucaugggcauccccuacugcaacuacagccgguacugcuaccugaaccacaccgucaccgggaagaccucccugccccgcugcugccuggugagcaacggcuccuaccugaacgagacgcacuucagcgacgacaucgagcagcaggcggacaacaugaucaccgagaugcuccagaaggaguacauggaccggcagggcaagaccccgcuggggcugguggaccucuucgucuucuccaccagcuucuaccugaucuccaucuuccugcaccuggugaagaucccgacgcaccgccacaucgugggcaagcccugccccaagccccaccggcucaaccacauggggaucugcagcugcggccuguacaagcacccggggguccccgugaaguggaagcgcugaggacuagucccuguucccagagcccacuuuuuuuucuuuuuuugaaauaaaauagccugucuuucagaucuaaaaaaaaaaaaaaaaaaaaaaaaaaaaaaaaaaaaaaaaaaaaaaaaaaaaaaaaaaaaaaaaaaaaaaaaaaaaaaaaaaaaaaaaaaaaaaaaaaaa

SEQ ID NO: 32232 - RNA, 1740 nt, Artificial Sequence
  mRNA product Design a-2 (A100) comprising derived and/or modified sequence from LASV(GA391;Clade III)__CAA36645__GPCmut7 (opt1)
aggagaguccgcucagccagguugcagaagcggcuuagcguguguccuaaucuucucucugcguguagguaggccugugccgcaaacaagcuuaccaugggccagaucgugaccuucuuccaggaggucccccacgugaucgaggaggugaugaacaucguccugaucgcccucagcauccuggccauccugaaggggcucuacaacguggcgaccugcggccugaucgggcuggugacguuccuccugcuguccggccgcagcugcucccucaucuacaaggggaccuacgagcugcagacccuggagcucaacauggagacccugaacaugacgaugccgcugagcugcaccaagaacaacucccaccacuacauccgggucggcaacgagaccggccucgagcugacccugacgaacaccagcauccucaaccacaaguucugcaaccuguccgacgcccacaagcgcaaccuguacgaccacagccucauguccaucaucagcaccuuccaccuguccauccccaacuucaaccaguacgaggccaugagcugcgacuucaacgggggcaagaucaccgugcaguacaaccugucccacagcuucgccguggacgccgcggggcacugcggcacgcucgccaacgggguccugcagaccuucaugcggauggccuggggcggcuccuacaucgcccuggacagcgggcgcggcaacugggacugcaucaugaccuccuaccaguaccucaucauccagaacaccacgugggacgaccacugccaguucagccggcccucccccaucggguaccugggccugcucagccagcgcacccgggacaucuacaucagccgccggcugcugggcaccuucaccuggacgcucuccgacagcgaggggaacgagaccccgggcggguacugccugacccgcuggaugcugaucgaggcggagcucaagugcuucggcaacaccgccguggccaagugcaacgagaagcacgacgaggaguucugcgacaugcugcggcuguucgacuucaacaagcaggccauccgccggcucaagacgcccgcccagauguccauccagcugaucaacaaggcggugaacgcccugaucaacgaccagcucaucaugaagaaccaccuccgcgacaucauggggauccccuacugcaacuacagccgguacugcuaccugaaccacaccuccaccggcaagaccagccugccccgcugcugccugaucuccaacggcagcuaccugaacgagacgaaguucuccgacgacaucgagcagcaggccgacaacaugaucaccgagaugcuccagaaggaguacaucgaccggcaggggaagacgccccugggccuggucgaccuguucguguucagcaccuccuucuaccucaucagcaucuuccugcaccuggugaagaucccgacccaccgccacaucgucgggaagcccugccccaagccccaccggcucaaccacaugggcaucugcuccugcgggcuguacaagcagccgggcgugcccgugcgcuggaagcggugaggacuagucccuguucccagagcccacuuuuuuuucuuuuuuugaaauaaaauagccugucuuucagaucuaaaaaaaaaaaaaaaaaaaaaaaaaaaaaaaaaaaaaaaaaaaaaaaaaaaaaaaaaaaaaaaaaaaaaaaaaaaaaaaaaaaaaaaaaaaaaaaaaaaa

SEQ ID NO: 32233 - RNA, 1743 nt, Artificial Sequence
  mRNA product Design a-2 (A100) comprising derived and/or modified sequence from LASV(AV;Clade V)__CCA30314__GPCmut7 (opt1)
aggagaguccgcucagccagguugcagaagcggcuuagcguguguccuaaucuucucucugcguguagguaggccugugccgcaaacaagcuuaccaugggccagaucgugaccuucuuccaggaggucccccacgugaucgaggaggugaugaacaucguccugaucgcccucagcauccuggccgugcugaaggggcucuacaacaucgcgaccugcggccugaucgggcugaucacguuccuccugcugugcggccgcuccugcagcuccaaccucuacaaggggguguacgagcugcagagccuggaccucaacauggagacccugaacaugaccaugccgcuguccugcaccaagaacaacagccaccacuacauccgggucggcaacgacacgggccucgagcugacccugaccaacaccuccauccucaaccacaaguucugcaaccugagcgacgcccacaagaaggaccuguacgaccacgcccucauguccaucaucagcacguuccaccuguccauccccaacuucaaccaguacgaggccaugagcugcgacuucaacgggggcaagaucuccgugcaguacaaccugagccacuccuacgccaucgacgcggccaaccacugcgggaccguggccaacggcauccuccagaccuucaugcgcauggccuggggcgggagcuacaucgcgcuggacuccggccgggggaacugggacugcaucaugaccagcuaccaguaccugaucauccagaacacgaccugggagaaccacugccaguucucccgccccagccccaucggcuaccucgggcugcugagccagcggacccgcgacaucuacaucucccggcgccuccugggcaccuucacguggacccugagcgacuccgagggcaacgccacccccgggggcuacugccucacccgguggaugcugaucgaggccgagcugaagugcuucgggaacacggccgucgccaagugcaacgagaagcacgacgaggaguucugcgacaugcuccgccuguucgacuucaacaagcaggcgaucagccggcugaagucccccgcccagaugagcauccagcucaucaacaaggccgugaacgcccugaucaacgaccagcugaucaugaagaaccaccuccgcgacaucaugggcauccccuacugcaacuacuccaaguacugcuaccugaaccacaccaucaccgggaagaccagccugcccaagugcugccucguguccaacggcagcuaccugaacgagacgcacuucuccgacgacaucgagcagcaggccgacaacaugaucaccgagaugcugcagaaggaguacauggagcggcagggcaagaccccgcucgggcuggucgaccuguucguguucagcaccuccuucuaccugaucagcaucuuccuccgccuggugaagaucccgacgcaccggcacaucgucggcaagcccugccccaagccccaccgccugaaccacauggggaucugcuccugcggccucuacaagcagccgggggugcccgugcgguggaagcgcugaggacuagucccuguucccagagcccacuuuuuuuucuuuuuuugaaauaaaauagccugucuuucagaucuaaaaaaaaaaaaaaaaaaaaaaaaaaaaaaaaaaaaaaaaaaaaaaaaaaaaaaaaaaaaaaaaaaaaaaaaaaaaaaaaaaaaaaaaaaaaaaaaaaaa

SEQ ID NO: 32234 - RNA, 1740 nt, Artificial Sequence
  mRNA product Design a-2 (A100) comprising derived and/or modified sequence from LASV(Togo/2016/7082;Clade VI)__AMR44577__GPCmut7 (opt1)
aggagaguccgcucagccagguugcagaagcggcuuagcguguguccuaaucuucucucugcguguagguaggccugugccgcaaacaagcuuaccaugggccagaucaucaccuucuuccaggaggugccccacgucaucgaggaggugaugaacaucgugcugaucgcccucagccugcuggccauccucaagggggucuacaacguggcgaccugcggcaucaucgggcuggugacguuccuguuccucugcggccgcuccugcagccugaucuacaagggguccuacgagcugcagacccucgagcugaacauggagacccugaacaugaccaugccgcucagcugcacgaagaacuccagccaccacuacauccgggucggcaacgagaccggccuggagcugacccucaccaacacguccaucaucaaccacaaguucugcaaccugagcgacgcccacaagcgcaaccuguacgaccacgcccucauguccauccugagcaccuuccaccuguccauccccaacuucaaccaguacgaggccaugagcugcgacuucaacgggggcaagaucuccgugcaguacaaccucagccacgccuacgcgguggacgccgccgagcacugcgggaccgucgccaacggcgugcugcagaccuucaugcggauggcguggggcggguccuacaucgcccuggacagcggccgcgggaacugggacugcaucaugacguccuaccaguaccucaucauccagaacaccaccugggaggaccacugccaguucagccggcccucccccaucggcuaccuggggcugcucagccagcgcacccgggacaucuacaucagccgccggcugcugggcacguucaccuggacccucuccgacagcgagggcaacgagacccccgggggcuacugccugacgcgcuggaugcugaucgaggccgagcucaagugcuucgggaacaccgccguggccaagugcaacgagaagcacgacgaggaguucugcgacaugcugcggcuguucgacuucaacaagcaggcgauccagcgccucaagucccccgcccagaugagcauccagcugaucaacaaggccgucaacgcccugaucaacgaccagcucaucaugaagaaccaccuccgggacaugaugggcauccccuacugcaacuacuccaaguacugcuaccugaaccacaccagcuccgggcgcaccagccugcccaagugcugccugguguccaacggcagcuaccugaacgagacgcacuucuccgacgacaucgagcagcaggccgacaacaugaucaccgagaugcuccagaaggaguacaucgaccggcagggcaagaccccgcuggggcugguggaccucuucgucuucagcaccuccuucuaccugaucagcaucuuccugcaccugaucaagaucccgacgcaccgccacaucgugggcaagcccugccccaagccccaccggcucaaccacauggggaucugcuccugcggccuguacaagcagccgggggugcccacccgcuggaagcggugaggacuagucccuguucccagagcccacuuuuuuuucuuuuuuugaaauaaaauagccugucuuucagaucuaaaaaaaaaaaaaaaaaaaaaaaaaaaaaaaaaaaaaaaaaaaaaaaaaaaaaaaaaaaaaaaaaaaaaaaaaaaaaaaaaaaaaaaaaaaaaaaaaaaa

SEQ ID NO: 32235 - RNA, 1740 nt, Artificial Sequence
  mRNA product Design a-2 (A100) comprising derived and/or modified sequence from LASV(KAK-428;Clade n.d. (VII))__ANH09740__GPCmut7 (opt1)
aggagaguccgcucagccagguugcagaagcggcuuagcguguguccuaaucuucucucugcguguagguaggccugugccgcaaacaagcuuaccaugggccagaucgugaccuucuuccaggaggucccccacgugaucgaggaggugaugaacaucguccugaucgcccucagccugcuggccauccucaaggggcuguacaacuucgcgaccugcggcgugaucgggcugaucacguuccuccugcugugcggccgcuccugcagcgccaccuacaaggggcaguacgagcuccagacccuggagcugaacauggagucccucaacaugaccaugccgcugagcugcacgaagaacaacucccaccacuacauccgggccggcaacaacaccggccuggagcucacccugaccaacacgagcaucaucucccacaaguucugcaaccugagcgacgcccacaagaagaaccucuacgaccacacccugauguccaucaucaccaccuuccaccugagcauccccaacuucaaccaguacgaggccauguccugcgacuucaacgggggcaagaucagcauccaguacaaccucucccacagcuacgcgggggacgccgcccagcacugcggcacgguggccaacgggguccugcagaccuucaugcgcauggcguggggcggcuccuaccuggcccucgacagcgggcggcgcggcugggacugcaucaucuccagcuaccaguaccugaucauccagaacaccaccugggacgaccacugccaguucucccggcccagccccaucggguaccugggcuucgugagccagaagacgcgcgacaucuacaucucccggcgccuccugggcaccuucaccuggacccugagcgacuccgaggggcacgacaugccgggcggguacugccucacgcgguggaugcugaucgaggccgaccugaagugcuucggcaacaccgccguggccaagugcaacgagaagcacgacgaggaguucugcgacauguggcgccucuucgacuucaacaagcaggcgauccagcggcugaaggcccccgcccagaugaacauccagcugaucaacaaggccgucaacgcccucaucaacgaccagcugaugaugaagaaccaccuccgcgacaucauggggauccccuacugcaacuacagcaaguucugcuaccugaacaacaccaccacgggccggaccucccugccccgcugcugccugaucagcaacggcuccuaccucaacgagacccacuucagcgacgacaucgagcagcaggcggacaacaugaucaccgagaugcugcagaaggaguacauggaccggcaggggaagacgccccugggccucguggaccuguucguguucuccaccagcuucuaccugaucaccaucuuccuccaccuggucaagaucccgacccaccgccacaucguggggaagcccugccccaagccccaccggcugaaccacaugggcaucugcuccugcgggcuguacaagcagccgggcgugcccguccgcuggaagcggugaggacuagucccuguucccagagcccacuuuuuuuucuuuuuuugaaauaaaauagccugucuuucagaucuaaaaaaaaaaaaaaaaaaaaaaaaaaaaaaaaaaaaaaaaaaaaaaaaaaaaaaaaaaaaaaaaaaaaaaaaaaaaaaaaaaaaaaaaaaaaaaaaaaaa

SEQ ID NO: 32236 - RNA, 1740 nt, Artificial Sequence; identical to SEQ ID NO: 32230
  mRNA product Design a-2 (A100) comprising derived and/or modified sequence from LASV(Pinneo-NIG-1969;Clade I)__AIT17836__GPCmut7 (opt1)

SEQ ID NO: 32237 - RNA, 1740 nt, Artificial Sequence
  mRNA product Design a-2 (A100) comprising derived and/or modified sequence from LASV(ISTH0009-NIG-2011;Clade II)__AIT17404__GPCmut7 (opt1)
aggagaguccgcucagccagguugcagaagcggcuuagcguguguccuaaucuucucucugcguguagguaggccugugccgcaaacaagcuuaccaugggccagaucaucaccuucuuccaggaggugccccacgucaucgaggaggugaugaacaucgugcugaucgcccucagccugcuggccauccucaaggggaucuacaacgucgcgaccugcggccuguucgggcugguguccuuccuccugcugugcggccgcagcugcuccacgaccuacaaggggguguacgagcuccagacccuggagcuggacauggccagccucaacaugaccaugccgcuguccugcacgaagaacaacagccaccacuacaucauggucggcaacgagaccggccuggagcucacccugaccaacacguccaucaucaaccacaaguucugcaaccugagcgacgcccacaagaagaaccucuacgaccacgcccugauguccaucaucagcaccuuccaccuguccauccccaacuucaaccaguacgaggccaugagcugcgacuucaacgggggcaagaucuccgugcaguacaaccucagccacgcguacgccguggacgccgccaaccacugcgggaccaucgcgaacggcguccugcagaccuucaugcggauggccuggggcggguccuacaucgcccuggacagcggcaagggguccugggacugcaucaugacgagcuaccaguaccucaucauccagaacaccaccugggaggaccacugccaguucucccgccccagccccaucggcuaccuggggcugcucagccagcggacccgcgacaucuacaucucccggcgccugcugggcacguucaccuggacccucagcgacuccgagggcaacgagacccccgggggcuacugccugacgcgguggaugcugaucgaggccgagcucaagugcuucgggaacaccgccguggcgaagugcaacgagaagcacgacgaggaguucugcgacaugcugcgccuguucgacuucaacaagcaggccauccggcgccucaagacccccgcccagaugagcauccagcugaucaacaaggccgugaacgcccugaucaacgaccagcucaucaugaagaaccaccuccgggacaucaugggcaucccguacugcaacuacuccaaguacugcuaccugaaccacaccgucacggggaagaccagccugccccgcugcugccugguguccaacggcagcuaccugaacgagacccacuucuccgacgacaucgagcagcaggcggacaacaugaucaccgagcuccugcagaaggaguacauggaccggcagggcaagacgccccuggggcucguggaccuguucgucuucagcaccuccuucuaccugaucagcaucuuccugcaccucaucaagaucccgacccaccgccacaucaccggcaagcccugccccaagccccaccggcugaaccacauggggaucugcuccugcggccuguacaagcacccgggggugcccgugaaguggaagcgcugaggacuagucccuguucccagagcccacuuuuuuuucuuuuuuugaaauaaaauagccugucuuucagaucuaaaaaaaaaaaaaaaaaaaaaaaaaaaaaaaaaaaaaaaaaaaaaaaaaaaaaaaaaaaaaaaaaaaaaaaaaaaaaaaaaaaaaaaaaaaaaaaaaaaa

SEQ ID NO: 32238 - RNA, 1740 nt, Artificial Sequence
  mRNA product Design a-2 (A100) comprising derived and/or modified sequence from LASV(ISTH2010-NIG-2012;Clade II)__AIT17482__GPCmut7 (opt1)
aggagaguccgcucagccagguugcagaagcggcuuagcguguguccuaaucuucucucugcguguagguaggccugugccgcaaacaagcuuaccaugggccagaucaucaccuucuuccaggaggugccccacgucaucgaggaggugaugaacaucgugcugaucgcccucagccugcuggccauccucaaggggaucuacaacgucgcgaccugcggccuguucgggcugguguccuuccuccugcugugcggccgcagcugcuccacgaccuacaaggggguguacgagcuccagacccuggagcuggacauggccagccucaacaugaccaugccgcuguccugcacgaagaacaacagccaccacuacaucauggucggcaacgagaccggccuggagcucacccugaccaacacguccaucaucaaccacaaguucugcaaccugagcgacgcccacaagaagaaccucuacgaccacgcccugauguccaucaucagcaccuuccaccuguccauccccaacuucaaccaguacgaggccaugagcugcgacuucaacgggggcaagaucuccgugcaguacaaccucagccacgcguacgccguggacgccgccaaccacugcgggaccaucgcgaacggcguccugcagaccuucaugcggauggccuggggcggguccuacaucgcccuggacagcggcaagggguccugggacugcaucaugacgagcuaccaguaccucaucauccagaacaucaccugggaggaccacugccaguucucccgccccagccccaucggcuaccuggggcugcucagccagcggacccgcgacaucuacaucucccggcgccugcugggcaccuucacguggacccucagcgacuccgagggcaacgagacccccgggggcuacugccugacccgguggaugcugaucgaggccgagcucaagugcuucgggaacacggccguggcgaagugcaacgagaagcacgacgaggaguucugcgacaugcugcgccuguucgacuucaacaagcaggccauccggcgccucaagacccccgcccagaugagcauccagcugaucaacaaggccgugaacgcccugaucaacgaccagcucaucaugaagaaccaccuccgggacaucaugggcauccccuacugcaacuacuccaaguacugcuaccugaaccacaccgucaccgggaagacgagccugccccgcugcugccugguguccaacggcagcuaccugaacgagacccacuucuccgacgacaucgagcagcaggcggacaacaugaucaccgagcuccugcagaaggaguacaucgaccggcagggcaagaccccgcuggggcucguggaccuguucgucuucagcacguccuucuaccugaucagcaucuuccugcaccucgugaagaucccgacccaccgccacguggucggcaagcccugccccaagccccaccggcugaaccacauggggaucugcuccugcggccuguacaagcacccgggggugcccgugaaguggaagcgcugaggacuagucccuguucccagagcccacuuuuuuuucuuuuuuugaaauaaaauagccugucuuucagaucuaaaaaaaaaaaaaaaaaaaaaaaaaaaaaaaaaaaaaaaaaaaaaaaaaaaaaaaaaaaaaaaaaaaaaaaaaaaaaaaaaaaaaaaaaaaaaaaaaaaa

SEQ ID NO: 32239 - RNA, 1740 nt, Artificial Sequence
  mRNA product Design a-2 (A100) comprising derived and/or modified sequence from LASV(Lassa virus/H.sapiens-wt/NGA/2015/ISTH_0543;Clade II)__AVO03639__GPCmut7 (opt1)
aggagaguccgcucagccagguugcagaagcggcuuagcguguguccuaaucuucucucugcguguagguaggccugugccgcaaacaagcuuaccaugggccagaucaucaccuucuuccaggaggugccccacgucaucgaggaggugaugaacaucgugcugaucgcccucagccugcuggccauccucaaggggaucuacaacgucgcgaccugcggccuguucgggcugguguccuuccuccugcugugcggccgcagcugcuccacgaccuacaaggggguguacgagcuccagacccuggagcuggacauggccaaccucaacaugaccaugccgcugagcugcacgaagaacaacucccaccacuacaucauggucggcaacgagaccggccuggagcucacccugaccaacacgagcaucaucaaccacaaguucugcaaccuguccgacgcccacaagaagaaccucuacgaccacgcccugaugagcaucaucuccaccuuccaccugagcauccccaacuucaaccaguacgaggccauguccugcgacuucaacgggggcaagaucagcgugcaguacaaccucucccacaccuacgcgguggacgccgccaaccacugcgggaccaucgccaacggcguccugcagacguucaugcggauggcguggggcgggagcuacaucgcccuggacuccggcaaggggagcugggacugcaucaugaccuccuaccaguaccucgugauccagaacaccaccugggaggaccacugccaguucagccgccccucccccaucggcuaccuggggcugcucagccagcggacgcgcgacaucuacaucagccggcgccugcugggcaccuucaccuggacccucuccgacagcgagggcaacgagacgcccgggggcuacugccugacccgguggaugcugaucgaggccgagcucaagugcuucgggaacaccgccguggccaagugcaacgagaagcacgacgaggaguucugcgacaugcugcgccuguucgacuucaacaagcaggcgauccggcgccucaagacccccgcccagauguccauccagcugaucaacaaggccgucaacgcccugaucaacgaccagcucaucaugaagaaccaccuccgggacaucaugggcauccccuacugcaacuacagcaaguacugcuaccugaaccacacggugaccgggaagaccucccugccccgcugcugccuggugagcaacggcuccuaccugaacgagacccacuucagcgacgacaucgagcagcaggccgacaacaugaucacggagcuccugcagaaggaguacaucgaccggcagggcaagaccccgcuggggcucgucgaccuguucguguucuccaccagcuucuaccugaucuccaucuuccugcaccucgugaagaucccgacccaccgccacaucacgggcaagcccugccccaagccccaccggcugaaccacauggggaucugcagcugcggccuguacaagcacccggggguccccgugaaguggaagcgcugaggacuagucccuguucccagagcccacuuuuuuuucuuuuuuugaaauaaaauagccugucuuucagaucuaaaaaaaaaaaaaaaaaaaaaaaaaaaaaaaaaaaaaaaaaaaaaaaaaaaaaaaaaaaaaaaaaaaaaaaaaaaaaaaaaaaaaaaaaaaaaaaaaaaa

SEQ ID NO: 32240 - RNA, 1740 nt, Artificial Sequence
  mRNA product Design a-2 (A100) comprising derived and/or modified sequence from LASV(Lassa virus/H.sapiens-wt/NGA/2016/ISTH_0009;Clade II)__AVO03571__GPCmut7 (opt1)
aggagaguccgcucagccagguugcagaagcggcuuagcguguguccuaaucuucucucugcguguagguaggccugugccgcaaacaagcuuaccaugggccagaucaucaccuucuuccaggaggugccccacgucaucgaggaggugaugaacaucgugcugaucgcccucagccugcuggccauccucaaggggaucuacaacgucgcgaccugcggccugcuggggcucguguccuuccugcugcucugcggccgcagcugcuccacgaccuacaaggggguguacgagcugcagacccuggagcucgacauggccagccugaacaugaccaugccgcuguccugcacgaagaacaacagccaccacuacaucauggucggcaacgagaccggccucgagcugacccugaccaacacguccaucaucaaccacaaguucugcaaccucagcgacgcccacaagaagaaccuguacgaccacgcccugauguccaucaucagcaccuuccaccucuccauccccaacuucaaccaguacgaggccaugagcugcgacuucaacgggggccggaucuccgugcaguacaaccugagccacuccuacgcgguggacgccgccaaccacugcgggaccaucgccaacggcguccugcagaccuucaugcgcauggcguggggcgggagcuacaucgcccucgacuccggcaaggggagcugggacugcaucaugacguccuaccaguaccugaucauccagaacaccaccugggaggaccacugccaguucagccggcccagccccaucggcuaccuggggcuccugucccagcgcacccgggacaucuacaucagccgccggcugcucggcacguucaccuggacccuguccgacagcgagggcaacgagacccccgggggcuacugccugacgcgcuggaugcucaucgaggccgagcugaagugcuucgggaacaccgccguggccaagugcaacgagaagcacgacgaggaguucugcgacaugcugcggcuguucgacuucaacaagcaggcgauccgccggcugaagacccccgcccagauguccauccagcugaucaacaaggccgugaacgcccucaucaacgaccagcugaucaugaagaaccaccuccgcgacaucaugggcaucccguacugcaacuacagcaaguacugcuaccucaaccacaccgucacggggaagaccucccugccccggugcugccuggugagcaacggcuccuaccucaacgagacccacuucagcgacgacaucgagcagcaggccgacaacaugaucaccgagcugcugcagaaggaguacaucgaccgccagggcaagacgccccucgggcugguggaccuguucgucuucuccaccagcuucuaccugaucuccaucuuccuccaccuggugaagaucccgacccaccggcacaucaccggcaagcccugccccaagccccaccgccugaaccacauggggaucugcagcugcggccucuacaaccacccgggggugcccgucaaguggaagcggugaggacuagucccuguucccagagcccacuuuuuuuucuuuuuuugaaauaaaauagccugucuuucagaucuaaaaaaaaaaaaaaaaaaaaaaaaaaaaaaaaaaaaaaaaaaaaaaaaaaaaaaaaaaaaaaaaaaaaaaaaaaaaaaaaaaaaaaaaaaaaaaaaaaaa

SEQ ID NO: 32241 - RNA, 1740 nt, Artificial Sequence
  mRNA product Design a-2 (A100) comprising derived and/or modified sequence from LASV(Lassa virus/H.sapiens-wt/NGA/2016/ISTH_0017;Clade II)__AVO03567__GPCmut7 (opt1)
aggagaguccgcucagccagguugcagaagcggcuuagcguguguccuaaucuucucucugcguguagguaggccugugccgcaaacaagcuuaccaugggccagaucaucaccuucuuccaggaggugccccacgucaucgaggaggugaugaacaucgugcugaucgcccucagccugcuggccauccucaaggggaucuacaacgucgcgaccugcggccuguucgggcugguguccuuccuccugcugugcggccgcagcugcuccacgaccuacaaggggguguacgagcuccagacccuggagcuggacauggccagccucaacaugaccaugccgcuguccugcacgaagaacaacagccaccacuacaucauggucggcaacgagaccggccuggagcucacccugaccaacacguccaucaucaaccacaaguucugcaaccugagcgacgcccacaagaagaaccucuacgaccacgcccugauguccaucaucagcaccuuccaccuguccauccccaacuucaaccaguacgaggccaugagcugcgacuucaacgggggcaagaucuccgugcaguacaaccucagccacaccuacgcgaucgacgccgccaaccacugcgggaccaucgccaacggcgugcugcagacguucaugcggauggcguggggcggguccuacaucgcccuggacagcggcaagggguccugggacugcaucaugaccagcuaccaguaccucaucauccagaacaccaccugggaggaccacugccaguucucccgccccagccccaucggcuaccuggggcugcucagccagcggacgcgcgacaucuacaucucccggcgccugcugggcaccuucaccuggacccucagcgacuccgagggcaacgagacgcccgggggcuacugccugacccgguggaugcugaucgaggccgagcucaagugcuucgggaacaccgccgucgccaagugcaacgagaagcacgacgaggaguucugcgacaugcugcgccuguucgacuucaacaagcaggcgauccggcgccucaagacccccgcccagaugagcauccagcugaucaacaaggccgugaacgcccugaucaacgaccagcucaucaugaagaaccaccuccgggacaucaugggcauccccuacugcaacuacuccaaguacugcuaccugaaccacacggugaccgggaagaccagccugccccgcugcugccuggucuccaacggcagcuaccugaacgagacccacuucuccgacgacaucgagcagcaggccgacaacaugaucacggagcuccugcagaaggaguacauggaccggcagggcaagaccccgcuggggcucguggaccuguucguguucagcaccuccuucuaccugaucagcaucuuccugcaccucguccgcaucccgacccaccggcacgugaucggcaagcccugccccaagccccaccgccugaaccacauggggaucugcuccugcggccuguacaagcacccgggggugcccgucaaguggaagcggugaggacuagucccuguucccagagcccacuuuuuuuucuuuuuuugaaauaaaauagccugucuuucagaucuaaaaaaaaaaaaaaaaaaaaaaaaaaaaaaaaaaaaaaaaaaaaaaaaaaaaaaaaaaaaaaaaaaaaaaaaaaaaaaaaaaaaaaaaaaaaaaaaaaaa

SEQ ID NO: 32242 - RNA, 1740 nt, Artificial Sequence
  mRNA product Design a-2 (A100) comprising derived and/or modified sequence from LASV(Lassa virus/H.sapiens-wt/NGA/2018/ISTH_0959;Clade II)__AVV65099__GPCmut7 (opt1)
aggagaguccgcucagccagguugcagaagcggcuuagcguguguccuaaucuucucucugcguguagguaggccugugccgcaaacaagcuuaccaugggccagaucaucaccuucuuccaggaggugccccacgucaucgaggaggugaugaacaucgugcugaucgcccucagccugcuggccauccucaaggggaucuacaacgucgugaccugcggccuguucgggcugguguccuuccuccugcugugcggccgcagcugcuccacgaccuacaagggggucuacgagcuccagacccuggagcuggacauggcgagccucaacaugaccaugccgcuguccugcacgaagaacaacagccaccacuacaucauggugggcaacgagaccggccuggagcucacccugaccaacacguccaucaucaaccacaaguucugcaaccugagcgacgcccacaagaagaaccucuacgaccacgcccugauguccaucaucagcaccuuccaccuguccauccccaacuucaaccaguacgaggccaugagcugcgacuucaacgggggcaagaucuccgugcaguacaaccucagccacgccuacgcgaucgacgccgccaaccacugcgggaccaucgccaacggcguccugcagaccuucaugcggauggcguggggcggguccuacaucgcccuggacagcggcaagggguccugggacugcaucaugacgagcuaccaguaccucaucauccagaacaccaccugggaggaccacugccaguucucccgccccagccccaucggcuaccuggggcugcucagccagcggacccgcgacaucuacaucucccggcgccugcugggcacguucaccuggacccucagcgacuccgagggcaacgagacccccgggggcuacugccugacgcgguggaugcugaucgaggccgagcucaagugcuucgggaacaccgccguggccaagugcaacgagaagcacgacgaggaguucugcgacaugcugcgccuguucgacuucaacaagcaggcgauccggcgccucaagacccccgcccagaugagcauccagcugaucaacaaggccgugaacgcccugaucaacgaccagcucaucaugaagaaccaccuccgggacaucaugggcaucccguacugcaacuacuccaaguacugcuaccugaaccacaccgucacggggaagaccagccugccccgcugcugccugguguccaacggcagcuaccugaacgagacccacuucuccgacgacaucgagcagcaggccgacaacaugaucaccgagcuccugcagaaggaguacaucgaccggcagggcaagacgccccuggggcucguggaccuguucgucuucagcaccuccuucuaccugaucagcaucuuccugcaccucgugaagaucccgacccaccgccacgugaucggcaagcccugccccaagccccaccggcugaaccacauggggaucugcuccugcggccuguacaagcacccggggguccccgugaaguggaagcgcugaggacuagucccuguucccagagcccacuuuuuuuucuuuuuuugaaauaaaauagccugucuuucagaucuaaaaaaaaaaaaaaaaaaaaaaaaaaaaaaaaaaaaaaaaaaaaaaaaaaaaaaaaaaaaaaaaaaaaaaaaaaaaaaaaaaaaaaaaaaaaaaaaaaaa

SEQ ID NO: 32243 - RNA, 1740 nt, Artificial Sequence
  mRNA product Design a-2 (A100) comprising derived and/or modified sequence from LASV(LASV003-NIG-2008;Clade II)__AIT17580__GPCmut7 (opt1)
aggagaguccgcucagccagguugcagaagcggcuuagcguguguccuaaucuucucucugcguguagguaggccugugccgcaaacaagcuuaccaugggccagaucaucaccuucuuccaggaggugccccacgucaucgaggaggugaugaacaucgugcugaucgcccucagccugcuggccauccucaaggggaucuacaacgucgcgaccugcggccuguucgggcugguguccuuccuccugcugugcggccgcagcugcuccacgaccuacaaggggguguacgagcuccagacccuggagcuggacauggccagccucaacaugaccaugccgcuguccugcacgaagaacaacagccaccacuacaucauggucggcaacgagaccggccuggagcucacccugaccaacacguccaucaucaaccacaaguucugcaaccugagcgacgcccacaagaagaaccucuacgaccacgcccugauguccaucaucagcaccuuccaccuguccauccccaacuucaaccaguacgaggccaugagcugcgacuucaacgggggcaagaucuccgugcaguacaaccucagccacaccuacgcgguggacgccgccaaccacugcgggaccaucgccaacggcguccugcagacguucaugcggauggcguggggcggguccuacaucgcccuggacagcggcaagggguccugggacugcaucaugaccagcuaccaguaccucaucauccagaacaccaccugggaggaccacugccaguucucccgccccagccccaucggcuaccuggggcugcucagccagcggacgcgcgacaucuacaucucccggcgccugcugggcaccuucaccuggacccucagcgacuccgagagcaacgagacgccgggcggguacugccugacccgguggaugcugaucgaggccgagcucaagugcuucggcaacaccgccguggccaagugcaacgagaagcacgacgaggaguucugcgacaugcugcgccuguucgacuucaacaagcaggcgauccggcgccucaaggcccccgcccagauguccauccagcugaucaacaaggccgugaacgcccugaucaacgaccagcucaucaugaagaaccaccuccgggacaucauggggauccccuacugcaacuacagcaaguacugcuaccugaaccacaccgucacgggccgcaccucccugccccggugcugccuggugagcaacggguccuaccugaacgagacccacuucagcgacgacaucgagcagcaggcggacaacaugaucaccgagcuccugcagaaggaguacauggaccgccagggcaagacgccccugggccucguggaccuguucgucuucuccaccagcuucuaccugaucuccaucuuccugcaccucgugaagaucccgacccaccggcacgugaucgggaagcccugccccaagccccaccgccugaaccacaugggcaucugcagcugcgggcuguacaagcacccgggcguccccgugaaguggaagcggugaggacuagucccuguucccagagcccacuuuuuuuucuuuuuuugaaauaaaauagccugucuuucagaucuaaaaaaaaaaaaaaaaaaaaaaaaaaaaaaaaaaaaaaaaaaaaaaaaaaaaaaaaaaaaaaaaaaaaaaaaaaaaaaaaaaaaaaaaaaaaaaaaaaaa

SEQ ID NO: 32244 - RNA, 1740 nt, Artificial Sequence
  mRNA product Design a-2 (A100) comprising derived and/or modified sequence from LASV(LASV035-NIG-2009;Clade II)__AIT17588__GPCmut7 (opt1)
aggagaguccgcucagccagguugcagaagcggcuuagcguguguccuaaucuucucucugcguguagguaggccugugccgcaaacaagcuuaccaugggccagaucaucaccuucuuccaggaggugccccacgucaucgaggaggugaugaacaucgugcugaucgcccucagccugcuggccauccucaaggggaucuacaacgucgcgaccugcggccuguucgggcugguguccuuccuccugcugugcggccgcagcugcuccacgaccuacaaggggguguacgagcuccagacccuggagcuggacauggccagccucaacaugaccaugccgcuguccugcacgaagaacaacagccaccacuacaucauggucggcaacgagaccggccuggagcucacccugaccaacacguccaucaucaaccacaaguucugcaaccugagcgacgcccacaagaagaaccucuacgaccacgcccugauguccaucaucagcaccuuccaccuguccauccccaacuucaaccaguacgaggccaugagcugcgacuucaacgggggcaagaucuccgugcaguacaaccucagccacgcguacgccguggacgccgccaaccacugcgggaccaucgcgaacggcguccugcagaccuucaugcggauggccuggggcggguccuacaucgcccuggacagcggcaagggguccugggacugcaucaugacgagcuaccaguaccucaucauccagaacaccaccugggaggaccacugccaguucucccgccccagccccaucggcuaccuggggcugcucagccagcggacccgcgacaucuacaucucccggcgccugcugggcacguucaccuggacccucagcgacuccgagggcaacgagacccccgggggcuacugccugacgcgguggaugcugaucgaggccgagcucaagugcuucgggaacaccgccguggcgaagugcaacgagaagcacgacgaggaguucugcgacaugcugcgccuguucgacuucaacaagcaggccauccggcgccucaaggcccccgcccagaugagcauccagcugaucaacaaggccgugaacgcgcugaucaacgaccagcucaucaugaagaaccaccuccgggacaucaugggcauccccuacugcaacuacuccaaguacugcuaccugaaccacaccgucaccgggaagacgagccugccccgcugcugccugguguccaacggcagcuaccugaacgagacccacuucuccgacgacaucgagcagcaggccgacaacaugaucaccgagcuccugcagaaggaguacaucgaccggcagggcaagaccccgcuggggcucguggaccuguucgucuucagcacguccuucuaccugaucagcaucuuccugcaccucgugaagaucccgacccaccgccacgugaucggcaagcccugccccaagccccaccggcugaaccacauggggaucugcuccugcggccuguacaagcacccggggguccccgugaaguggaagcgcugaggacuagucccuguucccagagcccacuuuuuuuucuuuuuuugaaauaaaauagccugucuuucagaucuaaaaaaaaaaaaaaaaaaaaaaaaaaaaaaaaaaaaaaaaaaaaaaaaaaaaaaaaaaaaaaaaaaaaaaaaaaaaaaaaaaaaaaaaaaaaaaaaaaaa

SEQ ID NO: 32245 - RNA, 1740 nt, Artificial Sequence
  mRNA product Design a-2 (A100) comprising derived and/or modified sequence from LASV(LASV1000-NIG-2009;Clade II)__AIT17782__GPCmut7 (opt1)
aggagaguccgcucagccagguugcagaagcggcuuagcguguguccuaaucuucucucugcguguagguaggccugugccgcaaacaagcuuaccaugggccagaucaucaccuucuuccaggaggugccccacgucaucgaggaggugaugaacaucgugcugaucgcccucagccugcuggccauccucaaggggaucuacaacgucgcgaccugcggccuguucgggcugguguccuuccuccugcugugcggccgcagcugcuccacgaccuacaaggggguguacgagcuccagacccuggagcuggacauggccagccucaacaugaccaugccgcuguccugcacgaagaacaacagccaccacuacaucauggucggcaacgagaccggccuggagcucacccugaccaacacguccaucaucaaccacaaguucugcaaccugagcgacgcccacaagaagaaccucuacgaccacgcccugauguccaucaucagcaccuuccaccuguccauccccaacuucaaccaguacgaggccaugagcugcgacuucaacgggggcaagaucuccgugcaguacaaccucagccacaccuacgcgguggacgccgccaaccacugcgggaccaucgccaacggcguccugcagacguucaugcggauggcguggggcggguccuacaucgcccuggacagcggcaagggguccugggacugcaucaugaccagcuaccaguaccucaucauccagaacaccaccugggaggaccacugccaguucucccgccccagccccaucggcuaccuggggcugcucagccagcggacgcgcgacaucuacaucucccggcgccugcugggcaccuucaccuggacccucagcgacuccgagggcaacgagacgcccgggggcuacugccugacccgguggaugcugaucgaggccgagcucaagugcuucgggaacaccgccguggccaagugcaacgagaagcacgacgaggaguucugcgacaugcugcgccuguucgacuucaacaagcaggcgaucaagcggcucaagacccccgcccagaugagcauccagcugaucaacaaggccgugaacgcccugaucaacgaccagcucaucaugaagaaccaccuccgcgacaucaugggcauccccuacugcaacuacuccaaguacugcuaccugaaccacacggucaccgggaagaccagccugccccggugcugccugguguccaacggcagcuaccugaacgagacccacuucuccgacgacaucgagcagcaggccgacaacaugaucacggagcuccugcagaaggaguacaucgaccgccagggcaagaccccgcuggggcucguggaccuguucgucuucagcaccuccuucuaccugaucagcaucuuccugcaccucgugaagaucccgacccaccggcacguggucggcaagcccugccccaagccccaccgccugaaccacauggggaucugcuccugcggccuguacaagcacccgggggugcccgugaaguggaagcggugaggacuagucccuguucccagagcccacuuuuuuuucuuuuuuugaaauaaaauagccugucuuucagaucuaaaaaaaaaaaaaaaaaaaaaaaaaaaaaaaaaaaaaaaaaaaaaaaaaaaaaaaaaaaaaaaaaaaaaaaaaaaaaaaaaaaaaaaaaaaaaaaaaaaa

SEQ ID NO: 32246 - RNA, 1740 nt, Artificial Sequence
  mRNA product Design a-2 (A100) comprising derived and/or modified sequence from LASV(LASV221-NIG-2010;Clade II)__AIT17624__GPCmut7 (opt1)
aggagaguccgcucagccagguugcagaagcggcuuagcguguguccuaaucuucucucugcguguagguaggccugugccgcaaacaagcuuaccaugggccagaucaucaccuucuuccaggaggugccccacgucaucgaggaggugaugaacaucgugcugaucgcccucagccugcuggccauccucaaggggaucuacaacgucgcgaccugcggccuguucgggcugguguccuuccuccugcugugcggccgcagcugcuccacgaccuacaaggggguguacgagcuccagacccuggagcuggacauggccagccucaacaugaccaugccgcuguccugcacgaagaacaacagccaccacuacaucauggucggcaacgagaccggccuggagcucacccugaccaacacguccaucaucaaccacaaguucugcaaccugagcgacgcccacaagaagaaccucuacgaccacgcccugauguccaucaucagcaccuuccaccuguccauccccaacuucaaccaguacgaggccaugagcugcgacuucaacgggggcaagaucuccgugcaguacaaccucagccacaccuacgcgaucgacgccgccaaccacugcgggaccaucgccaacggcgugcugcagacguucaugcggauggcguggggcggguccuacaucgcccuggacagcggcaagggguccugggacugcaucaugaccagcuaccaguaccucaucauccagaacaccaccugggaggaccacugccaguucucccgccccagccccaucggcuaccuggggcugcucagccagcggacgcgcgacaucuacaucucccggcgccugcugggcaccuucaccuggacccucagcgacuccgagggcaacgagacgcccgggggcuacugccugacccgguggaugcugaucgaggccgagcucaagugcuucgggaacaccgccgucgccaagugcaacgagaagcacgacgaggaguucugcgacaugcugcgccuguucgacuucaacaagcaggcgauccggcgccucaagacccccgcccagaugagcauccagcugaucaacaaggccgugaacgcccugaucaacgaccagcucaucaugaagaaccaccuccgggacaucaugggcauccccuacugcaacuacuccaaguacugcuaccugaaccacacggugaccgggaagaccagccugccccgcugcugccuggucuccaacggcagcuaccugaacgagacccacuucuccgacgacaucgagcagcaggccgacaacaugaucacggagaugcuccagaaggaguacauggaccggcagggcaagaccccgcuggggcugguggaccucuucguguucagcaccuccuucuaccugaucagcaucuuccugcaccuggucaagaucccgacccaccgccacgugaucggcaagcccugccccaagccccaccggcucaaccacauggggaucugcuccugcggccuguacaagcacccgggggugcccgucaaguggaagcgcugaggacuagucccuguucccagagcccacuuuuuuuucuuuuuuugaaauaaaauagccugucuuucagaucuaaaaaaaaaaaaaaaaaaaaaaaaaaaaaaaaaaaaaaaaaaaaaaaaaaaaaaaaaaaaaaaaaaaaaaaaaaaaaaaaaaaaaaaaaaaaaaaaaaaa

SEQ ID NO: 32247 - RNA, 1740 nt, Artificial Sequence
  mRNA product Design a-2 (A100) comprising derived and/or modified sequence from LASV(LASV237-NIG-2010;Clade II)__AIT17638__GPCmut7 (opt1)
aggagaguccgcucagccagguugcagaagcggcuuagcguguguccuaaucuucucucugcguguagguaggccugugccgcaaacaagcuuaccaugggccagaucaucaccuucuuccaggaggugccccacgucaucgaggaggugaugaacaucgugcugaucgcccucagccugcuggccauccucaaggggaucuacaacgucgcgaccugcggccuguucgggcugguguccuuccuccugcugugcggccgcagcugcuccacgaccuacaaggggguguacgagcuccagacccuggagcuggacauggccagccucaacaugaccaugccgcuguccugcacgaagaacaacagccaccacuacaucauggucggcaacgagaccggccuggagcucacccugaccaacacguccaucaucaaccacaaguucugcaaccugagcgacgcccacaagaaggaccucuacgaccacgcccugauguccaucaucagcaccuuccaccuguccauccccaacuucaaccaguacgaggccaugagcugcgacuucaacgggggcaagaucuccgugcaguacaaccucagccacaccuacgcgguggacgccgccaaccacugcgggaccaucgccaacggcguccugcagacguucaugcggauggcguggggcggguccuacaucgcccuggacagcggcaagggguccugggacugcaucaugaccagcuaccaguaccucaucauccagaacaccaccugggaggaccacugccaguucucccgccccagccccaucggcuaccuggggcugcucagccagcggacgcgcgacaucuacaucucccggcgccugcugggcaccuucaccuggacccucagcgacuccgagggcaacgagacgcccgggggcuacugccugacccgguggaugcugaucgaggccgagcucaagugcuucgggaacaccgccguggccaagugcaacgagaagcacgacgaggaguucugcgacaugcugcgccuguucgacuucaacaagcaggcgauccggcgccucaagacccccgcccagaugagcauccagcugaucaacaaggccgugaacgcccugaucaacgaccagcucaucaugaagaaccaccuccgggacaucaugggcauccccuacugcaacuacuccaaguacugcuaccugaaccacacggucaccgggaagaccagccugccccgcugcugccugguguccaacggcagcuaccugaacgagacccacuucuccgacgacaucgagcagcaggccgacaacaugaucacggagcuccugcagaaggaguacauggaccggcagggcaagaccccgcuggggcucguggaccuguucgucuucagcaccuccuucuaccugaucagcaucuuccugcaccucaucaagaucccgacccaccgccacaucacgggcaagcccugccccaagccccaccggcugaaccacauggggaucugcuccugcggccuguacaagcacccgggggugcccgugaaguggaagcgcugaggacuagucccuguucccagagcccacuuuuuuuucuuuuuuugaaauaaaauagccugucuuucagaucuaaaaaaaaaaaaaaaaaaaaaaaaaaaaaaaaaaaaaaaaaaaaaaaaaaaaaaaaaaaaaaaaaaaaaaaaaaaaaaaaaaaaaaaaaaaaaaaaaaaa

SEQ ID NO: 32248 - RNA, 1740 nt, Artificial Sequence
  mRNA product Design a-2 (A100) comprising derived and/or modified sequence from LASV(LASV253-NIG-2011;Clade II)__AIT17670__GPCmut7 (opt1)
aggagaguccgcucagccagguugcagaagcggcuuagcguguguccuaaucuucucucugcguguagguaggccugugccgcaaacaagcuuaccaugggccagaucaucaccuucuuccaggaggugccccacgucaucgaggaggugaugaacaucgugcugaucgcccucagccugcuggccauccucaaggggaucuacaacgucgcgaccugcggccuguucgggcugguguccuuccuccugcugugcggccgcagcugcuccacgaccuacaaggggguguacgagcuccagacccuggagcuggacauggccagccucaacaugaccaugccgcuguccugcacgaagaacaacagccaccacuacaucauggucggcaacgagaccggccuggagcucacccugaccaacacguccaucaucaaccacaaguucugcaaccugagcgacgcccacaagaagaaccucuacgaccacgcccugauguccaucaucagcaccuuccaccuguccauccccaacuucaaccaguacgaggccaugagcugcgacuucaacgggggcaagaucuccgugcaguacaaccucagccacaccuacgcgguggacgccgccaaccacugcgggaccaucgccaacggcguccugcagacguucaugcggauggcguggggcggguccuacaucgcccuggacagcggcaagggguccugggacugcaucaugaccagcuaccaguaccucaucauccagaacaccaccugggaggaccacugccaguucucccgccccagccccaucggcuaccuggggcugcucagccagcggacgcgcgacaucuacaucucccggcgccugcugggcaccuucaccuggacccucagcgacuccgagggcaacgagacgcccgggggcuacugccugacccgguggaugcugaucgaggccgagcucaagugcuucgggaacaccgccguggccaagugcaacgagaagcacgacgaggaguucugcgacaugcugcgccuguucgacuucaacaagcaggcgauccggcgccucaaggcccccgcccagaugagcauccagcugaucaacaaggccgugaacgcccugaucaacgaccagcucaucaugaagaaccaccuccgggacaucaugggcaucccguacugcaacuacuccaaguacugcuaccugaaccacaccgucacggggcgcaccagccugccccggugcugccugguguccaacggcagcuaccugaacgagacccacuucuccgacgacaucgagcagcaggcggacaacaugaucaccgagcuccugcagaaggaguacaucgaccgccagggcaagacgccccuggggcucguggaccuguucgucuucagcaccuccuucuaccugaucagcaucuuccugcaccucgugaagaucccgacccaccggcacaucaucggcaagcccugccccaagccccaccgccugaaccacauggggaucugcuccugcggccuguacaagcacccgggggugcccgucaaguggaagcggugaggacuagucccuguucccagagcccacuuuuuuuucuuuuuuugaaauaaaauagccugucuuucagaucuaaaaaaaaaaaaaaaaaaaaaaaaaaaaaaaaaaaaaaaaaaaaaaaaaaaaaaaaaaaaaaaaaaaaaaaaaaaaaaaaaaaaaaaaaaaaaaaaaaaa

SEQ ID NO: 32249 - RNA, 1740 nt, Artificial Sequence
  mRNA product Design a-2 (A100) comprising derived and/or modified sequence from LASV(LASV254-NIG-2011;Clade II)__AIT17674__GPCmut7 (opt1)
aggagaguccgcucagccagguugcagaagcggcuuagcguguguccuaaucuucucucugcguguagguaggccugugccgcaaacaagcuuaccaugggccagaucaucaccuucuuccaggaggugccccacgucaucgaggaggugaugaacaucgugcugaucgcccucagccugcuggccauccucaaggggaucuacaacgucgcgaccugcggccuguucgggcugguguccuuccuccugcugugcggccgcagcugcuccacgaccuacaaggggguguacgagcuccagacccuggagcuggacaugaccaaccucaacaugacgaugccgcugagcugcaccaagaacaacucccaccacuacaucauggucggcaacgagaccggccuggagcucacccugacgaacaccagcaucaucaaccacaaguucugcaaccuguccgacgcccacaagaagaaccucuacaaccacgcccugaugagcaucaucuccaccuuccaccugagcauccccaacuucaaccaguacgaggccauguccugcgacuucaacgggggcaagaucagcgugcaguacaaccucucccacagcuacgccguggacgcggccaaccacugcgggaccaucgccaacggcguccugcagacguucaugcggauggccuggggcggguccuacaucgcgcuggacagcggcaaggggaacugggacugcaucaugaccuccuaccaguaccucaucauccagaacaccaccugggaggaccacugccaguucagccgccccucccccaucggcuaccuggggcugcucagccagcggacgcgcgacaucuacaucagccggcgccugcugggcaccuucaccuggacccucuccgacagcgagggcaacgagacgcccgggggcuacugccugacccgguggaugcugaucgaggccgagcucaagugcuucgggaacaccgccguggccaagugcaacgagaagcacgacgaggaguucugcgacaugcugcgccuguucgacuucaacaagcaggccauccggcgccucaagacccccgcgcaggccaacauccagcugaucaacaaggccgugaacgcccugaucaacgaccagcucaucaugaagaaccaccuccgggacaucaugggcauccccuacugcaacuacuccaaguacugcuaccugaaccacacggucaccgggaagaccagccugccccgcugcugccugguguccaacggcagcuaccugaacgagacccacuucuccgacgacaucgagcagcaggccgacaacaugaucacggagcuccugcagaaggaguacauggaccggcagggcaagaccccgcuggggcucguggaccuguucgucuucagcaccuccuucuaccugaucagcaucuuccugcaccucgugaagaucccgacccaccgccacgugaucggcaagcccugccccaagccccaccggcugaaccacauggggaucugcuccugcggccuguacaagcacccggggguccccgugaaguggaagcgcugaggacuagucccuguucccagagcccacuuuuuuuucuuuuuuugaaauaaaauagccugucuuucagaucuaaaaaaaaaaaaaaaaaaaaaaaaaaaaaaaaaaaaaaaaaaaaaaaaaaaaaaaaaaaaaaaaaaaaaaaaaaaaaaaaaaaaaaaaaaaaaaaaaaaa

SEQ ID NO: 32250 - RNA, 1740 nt, Artificial Sequence
  mRNA product Design a-2 (A100) comprising derived and/or modified sequence from LASV(Nig08-A19;Clade III)__ADU56618__GPCmut7 (opt1)
aggagaguccgcucagccagguugcagaagcggcuuagcguguguccuaaucuucucucugcguguagguaggccugugccgcaaacaagcuuaccaugggccagaucgugaccuucuuccaggaggucccccacgugaucgaggaggugaugaacaucguccugaucgcccucagcauccuggccauccugaaggggcucuacaacaucgcgaccugcggccugaucgggcuggugacguuccuccugcuguccggccgcagcugcuccaugaccuacaaggggguguacgagcuccagacccuggagcugaacaugaacacccucaacaugacgaugccgcugagcugcaccaagaacaacucccaccacuacaucauggucggcaacgagaccggccuggagcucacccugacgaacaccagccugcuccaccacaaguucugcaaccuguccgacgcccacaagaagaaccuguacgaccacacccucaugagcaucaucuccaccuuccaccugagcauccccaacuucaaccaguacgaggccauguccugcgacuucaacgggggcaagaucacggugcaguacaaccugagccacuccuacgccaucgacgccgcgaaccacugcgggaccguggccaacggcguccuccagaccuucaugcggauggccuggggcgggagcuacaucgcccuggacuccggccgcgggaagugggacugcaucaugaccagcuaccaguaccugaucauccagaacacgaccugggaggaccacugccaguucucccggcccagccccaucggcuaccucgggcugcugucccagcgcacccgggacaucuacaucagccgccggcuccugggcaccuucacguggacccugagcgacuccgagggcaacgagacccccgggggcuacugccucacccgcuggaugcugaucgaggcggagcugaagugcuucgggaacacggccguggccaagugcaacgagaagcacgacgaggaguucugcgacaugcuccggcuguucgacuucaacaagcaggccauccgccggcugaaggcccccgcgcagaugagcauccagcucaucaacaaggccgugaacgcccugaucaacgaccagcugaucaugaagaaccaccuccgcgacaucaugggcauccccuacugcaacuacuccaaguacugcuaccugaaccacaccagcaccgggcggaccucccugccccgcugcugccucgucagcaacggcuccuaccugaacgagacgcacuucagcgacgacaucgagcagcaggccgacaacaugaucaccgagaugcugcagaaggaguaccucgaccggcagggcaagaccccgcuggggcugguggaccuguucguguucuccaccagcuucuaccucaucuccaucuuccugcaccuggucaagaucccgacgcaccgccacaucgugggcaagcccugccccaagccccaccggcucaaccacauggggaucugcagcugcggccuguacaagcagccgggggugcccguccgcuggaagcggugaggacuagucccuguucccagagcccacuuuuuuuucuuuuuuugaaauaaaauagccugucuuucagaucuaaaaaaaaaaaaaaaaaaaaaaaaaaaaaaaaaaaaaaaaaaaaaaaaaaaaaaaaaaaaaaaaaaaaaaaaaaaaaaaaaaaaaaaaaaaaaaaaaaaa

SEQ ID NO: 32251 - RNA, 1743 nt, Artificial Sequence
  mRNA product Design a-2 (A100) comprising derived and/or modified sequence from LASV(G1180-SLE-2010;Clade IV)__AIT17168__GPCmut7 (opt1)
aggagaguccgcucagccagguugcagaagcggcuuagcguguguccuaaucuucucucugcguguagguaggccugugccgcaaacaagcuuaccaugggccagaucgugaccuucuuccaggaggucccccacgugaucgaggaggugaugaacaucguccugaucgcccucagcauccuggccgugcugaaggggcucuacaacuucgcgaccugcggccugguggggcugcucaccuuccugcugcucugcggccgcuccugcaccgccagccgguacaagggggucuacgagcugcagacccuggagcucaacauggagacccugaacaugacgaugccgcuguccugcaccaagaacaacagccaccacuacaucauggugggcaacgagaccggccucgagcugacccugacgaacaccuccaucaucaaccacaaguucugcaaccucagcgacgcccacaagaagaaccuguacgaccacgcccugauguccaucaucagcaccuuccaccucuccauccccaacuucaaccaguacgaggccaugagcugcgacuucaacgggggcaagaucuccgugcaguacaaccugagccacuccuacgcgggggacgccgccaaccacugcggcaccgucgccaacggggugcugcagacguucaugcgcauggcguggggcggcagcuacaucgcccucgacuccgggcacggcagcugggacugcaucaugaccuccuaccaguaccugaucauccagaacaccaccugggaggaccacugccaguucagccggcccucccccaucggguaccugggccuccugagccagcgcacgcgggacaucuacaucagccgccggcugcucggcaccuucaccuggacccuguccgacagcgaggggaaggacacgccgggcggguacugccugacccgcuggaugcucaucgaggccgagcugaagugcuucggcaacaccgccguggccaagugcaacgagaagcacgacgaggaguucugcgacaugcugcggcuguucgacuucaacaagcaggcgauccagcgccugaaggcccccgcccagauguccauccagcugaucaacaaggccgucaacgcccucaucaacgaccagcugaucaugaagaaccaccuccgggacaucauggggauccccuacugcaacuacagcaaguacugcuaccucaaccacaccacgaccggcaagaccucccugcccaagugcugccuggugagcaacggcuccuaccucaacgagacccacuucagcgacgacaucgagcagcaggcggacaacaugaucacggagaugcugcagaaggaguacauggagcgccaggggaagacgccccugggccucguggaccuguucgucuucuccaccagcuucuaccugaucuccaucuuccugcaccucgugaagaucccgacccaccggcacaucgugggcaagagcugccccaagccccaccgccugaaccacauggggaucugcuccugcgggcuguacaagcagcccggcgucccggugaaguggaagcggugaggacuagucccuguucccagagcccacuuuuuuuucuuuuuuugaaauaaaauagccugucuuucagaucuaaaaaaaaaaaaaaaaaaaaaaaaaaaaaaaaaaaaaaaaaaaaaaaaaaaaaaaaaaaaaaaaaaaaaaaaaaaaaaaaaaaaaaaaaaaaaaaaaaaa

SEQ ID NO: 32252 - RNA, 1743 nt, Artificial Sequence
  mRNA product Design a-2 (A100) comprising derived and/or modified sequence from LASV(G1442-SLE-2011;Clade IV)__AIT17180__GPCmut7 (opt1)
aggagaguccgcucagccagguugcagaagcggcuuagcguguguccuaaucuucucucugcguguagguaggccugugccgcaaacaagcuuaccaugggccagaucgugaccuucuuccaggaggucccccacgugaucgaggaggugaugaacaucguccugaucgcccucagcauccuggccgugcugaaggggcucuacaacguggcgaccugcggccugaucgggcuggucacguuccuccugcugugcggccgcuccugcaccaccacccucuacaaggggguguacgagcugcagacgcuggagcucaacauggagacccugaacaugaccaugccgcugagcugcaccaagaacaacucccaccacuacauccgggugggcaacgagacgggccucgagcugacccugaccaacaccagcaucaucaaccacaaguucugcaaccucuccgacgcccacaagaagaaccuguacgaccacgcccugaugagcaucaucuccacguuccaccucagcauccccaacuucaaccaguacgaggccauguccugcgacuucaacgggggcaagaucagcguccaguacaaccugucccacagcuacgccggggacgcggccaaccacugcggcaccguggccaacggggugcugcagaccuucaugcgcauggccuggggcggcuccuacaucgcgcucgacagcgggcggggcaacugggacugcaucaugaccuccuaccaguaccugaucauccagaacacgaccugggacgaccacugccaguucagccgccccucccccaucggguaccugggccuccugagccagcggacccgcgacgucuacaucucccggcgccugcucggcaccuucacguggacccugagcgacagcgaggggaaggacaccccgggcggguacugccugacccgguggaugcucaucgaggccgagcugaagugcuucggcaacacggccguggccaagugcaacgagaagcacgacgaggaguucugcgacaugcugcgccucuucgacuucaacaagcaggccauccagcggcugaaggcgcccgcccagauguccauccagcugaucaacaaggccgugaacgcccucaucaacgaccagcugaucaugaagaaccaccuccgcgacaucauggggauccccuacugcaacuacagcaaguacugcuaccugaacaacaccgccaccggcaagaccucccugcccaagugcugccugaucagcaacggcuccuaccucaacgagacgcacuucagcgacgacaucgagcaggaggcggacaacaugaucaccgagaugcugcagaaggaguacauggagcggcaggggaagacgccccugggccucgucgaccuguucguguucuccaccagcuucuaccugaucuccaucuuccugcaccucgugaagaucccgacccaccgccacaucgucggcaagagcugccccaagccccaccggcugaaccacauggggaucugcuccugcgggcuguacaagcagcccggcgugccggugcgcuggaagcggugaggacuagucccuguucccagagcccacuuuuuuuucuuuuuuugaaauaaaauagccugucuuucagaucuaaaaaaaaaaaaaaaaaaaaaaaaaaaaaaaaaaaaaaaaaaaaaaaaaaaaaaaaaaaaaaaaaaaaaaaaaaaaaaaaaaaaaaaaaaaaaaaaaaaa

SEQ ID NO: 32253 - RNA, 1743 nt, Artificial Sequence
  mRNA product Design a-2 (A100) comprising derived and/or modified sequence from LASV(G3010-SLE-2013;Clade IV)__AIT17344__GPCmut7 (opt1)
aggagaguccgcucagccagguugcagaagcggcuuagcguguguccuaaucuucucucugcguguagguaggccugugccgcaaacaagcuuaccaugggccagaucgugaccuucuuccaggaggucccccacgugaucgaggaggugaugaacaucguccugaucgcccucagcauccuggccgugcugaaggggcucuacaacuucgcgaccugcggccugguggggcuggucacguuccuccugcugugcggccgcuccugcaccaccagccucuacaaggggguguacgagcugcagacccuggagcucaacauggagacgcugaacaugaccaugccgcuguccugcaccaagaacaacagccaccacuacaucauggugggcaacgagaccggccucgagcugacgcugaccaacaccuccaucaucaaccacaaguucugcaaccucagcgacgcccacaagaagaaccuguacaaccacgcccugauguccaucaucagcaccuuccaccucuccauccccaacuucaaccaguacgaggccaugagcugcgacuucaacgggggcaagaucuccguccaguacaaccugagccacuccuacgccggggacgcggccagccacugcggcacgguggccaacggggugcugcagaccuucaugcggauggccuggggcggcuccuacaucgcgcucgacagcggguacggcaagugggacugcaucaugaccuccuaccaguaccugaucauccagaacaccacgugggaggaccacugccaguucagccgccccucccccaucggguaccugggccuccugagccagcggacccgcgacaucuacaucagccggcgccugcucggcaccuucaccuggacgcuguccgacagcgaggggaaggacaccccgggcggguacugccugacccgguggaugcucaucgaggccgagcugaagugcuucggcaacaccgccgucgccaagugcaacgagaagcacgacgaggaguucugcgacaugcugcgccucuucgacuucaacaagcaggccauccagcggcugaagacgcccgcgcagauguccauccagcugaucaacaaggccgugaacgcccucaucaacgaccagcugaucaugaagaaccaccuccgcgacaucauggggauccccuacugcaacuacagcaaguacugcuaccugaaccacaccaccaccggcaagacgucccugcccaagugcugccuggugagcaacggcuccuaccucaacgagacccacuucagcgacgacaucgagcagcaggccgacaacaugaucaccgagaugcugcagaaggaguacauggagcggcaggggaagacgccccugggccucgucgaccuguucguguucuccaccagcuucuaccugaucuccaucuuccugcaccucgugaagaucccgacccaccgccacaucgucggcaagagcugccccaagccccaccggcugaaccacauggggaucugcuccugcgggcuguacaagcagcccggcgugccggugcgcuggaagcggugaggacuagucccuguucccagagcccacuuuuuuuucuuuuuuugaaauaaaauagccugucuuucagaucuaaaaaaaaaaaaaaaaaaaaaaaaaaaaaaaaaaaaaaaaaaaaaaaaaaaaaaaaaaaaaaaaaaaaaaaaaaaaaaaaaaaaaaaaaaaaaaaaaaaa

SEQ ID NO: 32254 - RNA, 1743 nt, Artificial Sequence
  mRNA product Design a-2 (A100) comprising derived and/or modified sequence from LASV(G502-SLE-2009;Clade IV)__AIT17126__GPCmut7 (opt1)
aggagaguccgcucagccagguugcagaagcggcuuagcguguguccuaaucuucucucugcguguagguaggccugugccgcaaacaagcuuaccaugggccagaucgugaccuucuuccaggaggucccccacgugaucgaggaggugaugaacaucguccugaucgcccucagcauccuggccgugcugaaggggcucuacaacuucgcgaccugcggccugguggggcugcucacguuccugcugcucugcggccgcuccugcaccaccgggcuguacaagggcgucuacgagcugcagacccucgagcugaacauggagacgcugaacaugaccaugccgcucagcugcaccaagaacaacucccaccacuacaucauggugggcaacgagaccgggcuggagcugacgcucaccaacaccagcaucaucaaccacaaguucugcaaccuguccgacgcccacaagaagaaccuguacgaccacgcccucaugagcaucaucuccaccuuccaccugagcauccccaacuucaaccaguacgaggccauguccugcgacuucaacggcgggaagaucagcgugcaguacaaccugucccacagcuacgccggcgacgcggccgaccacugcgggacggucgccaacggcgugcuccagaccuucaugcggauggccuggggcggguccuacaucgcgcuggacagcggccgcgggcggugggacugcaucaugaccuccuaccaguaccugaucauccagaacaccacgugggaggaccacugccaguucagccgccccucccccaucggcuaccucggccugcugagccagcggacccgcgacaucuacaucucccggcgccuccuggggaccuucaccuggacgcugagcgacagcgagggcaaggacacccccgggggcuacugccucacccgguggaugcugaucgaggccgagcugaagugcuucgggaacaccgccguggccaagugcaacgagaagcacgacgaggaguucugcgacaugcuccgccuguucgacuucaacaagcaggccauccagcggcugaaggcgcccgcccagauguccauccagcucaucaacaaggccgucaacgcccugaucaacgaccagcuggugaugaagaaccaccuccgcgacaucaugggcauccccuacugcaacuacagccgguacugcuaccugaaccacacgaccaccggccgcaccucccugcccaagugcugccucgugagcaacggguccuaccugaacgagacgcacuucagcgacgacaucgagcagcaggccgacaacaugaucaccgagaugcugcagaaggaguacauggagcggcagggcaagaccccgcucgggcuggucgaccuguucguguucuccaccagcuucuaccugaucuccaucuuccuccaccuggugaagaucccgacgcaccgccacaucgucggcaagagcugccccaagccccaccggcugaaccacauggggaucugcuccugcggccucuacaagcagcccggcgugccggugaaguggaagcgcugaggacuagucccuguucccagagcccacuuuuuuuucuuuuuuugaaauaaaauagccugucuuucagaucuaaaaaaaaaaaaaaaaaaaaaaaaaaaaaaaaaaaaaaaaaaaaaaaaaaaaaaaaaaaaaaaaaaaaaaaaaaaaaaaaaaaaaaaaaaaaaaaaaaaa

SEQ ID NO: 32255 - RNA, 1743 nt, Artificial Sequence
  mRNA product Design a-2 (A100) comprising derived and/or modified sequence from LASV(G733-SLE-2010;Clade IV)__AIT17154__GPCmut7 (opt1)
aggagaguccgcucagccagguugcagaagcggcuuagcguguguccuaaucuucucucugcguguagguaggccugugccgcaaacaagcuuaccaugggccagaucgugaccuucuuccaggaggucccccacgugaucgaggaggugaugaacaucguccugaucgcccucagcauccuggccgugcugaaggggcucuacaacuucgcgaccugcggcaucguggggcuggucuccuuccugcuccugugcggccgcagcugcacgaccucccuguacaaggggguguacgagcuccagacccuggagcugaacauggagacccucaacaugacgaugccgcugagcugcaccaagaacaacucccaccacuacaucauggugggcaacgagaccggccuggagcucacccugacgaacaccagcaucaucaaccacaaguucugcaaccuguccgacgcccacaagaagaaccucuacgaccacgcccugaugagcaucaucuccaccuuccaccugagcauccccaacuucaaccaguacgaggccauguccugcgacuucaacgggggcaagaucagcguccaguacaaccucucccacagcuacgccggggacgcggccaaccacugcggcaccaucgccaacggggugcugcagacguucaugcggauggccuggggcggcuccuacaucgcgcuggacagcgggcgcgaccggugggacugcaucaugaccuccuaccaguaccucaucauccagaacaccaccugggaggaccacugccaguucagccgccccucccccaucggcuaccuggggcugcucagccagcggacgcgcgacaucuacaucagccggcgccugcugggcaccuucaccuggacccucuccgacagcgagggcaaggacacgcccgggggcuacugccugacccgguggaugcugaucgaggccgagcucaagugcuucgggaacaccgccguggccaagugcaacgagaagcacgacgaggaguucugcgacaugcugcgccuguucgacuucaacaagcaggccauccagcggcucaaggcgcccgcccagauguccauccagcugaucaacaaggccgucaacgcccugaucaacgaccagcucaucaugaagaaccaccuccgcgacaucaugggcauccccuacugcaacuacagcaaguacugcuaccugaaccacaccacgaccgggaagaccucccugcccaagugcugccuggugagcaacggcuccuaccugaacgagacccacuucagcgacgacaucgagcagcaggccgacaacaugaucacggagaugcuccagaaggaguacauggagcggcagggcaagaccccgcuggggcugguggaccucuucgucuucuccaccagcuucuaccugaucuccaucuuccugcaccuggugaagaucccgacccaccgccacguggucggcaagagcugccccaagccccaccggcucaaccacauggggaucugcuccugcggccuguacgggcagcccggcgugccggugaaguggaagcgcugaggacuagucccuguucccagagcccacuuuuuuuucuuuuuuugaaauaaaauagccugucuuucagaucuaaaaaaaaaaaaaaaaaaaaaaaaaaaaaaaaaaaaaaaaaaaaaaaaaaaaaaaaaaaaaaaaaaaaaaaaaaaaaaaaaaaaaaaaaaaaaaaaaaaa

SEQ ID NO: 32256 - RNA, 1743 nt, Artificial Sequence
  mRNA product Design a-2 (A100) comprising derived and/or modified sequence from MOPV/LASV reassortant(IGS-1;Clade IV)__AFY05576__GPCmut7 (opt1)
aggagaguccgcucagccagguugcagaagcggcuuagcguguguccuaaucuucucucugcguguagguaggccugugccgcaaacaagcuuaccaugggccagaucgugaccuucuuccaggaggucccccacgugaucgaggaggugaugaacaucguccugaucgcccucagcgugcuggccgugcugaaggggcucuacaacuucgcgaccugcggccuggucgggcuggugacguuccuccugcugugcggccgcuccugcaccaccagccucuacaaggggguguacgagcugcagacccuggagcucaacauggagacgcugaacaugaccaugccgcuguccugcaccaagaacaacagccaccacuacaucauggucggcaacgagaccggccucgagcugacgcugaccaacaccuccaucaucaaccacaaguucugcaaccucagcgacgcccacaagaagaaccuguacgaccacgcccugauguccaucaucagcaccuuccaccucuccauccccaacuucaaccaguacgaggccaugagcugcgacuucaacgggggcaagaucuccgugcaguacaaccugagccacuccuacgccggggacgcggccaaccacugcggcacgguggccaacgggguccugcagaccuucaugcggauggccuggggcggcagcuacaucgcgcucgacuccgggcgcggcaacugggacugcaucaugaccagcuaccaguaccugaucauccagaacaccacgugggaggaccacugccaguucucccggcccagccccaucggguaccugggccuccugucccagcgcacccgggacaucuacaucagccgccggcugcucggcaccuucaccuggacgcugagcgacuccgagggggaggacaccccgggcggguacugccugacccgcuggaugcucaucgaggccgagcugaagugcuucggcaacaccgccguggccaagugcaacgagaagcacgacgaggaguucugcgacaugcugcggcuguucgacuucaacaagcaggccauccagcgccugaaggcgcccgcccagaugagcauccagcugaucaacaaggccgugaacgcccucaucaacgaccagcugaucaugaagaaccaccuccgggacaucauggggauccccuacugcaacuacuccaaguacugcuaccucaaccacacgaccaccggccgcaccagccugcccaagugcugccuggucuccaacggcagcuaccucaacgagacgcacuucuccgacgacaucgagcagcaggccgacaacaugaucaccgagaugcugcagaaggaguacauggagcggcaggggaagacgccccugggccucguggaccuguucguguucagcaccuccuucuaccugaucagcaucuuccugcaccucgucaagaucccgacccaccgccacaucguggggaaguccugccccaagccccaccggcugaaccacaugggcaucugcagcugcgggcuguacaagcagcccggcgugccggucaaguggaagcgcugaggacuagucccuguucccagagcccacuuuuuuuucuuuuuuugaaauaaaauagccugucuuucagaucuaaaaaaaaaaaaaaaaaaaaaaaaaaaaaaaaaaaaaaaaaaaaaaaaaaaaaaaaaaaaaaaaaaaaaaaaaaaaaaaaaaaaaaaaaaaaaaaaaaaa

SEQ ID NO: 32257 - RNA, 1743 nt, Artificial Sequence
  mRNA product Design a-2 (A100) comprising derived and/or modified sequence from LASV(LM765-SLE-2012;Clade IV)__AIT17814__GPCmut7 (opt1)
aggagaguccgcucagccagguugcagaagcggcuuagcguguguccuaaucuucucucugcguguagguaggccugugccgcaaacaagcuuaccaugggccagaucgugaccuucuuccaggaggucccccacgugaucgaggaggugaugaacaucguccugaucgcccucagcauccuggccgugcugaaggggcucuacaacuucgcgaccugcggccugguggggcuggucacguuccuccugcugugcggccgcuccugcaccaccagccucuacaaggggguguacgagcugcagacccuggagcucaacauggagacgcugaacaugaccaugccgcuguccugcaccaagaacaacagccaccacuacaucauggugggcaacgagaccggccucgagcugacgcugaccaacaccuccaucaucgaccacaaguucugcaaccucagcgacgcccaccggaagaaccuguacgaccacgcccugauguccaucaucagcaccuuccaccucuccauccccaacuucaaccaguacgaggccaugagcugcgacuucaacgggggcaagaucuccguccaguacaaccugagccacuccuacgccaaggacgcggccgaccacugcgggacgguggccaacggcgugcugcagaccuucaugcgcauggccuggggcgggagcuacaucgcgcucgacuccggccgggggcgcugggacugcaucaugaccagcuaccaguaccugaucauccagaacaccacgugggaggaccacugccaguucucccggcccagccccaucggcuaccuggggcuccugucccagcgcacccgggacaucuacaucagccgccggcugcucggcaccuucaccuggacgcugagcgacuccgagggcaaggacacccccgggggcuacugccugacccgcuggaugcucaucgaggccgagcugaagugcuucgggaacaccgccgucgccaagugcaacgagaagcacgacgaggaguucugcgacaugcugcggcuguucgacuucaacaagcaggccauccagcgccugaaggcgcccgcccagaugagcauccagcugaucaacaaggccgugaacgcccucaucaacgaccagcugaucaugaagaaccaccuccgggacaucaugggcauccccuacugcaacuacuccaaguacugcuaccucaaccacacgaccaccgggaagaccagccugcccaagugcugccugguguccaacggcagcuaccucaacgagacgcacuucuccgacgacaucgagcagcaggccgacaacaugaucaccgagaugcugcagaaggaguacauggagcgccagggcaagaccccgcuggggcucgucgaccuguucguguucagcaccuccuucuaccugaucagcaucuuccugcaccucgugaagaucccgacgcaccggcacaucgucggcaagcccugccccaagccccaccgccugaaccacauggggaucugcuccugcggccuguacaagcagccgggggugcccgugaaguggaagcggugaggacuagucccuguucccagagcccacuuuuuuuucuuuuuuugaaauaaaauagccugucuuucagaucuaaaaaaaaaaaaaaaaaaaaaaaaaaaaaaaaaaaaaaaaaaaaaaaaaaaaaaaaaaaaaaaaaaaaaaaaaaaaaaaaaaaaaaaaaaaaaaaaaaaa

SEQ ID NO: 32258 - RNA, 1743 nt, Artificial Sequence
  mRNA product Design a-2 (A100) comprising derived and/or modified sequence from LASV(LM776-SLE-2012;Clade IV)__AIT17824__GPCmut7 (opt1)
aggagaguccgcucagccagguugcagaagcggcuuagcguguguccuaaucuucucucugcguguagguaggccugugccgcaaacaagcuuaccaugggccagaucgugaccuucuuccaggaggucccccacgugaucgaggaggugaugaacaucguccugaucgcccucagcauccuggccgugcugaaggggcucuacaacuucgcgaccugcggccugguggggcuggucacguuccuccugcugugcggccgcuccugcaccaccagcguguacaaggggguguacgagcuccagacccuggagcugaacauggagacgcucaacaugaccaugccgcuguccugcaccaagaacaacagccaccacuacaucauggucggcaacgagaccggccuggagcucacgcugaccaacaccuccaucaucaaccacaaguucugcaaccugagcgacgcccacaagaagaaccucuacgaccacgcccugauguccaucaucagcaccuuccaccuguccauccccaacuucaaccaguacgaggccaugagcugcgacuucaacgggggcaagaucuccgugcaguacaaccucagccacuccuacgccggggacgcggccaaccacugcggcacgguggccaacgggguccugcagaccuucaugcggauggccuggggcggcagcuacaucgcgcuggacuccgggcacggcaagugggacugcaucaugaccagcuaccaguaccucaucauccagaacaccacgugggaggaccacugccaguucucccgccccagccccaucggguaccugggccugcucucccagcggacccgcgacaucuacaucagccggcgccugcugggcaccuucaccuggacgcucagcgacuccgaggggaaggacaccccgggcggguacugccugacccgguggaugcugaucgaggccgagcucaagugcuucggcaacaccgccguggccaagugcaacgagaagcacgacgaggaguucugcgacaugcugcgccuguucgacuucaacaagcaggccauccagcggcucaaggcgcccgcccagaugagcauccagcugaucaacaaggccgugaacgcccugaucaacgaccagcucaucaugaagaaccaccuccgcgacaucauggggauccccuacugcaacuacuccaaguacugcuaccugaaccacacgaccaccggcaagaccagccugcccaagugcugccuggucuccaacggcagcuaccugaacgagacgcacuucuccgacgacaucgagcagcaggccgacaacaugaucaccgagaugcuccagaaggaguacauggagcggcaggggaagacgccccugggccugguggaccucuucguguucagcaccuccuucuaccugaucagcaucuuccugcaccuggucaagaucccgacccaccgccacaucguggggaaguccugccccaagccccaccggcucaaccacaugggcaucugcagcugcgggcuguacaagcagcccggcgugccgguccgcuggaagcggugaggacuagucccuguucccagagcccacuuuuuuuucuuuuuuugaaauaaaauagccugucuuucagaucuaaaaaaaaaaaaaaaaaaaaaaaaaaaaaaaaaaaaaaaaaaaaaaaaaaaaaaaaaaaaaaaaaaaaaaaaaaaaaaaaaaaaaaaaaaaaaaaaaaaa

SEQ ID NO: 32259 - RNA, 1743 nt, Artificial Sequence
  mRNA product Design a-2 (A100) comprising derived and/or modified sequence from LASV(Mad39;Clade IV)__ANH09722__GPCmut7 (opt1)
aggagaguccgcucagccagguugcagaagcggcuuagcguguguccuaaucuucucucugcguguagguaggccugugccgcaaacaagcuuaccaugggccagaucgugaccuucuuccaggaggucccccacgugaucgaggaggugaugaacaucguccugaucgcccucagcauccuggccgugcugaaggggcucuacaacguggcgaccugcggccugaucgggcuggucacguuccuccugcugugcggccgcuccugcaccaccacccucuacaaggggguguacgagcugcaggcccuggagcucaacauggagacgcugaacaugaccaugccgcugagcugcaccaagaacaacucccaccacuacauccgggugggcaacgagaccggccucgagcugacgcugaccaacaccagccucaucaaccacaaguucugcaaccuguccgacgcccacaagaagaaccuguacgaccacgcccucaugagcaucaucuccaccuuccaccugagcauccccaacuucaaccaguacgaggccauguccugcgacuucaacgacgggaagaucagcguccaguacaaccugucccacacguacgcgggcgacaccgccaaccacugcgggaccguggccaacggcgugcuccagaccuucaugcgcauggccuggggcgggagcuacaucgcgcuggacuccggccgcgggggcugggacugcaucaugacgagcuaccaguaccugaucauccagaacaccaccugggaggaccacugccaguucucccggcccagccccaucggguaccucggccugcugucccagcggacccgcgacaucuacaucagccggcgccuccugggcacguucaccuggacccuguccgacagcgaggggaaggacaccccgggcggguacugccucacgcgguggaugcugaucgaggccgagcugaagugcuucggcaacaccgccgucgccaagugcaacgagaagcacgacgaggaguucugcgacaugcuccgccuguucgacuucaacaagcaggccauccagcggcugaaggcgcccgcccagaugagcauccagcucaucaacaaggccgugaacgcccugaucaacgaccagcugaucaugaagaaccaccuccgcgacaucauggggauccccuacugcaacuacuccaaguacugcuaccugaaccacaccgugaccggcaagacgagccugcccaagugcugccucgucuccaacggcagcuaccugaacgagacccacuucuccgacgacaucgagcagcaggccgacaacaugaucaccgagaugcugcagaaggaguacauggagcggcaggggaagacgccccucggccugguggaccuguucguguucagcaccuccuucuaccugaucagcaucuuccuccaccuggucaagaucccgacccaccgccacgugguggggaagcccugccccaagccccaccggcugaaccacaugggcaucugcuccugcggguucuacaagcagccgggcguccccgugcgcuggaagcggugaggacuagucccuguucccagagcccacuuuuuuuucuuuuuuugaaauaaaauagccugucuuucagaucuaaaaaaaaaaaaaaaaaaaaaaaaaaaaaaaaaaaaaaaaaaaaaaaaaaaaaaaaaaaaaaaaaaaaaaaaaaaaaaaaaaaaaaaaaaaaaaaaaaaa

SEQ ID NO: 32260 - RNA, 1743 nt, Artificial Sequence
  mRNA product Design a-2 (A100) comprising derived and/or modified sequence from LASV(Z0947-SLE-2011;Clade IV)__AIT17840__GPCmut7 (opt1)
aggagaguccgcucagccagguugcagaagcggcuuagcguguguccuaaucuucucucugcguguagguaggccugugccgcaaacaagcuuaccaugggccagaucgugaccuucuuccaggaggucccccacgugaucgaggaggugaugaacaucguccugaucgcccucagcauccuggccgugcugaaggggcucuacaacuucgcgaccugcggccugguggggcuggucacguuccuccugcugugcggccgcuccugcaccaucagccucuacaaggggguguacgagcugcagacccuggagcucaacauggagacccugaacaugacgaugccgcuguccugcaccaagaacaacagccaccacuacaucauggugggcaacgagaccggccucgagcugacccugacgaacaccuccaucaucaaccacaaguucugcaaccucagcgacgcccacaagaagaaccuguacgaccacgcccugauguccaucaucagcaccuuccaccucuccauccccaacuucaaccaguacgaggccaugagcugcgacuucaacgggggcaagaucuccguccaguacaaccugagccacuccuacgccggggacgcggccaaccacugcggcaccguggccaacggggugcugcagacguucaugcggauggccuggggcggcagcuacaucgcgcucgacuccgggcgcgaccggugggacugcaucaugaccagcuaccaguaccugaucauccagaacaccaccugggaggaccacugccaguucucccgccccagccccaucggcuaccuggggcuccugucccagcggacgcgcgacaucuacaucagccggcgccugcucggcaccuucaccuggacccugagcgacuccgagggcaaggacacgcccgggggcuacugccugacccgguggaugcucaucgaggccgagcugaagugcuucgggaacaccgccgucgccaagugcaacgagaagcacgacgaggaguucugcgacaugcugcgccucuucgacuucaacaagcaggccauccagcggcugaaggcgcccgcccagaugagcauccagcugaucaacaaggccgugaacgcccucaucaacgaccagcugaucaugaagaaccaccuccgcgacaucaugggcauccccuacugcaacuacuccaaguacugcuaccugaaccacaccacgaccgggaagaccagccugcccaagugcugccugguguccaacggcagcuaccucaacgagacccacuucuccgacgacaucgagcagcaggccgacaacaugaucacggagaugcugcagaaggaguacauggagcggcagggcaagaccccgcuggggcucgucgaccuguucguguucagcaccuccuucuaccugaucagcaucuuccugcaccucgugaagaucccgacccaccgccacaucgucggcaagcccugccccaagccccaccggcugaaccacauggggaucugcuccugcggccuguacaagcagccgggggugcccgugaaguggaagcgcugaggacuagucccuguucccagagcccacuuuuuuuucuuuuuuugaaauaaaauagccugucuuucagaucuaaaaaaaaaaaaaaaaaaaaaaaaaaaaaaaaaaaaaaaaaaaaaaaaaaaaaaaaaaaaaaaaaaaaaaaaaaaaaaaaaaaaaaaaaaaaaaaaaaaa

SEQ ID NO: 32261 - RNA, 1743 nt, Artificial Sequence
  mRNA product Design a-2 (A100) comprising derived and/or modified sequence from LASV(Josiah;Clade IV)__NP_694870__GPCmut7 (opt1)
aggagaguccgcucagccagguugcagaagcggcuuagcguguguccuaaucuucucucugcguguagguaggccugugccgcaaacaagcuuaccaugggccagaucgugaccuucuuccaggaggucccccacgugaucgaggaggugaugaacaucguccugaucgcccucagcgugcuggccgugcugaaggggcucuacaacuucgcgaccugcggccuggucgggcuggugacguuccuccugcugugcggccgcuccugcaccaccagccucuacaaggggguguacgagcugcagacccuggagcucaacauggagacgcugaacaugaccaugccgcuguccugcaccaagaacaacagccaccacuacaucauggucggcaacgagaccggccucgagcugacgcugaccaacaccuccaucaucaaccacaaguucugcaaccucagcgacgcccacaagaagaaccuguacgaccacgcccugauguccaucaucagcaccuuccaccucuccauccccaacuucaaccaguacgaggccaugagcugcgacuucaacgggggcaagaucuccgugcaguacaaccugagccacuccuacgccggggacgcggccaaccacugcggcacgguggccaacgggguccugcagaccuucaugcggauggccuggggcggcagcuacaucgcgcucgacuccgggcgcggcaacugggacugcaucaugaccagcuaccaguaccugaucauccagaacaccacgugggaggaccacugccaguucucccggcccagccccaucggguaccugggccuccugucccagcgcacccgggacaucuacaucagccgccggcugcucggcaccuucaccuggacgcugagcgacuccgaggggaaggacaccccgggcggguacugccugacccgcuggaugcucaucgaggccgagcugaagugcuucggcaacaccgccguggccaagugcaacgagaagcacgacgaggaguucugcgacaugcugcggcuguucgacuucaacaagcaggccauccagcgccugaaggcgcccgcccagaugagcauccagcugaucaacaaggccgugaacgcccucaucaacgaccagcugaucaugaagaaccaccuccgggacaucauggggauccccuacugcaacuacuccaaguacugcuaccucaaccacacgaccaccggccgcaccagccugcccaagugcugccuggucuccaacggcagcuaccucaacgagacgcacuucuccgacgacaucgagcagcaggccgacaacaugaucaccgagaugcugcagaaggaguacauggagcggcaggggaagaccccgcugggccugguggaccucuucguguucagcaccuccuucuaccugaucagcaucuuccugcaccucgucaagauccccacgcaccgccacaucguggggaaguccugccccaagccccaccggcugaaccacaugggcaucugcagcugcgggcuguacaagcagccgggcgugcccgucaaguggaagcgcugaggacuagucccuguucccagagcccacuuuuuuuucuuuuuuugaaauaaaauagccugucuuucagaucuaaaaaaaaaaaaaaaaaaaaaaaaaaaaaaaaaaaaaaaaaaaaaaaaaaaaaaaaaaaaaaaaaaaaaaaaaaaaaaaaaaaaaaaaaaaaaaaaaaaa

SEQ ID NO: 32262 - RNA, 1740 nt, Artificial Sequence
  mRNA product Design a-2 (A100) comprising derived and/or modified sequence from LASV(LP;Clade I)__AAF86701__GPCmut7 (opt1)
aggagaguccgcucagccagguugcagaagcggcuuagcguguguccuaaucuucucucugcguguagguaggccugugccgcaaacaagcuuaccaugggccagaucaucaccuucuuccaggaggugccccacgucaucgaggaggugaugaacaucgugcugaucgcccucagccugcuggccauccucaaggggcuguacaacaucgcgaccugcggcaucaucgggcuggucgccuuccucuuccugugcggcaaguccugcagccugacgcucaagggcggguacgagcugcagacccuggagcucaacauggagacccugaacaugaccaugccgcuguccugcacgaagaacagcucccaccacuacauccgcgugggcaacgagaccgggcucgagcugacccugaccaacacgagcaucaucaaccacaaguucugcaaccucuccgacgcccacaagaagaaccuguacgaccacgcccugaugagcaucaucuccaccuuccaccucagcauccccaacuucaaccaguacgaggccauguccugcgacuucaacggcgggaagaucagcgugcaguacaaccugucccacagcuacgcgggcgacgccgccgagcacugcgggaccgucgccaacggcgugcugcagaccuucaugcggauggcguggggcgggcgcuacaucgcccucgacuccggcaaggggaacugggacugcaucaugacgagcuaccaguaccugaucauccagaacaccaccugggaggaccacugccaguucucccggcccagccccaucggcuaccugggccuccugucccagcgcacccgggacaucuacaucagccgccggcugcucgggacguucaccuggacccugagcgacuccgagggcaacgagacccccgggggcuacugccugacgcgcuggaugcucaucgaggccgagcugaagugcuucgggaacaccgccguggccaagugcaacgagaagcacgacgaggaguucugcgacaugcugcggcuguucgacuucaacaagcaggcgauccgccggcugaaggccccggcccagaugagcauccagcugaucaacaaggccgucaacgcccucaucaacgaccagcugaucaugaagaaccaccuccgcgacaucaugggcauccccuacugcaacuacuccaaguacugcuaccucaaccacaccagcuccggccggaccagccugcccaagugcugccugaucuccaacgggagcuaccucaacgagacgcaguucuccgacgacaucgagcagcaggcggacaacaugaucaccgagaugcugcagaaggaguacaucgagcgccagggcaagaccccgcuggggcugguggacaucuucaucuucagcaccuccuucuaccucaucagcaucuuccugcaccugaucaagauccccacgcaccggcacaucgugggcaagcccugccccaagccgcaccgccucaaccacaugggggucugcuccugcggccuguacaagcaccccggcgugcccaccaaguggaagcggugaggacuagucccuguucccagagcccacuuuuuuuucuuuuuuugaaauaaaauagccugucuuucagaucuaaaaaaaaaaaaaaaaaaaaaaaaaaaaaaaaaaaaaaaaaaaaaaaaaaaaaaaaaaaaaaaaaaaaaaaaaaaaaaaaaaaaaaaaaaaaaaaaaaaa

SEQ ID NO: 32263 - RNA, 1740 nt, Artificial Sequence
  mRNA product Design a-2 (A100) comprising derived and/or modified sequence from LASV(803213;Clade II)__AAF86703__GPCmut7 (opt1)
aggagaguccgcucagccagguugcagaagcggcuuagcguguguccuaaucuucucucugcguguagguaggccugugccgcaaacaagcuuaccaugggccagaucaucaccuucuuccaggaggugccccacgucaucgaggaggugaugaacaucgugcugaucgcccucagccugcuggccauccucaaggggaucuacaacgucgcgaccugcggccuguucgggcugaucuccuuccuccugcugugcggccgcagcugcuccgugacguacaaggggguguacgagcuccagacccuggagcugaacauggccaaccucaacaugaccaugccgcugagcugcaccaagaacaacucccaccacuacaucauggucggcaacgagacgggccuggagcucacccugaccaacaccagcaucaucaaccacaaguucugcaaccuguccgacgcccacaagaagaaccucuacgaccacgcccugaugagcaucaucuccacguuccaccugagcauccccaacuucaaccaguacgaggccauguccugcgacuucaacgggggcaagaucagcgugcaguacaaccucucccacagcuucgcgguggacgccgccaaccacugcgggaccaucgccaacggcguccugcagaccuucaugcggauggcguggggcggguccuacaucgcccuggacagcggcaaggggaacugggacugcaucaugaccuccuaccaguaccucaucauccagaacacgaccugggaggaccacugccaguucagccgccccucccccaucggcuaccuggggcugcucagccagcggacccgcgacaucuacaucagccggcgccugcugggcaccuucacguggacccucuccgacagcgagggcaacgaggcccccgggggcuacugccugacccgguggaugcugaucgaggccgagcucaagugcuucgggaacaccgccguggcgaagugcaacgagaagcacgacgaggaguucugcgacaugcugcgccuguucgacuucaacaagcaggccaucaagcggcucaagacgccggcccagauguccauccagcugaucaacaaggccgugaacgcccugaucaacgaccagcucaucaugaagaaccaccuccgcgacaucaugggcauccccuacugcaacuacagccgguacugcuaccugaaccacaccgucaccgggaagaccucccugccccgcugcugccuggugagcaacggcuccuaccugaacgagacgcacuucagcgacgacaucgagcagcaggcggacaacaugaucaccgagaugcuccagaaggaguacauggaccggcagggcaagaccccgcuggggcugguggaccuguucgucuucuccaccagcuucuaccucaucuccaucuuccugcaccuggugaagauccccacgcaccgccacaucgugggcaagcccugccccaagccgcaccggcucaaccacauggggaucugcagcugcggccuguacaagcaccccgggguccccgugaaguggaagcgcugaggacuagucccuguucccagagcccacuuuuuuuucuuuuuuugaaauaaaauagccugucuuucagaucuaaaaaaaaaaaaaaaaaaaaaaaaaaaaaaaaaaaaaaaaaaaaaaaaaaaaaaaaaaaaaaaaaaaaaaaaaaaaaaaaaaaaaaaaaaaaaaaaaaaa

SEQ ID NO: 32264 - RNA, 1740 nt, Artificial Sequence
  mRNA product Design a-2 (A100) comprising derived and/or modified sequence from LASV(GA391;Clade III)__CAA36645__GPCmut7 (opt1)
aggagaguccgcucagccagguugcagaagcggcuuagcguguguccuaaucuucucucugcguguagguaggccugugccgcaaacaagcuuaccaugggccagaucgugaccuucuuccaggaggucccccacgugaucgaggaggugaugaacaucguccugaucgcccucagcauccuggccauccugaaggggcucuacaacguggcgaccugcggccugaucgggcuggugacguuccuccugcuguccggccgcagcugcucccucaucuacaaggggaccuacgagcugcagacccuggagcucaacauggagacccugaacaugacgaugccgcugagcugcaccaagaacaacucccaccacuacauccgggucggcaacgagaccggccucgagcugacccugacgaacaccagcauccucaaccacaaguucugcaaccuguccgacgcccacaagcgcaaccuguacgaccacagccucauguccaucaucagcaccuuccaccuguccauccccaacuucaaccaguacgaggccaugagcugcgacuucaacgggggcaagaucaccgugcaguacaaccugucccacagcuucgccguggacgccgcggggcacugcggcacgcucgccaacgggguccugcagaccuucaugcggauggccuggggcggcuccuacaucgcccuggacagcgggcgcggcaacugggacugcaucaugaccuccuaccaguaccucaucauccagaacaccacgugggacgaccacugccaguucagccggcccucccccaucggguaccugggccugcucagccagcgcacccgggacaucuacaucagccgccggcugcugggcaccuucaccuggacgcucuccgacagcgaggggaacgagaccccgggcggguacugccugacccgcuggaugcugaucgaggcggagcucaagugcuucggcaacaccgccguggccaagugcaacgagaagcacgacgaggaguucugcgacaugcugcggcuguucgacuucaacaagcaggccauccgccggcucaagacgcccgcccagauguccauccagcugaucaacaaggcggugaacgcccugaucaacgaccagcucaucaugaagaaccaccuccgcgacaucauggggauccccuacugcaacuacagccgguacugcuaccugaaccacaccuccaccggcaagaccagccugccccgcugcugccugaucuccaacggcagcuaccugaacgagacgaaguucuccgacgacaucgagcagcaggccgacaacaugaucaccgagaugcugcagaaggaguacaucgaccggcaggggaagaccccgcucggccuggucgaccuguucguguucagcaccuccuucuaccucaucagcaucuuccugcaccuggugaagauccccacgcaccgccacaucgucgggaagcccugccccaagccgcaccggcucaaccacaugggcaucugcuccugcgggcuguacaagcagcccggcgugcccgugcgcuggaagcggugaggacuagucccuguucccagagcccacuuuuuuuucuuuuuuugaaauaaaauagccugucuuucagaucuaaaaaaaaaaaaaaaaaaaaaaaaaaaaaaaaaaaaaaaaaaaaaaaaaaaaaaaaaaaaaaaaaaaaaaaaaaaaaaaaaaaaaaaaaaaaaaaaaaaa

SEQ ID NO: 32265 - RNA, 1743 nt, Artificial Sequence
  mRNA product Design a-2 (A100) comprising derived and/or modified sequence from LASV(AV;Clade V)__CCA30314__GPCmut7 (opt1)
aggagaguccgcucagccagguugcagaagcggcuuagcguguguccuaaucuucucucugcguguagguaggccugugccgcaaacaagcuuaccaugggccagaucgugaccuucuuccaggaggucccccacgugaucgaggaggugaugaacaucguccugaucgcccucagcauccuggccgugcugaaggggcucuacaacaucgcgaccugcggccugaucgggcugaucacguuccuccugcugugcggccgcuccugcagcuccaaccucuacaaggggguguacgagcugcagagccuggaccucaacauggagacccugaacaugaccaugccgcuguccugcaccaagaacaacagccaccacuacauccgggucggcaacgacacgggccucgagcugacccugaccaacaccuccauccucaaccacaaguucugcaaccugagcgacgcccacaagaaggaccuguacgaccacgcccucauguccaucaucagcacguuccaccuguccauccccaacuucaaccaguacgaggccaugagcugcgacuucaacgggggcaagaucuccgugcaguacaaccugagccacuccuacgccaucgacgcggccaaccacugcgggaccguggccaacggcauccuccagaccuucaugcgcauggccuggggcgggagcuacaucgcgcuggacuccggccgggggaacugggacugcaucaugaccagcuaccaguaccugaucauccagaacacgaccugggagaaccacugccaguucucccgccccagccccaucggcuaccucgggcugcugagccagcggacccgcgacaucuacaucucccggcgccuccugggcaccuucacguggacccugagcgacuccgagggcaacgccacccccgggggcuacugccucacccgguggaugcugaucgaggccgagcugaagugcuucgggaacacggccgucgccaagugcaacgagaagcacgacgaggaguucugcgacaugcuccgccuguucgacuucaacaagcaggcgaucagccggcugaaguccccggcccagaugagcauccagcucaucaacaaggccgugaacgcccugaucaacgaccagcugaucaugaagaaccaccuccgcgacaucaugggcauccccuacugcaacuacuccaaguacugcuaccugaaccacaccaucaccgggaagaccagccugcccaagugcugccucguguccaacggcagcuaccugaacgagacgcacuucuccgacgacaucgagcagcaggccgacaacaugaucaccgagaugcugcagaaggaguacauggagcggcagggcaagaccccgcuggggcucgucgaccuguucguguucagcaccuccuucuaccugaucagcaucuuccuccgccuggugaagauccccacgcaccggcacaucgucggcaagcccugccccaagccgcaccgccugaaccacauggggaucugcuccugcggccucuacaagcagcccggggugcccgugcgguggaagcgcugaggacuagucccuguucccagagcccacuuuuuuuucuuuuuuugaaauaaaauagccugucuuucagaucuaaaaaaaaaaaaaaaaaaaaaaaaaaaaaaaaaaaaaaaaaaaaaaaaaaaaaaaaaaaaaaaaaaaaaaaaaaaaaaaaaaaaaaaaaaaaaaaaaaaa

SEQ ID NO: 32266 - RNA, 1740 nt, Artificial Sequence
  mRNA product Design a-2 (A100) comprising derived and/or modified sequence from LASV(Togo/2016/7082;Clade VI)__AMR44577__GPCmut7 (opt1)
aggagaguccgcucagccagguugcagaagcggcuuagcguguguccuaaucuucucucugcguguagguaggccugugccgcaaacaagcuuaccaugggccagaucaucaccuucuuccaggaggugccccacgucaucgaggaggugaugaacaucgugcugaucgcccucagccugcuggccauccucaagggggucuacaacguggcgaccugcggcaucaucgggcuggugacguuccuguuccucugcggccgcuccugcagccugaucuacaagggguccuacgagcugcagacccucgagcugaacauggagacccugaacaugaccaugccgcucagcugcacgaagaacuccagccaccacuacauccgggucggcaacgagaccggccuggagcugacccucaccaacacguccaucaucaaccacaaguucugcaaccugagcgacgcccacaagcgcaaccuguacgaccacgcccucauguccauccugagcaccuuccaccuguccauccccaacuucaaccaguacgaggccaugagcugcgacuucaacgggggcaagaucuccgugcaguacaaccucagccacgccuacgcgguggacgccgccgagcacugcgggaccgucgccaacggcgugcugcagaccuucaugcggauggcguggggcggguccuacaucgcccuggacagcggccgcgggaacugggacugcaucaugacguccuaccaguaccucaucauccagaacaccaccugggaggaccacugccaguucagccggcccucccccaucggcuaccuggggcugcucagccagcgcacccgggacaucuacaucagccgccggcugcugggcacguucaccuggacccucuccgacagcgagggcaacgagacccccgggggcuacugccugacgcgcuggaugcugaucgaggccgagcucaagugcuucgggaacaccgccguggccaagugcaacgagaagcacgacgaggaguucugcgacaugcugcggcuguucgacuucaacaagcaggcgauccagcgccucaaguccccggcccagaugagcauccagcugaucaacaaggccgucaacgcccugaucaacgaccagcucaucaugaagaaccaccuccgggacaugaugggcauccccuacugcaacuacuccaaguacugcuaccugaaccacaccagcuccgggcgcaccagccugcccaagugcugccugguguccaacggcagcuaccugaacgagacgcacuucuccgacgacaucgagcagcaggccgacaacaugaucaccgagaugcuccagaaggaguacaucgaccggcagggcaagaccccgcuggggcugguggaccuguucgucuucagcaccuccuucuaccucaucagcaucuuccugcaccugaucaagauccccacgcaccgccacaucgugggcaagcccugccccaagccgcaccggcucaaccacauggggaucugcuccugcggccuguacaagcagcccggggugcccacccgcuggaagcggugaggacuagucccuguucccagagcccacuuuuuuuucuuuuuuugaaauaaaauagccugucuuucagaucuaaaaaaaaaaaaaaaaaaaaaaaaaaaaaaaaaaaaaaaaaaaaaaaaaaaaaaaaaaaaaaaaaaaaaaaaaaaaaaaaaaaaaaaaaaaaaaaaaaaa

SEQ ID NO: 32267 - RNA, 1740 nt, Artificial Sequence
  mRNA product Design a-2 (A100) comprising derived and/or modified sequence from LASV(KAK-428;Clade n.d. (VII))__ANH09740__GPCmut7 (opt1)
aggagaguccgcucagccagguugcagaagcggcuuagcguguguccuaaucuucucucugcguguagguaggccugugccgcaaacaagcuuaccaugggccagaucgugaccuucuuccaggaggucccccacgugaucgaggaggugaugaacaucguccugaucgcccucagccugcuggccauccucaaggggcuguacaacuucgcgaccugcggcgugaucgggcugaucacguuccuccugcugugcggccgcuccugcagcgccaccuacaaggggcaguacgagcuccagacccuggagcugaacauggagucccucaacaugaccaugccgcugagcugcacgaagaacaacucccaccacuacauccgggccggcaacaacaccggccuggagcucacccugaccaacacgagcaucaucucccacaaguucugcaaccugagcgacgcccacaagaagaaccucuacgaccacacccugauguccaucaucaccaccuuccaccugagcauccccaacuucaaccaguacgaggccauguccugcgacuucaacgggggcaagaucagcauccaguacaaccucucccacagcuacgcgggggacgccgcccagcacugcggcacgguggccaacgggguccugcagaccuucaugcgcauggcguggggcggcuccuaccuggcccucgacagcgggcggcgcggcugggacugcaucaucuccagcuaccaguaccugaucauccagaacaccaccugggacgaccacugccaguucucccggcccagccccaucggguaccugggcuucgugagccagaagacgcgcgacaucuacaucucccggcgccuccugggcaccuucaccuggacccugagcgacuccgaggggcacgacaugccgggcggguacugccucacgcgguggaugcugaucgaggccgaccugaagugcuucggcaacaccgccguggccaagugcaacgagaagcacgacgaggaguucugcgacauguggcgccucuucgacuucaacaagcaggcgauccagcggcugaaggcccccgcccagaugaacauccagcugaucaacaaggccgucaacgcccucaucaacgaccagcugaugaugaagaaccaccuccgcgacaucauggggauccccuacugcaacuacagcaaguucugcuaccugaacaacaccaccacgggccggaccucccugccccgcugcugccugaucagcaacggcuccuaccucaacgagacccacuucagcgacgacaucgagcagcaggcggacaacaugaucaccgagaugcugcagaaggaguacauggaccggcaggggaagacgccgcugggccucguggaccuguucguguucuccaccagcuucuaccugaucaccaucuuccugcaccucgucaagauccccacccaccgccacaucguggggaagcccugccccaagccgcaccggcugaaccacaugggcaucugcuccugcgggcuguacaagcagcccggcgugcccguccgcuggaagcggugaggacuagucccuguucccagagcccacuuuuuuuucuuuuuuugaaauaaaauagccugucuuucagaucuaaaaaaaaaaaaaaaaaaaaaaaaaaaaaaaaaaaaaaaaaaaaaaaaaaaaaaaaaaaaaaaaaaaaaaaaaaaaaaaaaaaaaaaaaaaaaaaaaaaa

SEQ ID NO: 32268 - RNA, 1740 nt, Artificial Sequence; identical to SEQ ID NO: 32262
  mRNA product Design a-2 (A100) comprising derived and/or modified sequence from LASV(Pinneo-NIG-1969;Clade I)__AIT17836__GPCmut7 (opt1)

SEQ ID NO: 32269 - RNA, 1740 nt, Artificial Sequence
  mRNA product Design a-2 (A100) comprising derived and/or modified sequence from LASV(ISTH0009-NIG-2011;Clade II)__AIT17404__GPCmut7 (opt1)
aggagaguccgcucagccagguugcagaagcggcuuagcguguguccuaaucuucucucugcguguagguaggccugugccgcaaacaagcuuaccaugggccagaucaucaccuucuuccaggaggugccccacgucaucgaggaggugaugaacaucgugcugaucgcccucagccugcuggccauccucaaggggaucuacaacgucgcgaccugcggccuguucgggcugguguccuuccuccugcugugcggccgcagcugcuccacgaccuacaaggggguguacgagcuccagacccuggagcuggacauggccagccucaacaugaccaugccgcuguccugcacgaagaacaacagccaccacuacaucauggucggcaacgagaccggccuggagcucacccugaccaacacguccaucaucaaccacaaguucugcaaccugagcgacgcccacaagaagaaccucuacgaccacgcccugauguccaucaucagcaccuuccaccuguccauccccaacuucaaccaguacgaggccaugagcugcgacuucaacgggggcaagaucuccgugcaguacaaccucagccacgcguacgccguggacgccgccaaccacugcgggaccaucgcgaacggcguccugcagaccuucaugcggauggccuggggcggguccuacaucgcccuggacagcggcaagggguccugggacugcaucaugacgagcuaccaguaccucaucauccagaacaccaccugggaggaccacugccaguucucccgccccagccccaucggcuaccuggggcugcucagccagcggacccgcgacaucuacaucucccggcgccugcugggcacguucaccuggacccucagcgacuccgagggcaacgagacccccgggggcuacugccugacgcgguggaugcugaucgaggccgagcucaagugcuucgggaacaccgccguggcgaagugcaacgagaagcacgacgaggaguucugcgacaugcugcgccuguucgacuucaacaagcaggccauccggcgccucaagaccccggcccagaugagcauccagcugaucaacaaggccgugaacgcccugaucaacgaccagcucaucaugaagaaccaccuccgggacaucaugggcauccccuacugcaacuacuccaaguacugcuaccugaaccacaccgucacggggaagaccagccugccccgcugcugccugguguccaacggcagcuaccugaacgagacccacuucuccgacgacaucgagcagcaggcggacaacaugaucaccgagcuccugcagaaggaguacauggaccggcagggcaagacgccgcuggggcugguggaccucuucgucuucagcaccuccuucuaccugaucagcaucuuccugcaccucaucaagauccccacccaccgccacaucaccggcaagcccugccccaagccgcaccggcugaaccacauggggaucugcuccugcggccuguacaagcaccccggggugcccgugaaguggaagcgcugaggacuagucccuguucccagagcccacuuuuuuuucuuuuuuugaaauaaaauagccugucuuucagaucuaaaaaaaaaaaaaaaaaaaaaaaaaaaaaaaaaaaaaaaaaaaaaaaaaaaaaaaaaaaaaaaaaaaaaaaaaaaaaaaaaaaaaaaaaaaaaaaaaaaa

SEQ ID NO: 32270 - RNA, 1740 nt, Artificial Sequence
  mRNA product Design a-2 (A100) comprising derived and/or modified sequence from LASV(ISTH2010-NIG-2012;Clade II)__AIT17482__GPCmut7 (opt1)
aggagaguccgcucagccagguugcagaagcggcuuagcguguguccuaaucuucucucugcguguagguaggccugugccgcaaacaagcuuaccaugggccagaucaucaccuucuuccaggaggugccccacgucaucgaggaggugaugaacaucgugcugaucgcccucagccugcuggccauccucaaggggaucuacaacgucgcgaccugcggccuguucgggcugguguccuuccuccugcugugcggccgcagcugcuccacgaccuacaaggggguguacgagcuccagacccuggagcuggacauggccagccucaacaugaccaugccgcuguccugcacgaagaacaacagccaccacuacaucauggucggcaacgagaccggccuggagcucacccugaccaacacguccaucaucaaccacaaguucugcaaccugagcgacgcccacaagaagaaccucuacgaccacgcccugauguccaucaucagcaccuuccaccuguccauccccaacuucaaccaguacgaggccaugagcugcgacuucaacgggggcaagaucuccgugcaguacaaccucagccacgcguacgccguggacgccgccaaccacugcgggaccaucgcgaacggcguccugcagaccuucaugcggauggccuggggcggguccuacaucgcccuggacagcggcaagggguccugggacugcaucaugacgagcuaccaguaccucaucauccagaacaucaccugggaggaccacugccaguucucccgccccagccccaucggcuaccuggggcugcucagccagcggacccgcgacaucuacaucucccggcgccugcugggcaccuucacguggacccucagcgacuccgagggcaacgagacccccgggggcuacugccugacccgguggaugcugaucgaggccgagcucaagugcuucgggaacacggccguggcgaagugcaacgagaagcacgacgaggaguucugcgacaugcugcgccuguucgacuucaacaagcaggccauccggcgccucaagaccccggcccagaugagcauccagcugaucaacaaggccgugaacgcccugaucaacgaccagcucaucaugaagaaccaccuccgggacaucaugggcauccccuacugcaacuacuccaaguacugcuaccugaaccacaccgucaccgggaagacgagccugccccgcugcugccugguguccaacggcagcuaccugaacgagacccacuucuccgacgacaucgagcagcaggcggacaacaugaucaccgagcuccugcagaaggaguacaucgaccggcagggcaagaccccgcuggggcugguggaccucuucgucuucagcacguccuucuaccugaucagcaucuuccugcaccucgugaagauccccacccaccgccacguggucggcaagcccugccccaagccgcaccggcugaaccacauggggaucugcuccugcggccuguacaagcaccccggggugcccgugaaguggaagcgcugaggacuagucccuguucccagagcccacuuuuuuuucuuuuuuugaaauaaaauagccugucuuucagaucuaaaaaaaaaaaaaaaaaaaaaaaaaaaaaaaaaaaaaaaaaaaaaaaaaaaaaaaaaaaaaaaaaaaaaaaaaaaaaaaaaaaaaaaaaaaaaaaaaaaa

SEQ ID NO: 32271 - RNA, 1740 nt, Artificial Sequence
  mRNA product Design a-2 (A100) comprising derived and/or modified sequence from LASV(Lassa virus/H.sapiens-wt/NGA/2015/ISTH_0543;Clade II)__AVO03639__GPCmut7 (opt1)
aggagaguccgcucagccagguugcagaagcggcuuagcguguguccuaaucuucucucugcguguagguaggccugugccgcaaacaagcuuaccaugggccagaucaucaccuucuuccaggaggugccccacgucaucgaggaggugaugaacaucgugcugaucgcccucagccugcuggccauccucaaggggaucuacaacgucgcgaccugcggccuguucgggcugguguccuuccuccugcugugcggccgcagcugcuccacgaccuacaaggggguguacgagcuccagacccuggagcuggacauggccaaccucaacaugaccaugccgcugagcugcacgaagaacaacucccaccacuacaucauggucggcaacgagaccggccuggagcucacccugaccaacacgagcaucaucaaccacaaguucugcaaccuguccgacgcccacaagaagaaccucuacgaccacgcccugaugagcaucaucuccaccuuccaccugagcauccccaacuucaaccaguacgaggccauguccugcgacuucaacgggggcaagaucagcgugcaguacaaccucucccacaccuacgcgguggacgccgccaaccacugcgggaccaucgccaacggcguccugcagacguucaugcggauggcguggggcgggagcuacaucgcccuggacuccggcaaggggagcugggacugcaucaugaccuccuaccaguaccucgugauccagaacaccaccugggaggaccacugccaguucagccgccccucccccaucggcuaccuggggcugcucagccagcggacgcgcgacaucuacaucagccggcgccugcugggcaccuucaccuggacccucuccgacagcgagggcaacgagacgcccgggggcuacugccugacccgguggaugcugaucgaggccgagcucaagugcuucgggaacaccgccguggccaagugcaacgagaagcacgacgaggaguucugcgacaugcugcgccuguucgacuucaacaagcaggcgauccggcgccucaagaccccggcccagauguccauccagcugaucaacaaggccgucaacgcccugaucaacgaccagcucaucaugaagaaccaccuccgggacaucaugggcauccccuacugcaacuacagcaaguacugcuaccugaaccacacggugaccgggaagaccucccugccccgcugcugccuggugagcaacggcuccuaccugaacgagacccacuucagcgacgacaucgagcagcaggccgacaacaugaucacggagcuccugcagaaggaguacaucgaccggcagggcaagaccccgcuggggcuggucgaccucuucguguucuccaccagcuucuaccugaucuccaucuuccugcaccucgugaagauccccacccaccgccacaucacgggcaagcccugccccaagccgcaccggcugaaccacauggggaucugcagcugcggccuguacaagcaccccgggguccccgugaaguggaagcgcugaggacuagucccuguucccagagcccacuuuuuuuucuuuuuuugaaauaaaauagccugucuuucagaucuaaaaaaaaaaaaaaaaaaaaaaaaaaaaaaaaaaaaaaaaaaaaaaaaaaaaaaaaaaaaaaaaaaaaaaaaaaaaaaaaaaaaaaaaaaaaaaaaaaaa

SEQ ID NO: 32272 - RNA, 1740 nt, Artificial Sequence
  mRNA product Design a-2 (A100) comprising derived and/or modified sequence from LASV(Lassa virus/H.sapiens-wt/NGA/2016/ISTH_0009;Clade II)__AVO03571__GPCmut7 (opt1)
aggagaguccgcucagccagguugcagaagcggcuuagcguguguccuaaucuucucucugcguguagguaggccugugccgcaaacaagcuuaccaugggccagaucaucaccuucuuccaggaggugccccacgucaucgaggaggugaugaacaucgugcugaucgcccucagccugcuggccauccucaaggggaucuacaacgucgcgaccugcggccugcuggggcucguguccuuccugcugcucugcggccgcagcugcuccacgaccuacaaggggguguacgagcugcagacccuggagcucgacauggccagccugaacaugaccaugccgcuguccugcacgaagaacaacagccaccacuacaucauggucggcaacgagaccggccucgagcugacccugaccaacacguccaucaucaaccacaaguucugcaaccucagcgacgcccacaagaagaaccuguacgaccacgcccugauguccaucaucagcaccuuccaccucuccauccccaacuucaaccaguacgaggccaugagcugcgacuucaacgggggccggaucuccgugcaguacaaccugagccacuccuacgcgguggacgccgccaaccacugcgggaccaucgccaacggcguccugcagaccuucaugcgcauggcguggggcgggagcuacaucgcccucgacuccggcaaggggagcugggacugcaucaugacguccuaccaguaccugaucauccagaacaccaccugggaggaccacugccaguucagccggcccagccccaucggcuaccuggggcuccugucccagcgcacccgggacaucuacaucagccgccggcugcucggcacguucaccuggacccuguccgacagcgagggcaacgagacccccgggggcuacugccugacgcgcuggaugcucaucgaggccgagcugaagugcuucgggaacaccgccguggccaagugcaacgagaagcacgacgaggaguucugcgacaugcugcggcuguucgacuucaacaagcaggcgauccgccggcugaagaccccggcccagauguccauccagcugaucaacaaggccgugaacgcccucaucaacgaccagcugaucaugaagaaccaccuccgcgacaucaugggcauccccuacugcaacuacagcaaguacugcuaccucaaccacaccgucacggggaagaccucccugccccggugcugccuggugagcaacggcuccuaccucaacgagacccacuucagcgacgacaucgagcagcaggccgacaacaugaucaccgagcugcugcagaaggaguacaucgaccgccagggcaagacgccgcuggggcucguggaccuguucgucuucuccaccagcuucuaccugaucuccaucuuccuccaccuggugaagauccccacccaccggcacaucaccggcaagcccugccccaagccgcaccgccugaaccacauggggaucugcagcugcggccucuacaaccaccccggggugcccgucaaguggaagcggugaggacuagucccuguucccagagcccacuuuuuuuucuuuuuuugaaauaaaauagccugucuuucagaucuaaaaaaaaaaaaaaaaaaaaaaaaaaaaaaaaaaaaaaaaaaaaaaaaaaaaaaaaaaaaaaaaaaaaaaaaaaaaaaaaaaaaaaaaaaaaaaaaaaaa

SEQ ID NO: 32273 - RNA, 1740 nt, Artificial Sequence
  mRNA product Design a-2 (A100) comprising derived and/or modified sequence from LASV(Lassa virus/H.sapiens-wt/NGA/2016/ISTH_0017;Clade II)__AVO03567__GPCmut7 (opt1)
aggagaguccgcucagccagguugcagaagcggcuuagcguguguccuaaucuucucucugcguguagguaggccugugccgcaaacaagcuuaccaugggccagaucaucaccuucuuccaggaggugccccacgucaucgaggaggugaugaacaucgugcugaucgcccucagccugcuggccauccucaaggggaucuacaacgucgcgaccugcggccuguucgggcugguguccuuccuccugcugugcggccgcagcugcuccacgaccuacaaggggguguacgagcuccagacccuggagcuggacauggccagccucaacaugaccaugccgcuguccugcacgaagaacaacagccaccacuacaucauggucggcaacgagaccggccuggagcucacccugaccaacacguccaucaucaaccacaaguucugcaaccugagcgacgcccacaagaagaaccucuacgaccacgcccugauguccaucaucagcaccuuccaccuguccauccccaacuucaaccaguacgaggccaugagcugcgacuucaacgggggcaagaucuccgugcaguacaaccucagccacaccuacgcgaucgacgccgccaaccacugcgggaccaucgccaacggcgugcugcagacguucaugcggauggcguggggcggguccuacaucgcccuggacagcggcaagggguccugggacugcaucaugaccagcuaccaguaccucaucauccagaacaccaccugggaggaccacugccaguucucccgccccagccccaucggcuaccuggggcugcucagccagcggacgcgcgacaucuacaucucccggcgccugcugggcaccuucaccuggacccucagcgacuccgagggcaacgagacgcccgggggcuacugccugacccgguggaugcugaucgaggccgagcucaagugcuucgggaacaccgccgucgccaagugcaacgagaagcacgacgaggaguucugcgacaugcugcgccuguucgacuucaacaagcaggcgauccggcgccucaagaccccggcccagaugagcauccagcugaucaacaaggccgugaacgcccugaucaacgaccagcucaucaugaagaaccaccuccgggacaucaugggcauccccuacugcaacuacuccaaguacugcuaccugaaccacacggugaccgggaagaccagccugccccgcugcugccuggucuccaacggcagcuaccugaacgagacccacuucuccgacgacaucgagcagcaggccgacaacaugaucacggagcuccugcagaaggaguacauggaccggcagggcaagaccccgcuggggcugguggaccucuucguguucagcaccuccuucuaccugaucagcaucuuccugcaccucguccgcauccccacccaccggcacgugaucggcaagcccugccccaagccgcaccgccugaaccacauggggaucugcuccugcggccuguacaagcaccccggggugcccgucaaguggaagcggugaggacuagucccuguucccagagcccacuuuuuuuucuuuuuuugaaauaaaauagccugucuuucagaucuaaaaaaaaaaaaaaaaaaaaaaaaaaaaaaaaaaaaaaaaaaaaaaaaaaaaaaaaaaaaaaaaaaaaaaaaaaaaaaaaaaaaaaaaaaaaaaaaaaaa

SEQ ID NO: 32274 - RNA, 1740 nt, Artificial Sequence
  mRNA product Design a-2 (A100) comprising derived and/or modified sequence from LASV(Lassa virus/H.sapiens-wt/NGA/2018/ISTH_0959;Clade II)__AVV65099__GPCmut7 (opt1)
aggagaguccgcucagccagguugcagaagcggcuuagcguguguccuaaucuucucucugcguguagguaggccugugccgcaaacaagcuuaccaugggccagaucaucaccuucuuccaggaggugccccacgucaucgaggaggugaugaacaucgugcugaucgcccucagccugcuggccauccucaaggggaucuacaacgucgugaccugcggccuguucgggcugguguccuuccuccugcugugcggccgcagcugcuccacgaccuacaagggggucuacgagcuccagacccuggagcuggacauggcgagccucaacaugaccaugccgcuguccugcacgaagaacaacagccaccacuacaucauggugggcaacgagaccggccuggagcucacccugaccaacacguccaucaucaaccacaaguucugcaaccugagcgacgcccacaagaagaaccucuacgaccacgcccugauguccaucaucagcaccuuccaccuguccauccccaacuucaaccaguacgaggccaugagcugcgacuucaacgggggcaagaucuccgugcaguacaaccucagccacgccuacgcgaucgacgccgccaaccacugcgggaccaucgccaacggcguccugcagaccuucaugcggauggcguggggcggguccuacaucgcccuggacagcggcaagggguccugggacugcaucaugacgagcuaccaguaccucaucauccagaacaccaccugggaggaccacugccaguucucccgccccagccccaucggcuaccuggggcugcucagccagcggacccgcgacaucuacaucucccggcgccugcugggcacguucaccuggacccucagcgacuccgagggcaacgagacccccgggggcuacugccugacgcgguggaugcugaucgaggccgagcucaagugcuucgggaacaccgccguggccaagugcaacgagaagcacgacgaggaguucugcgacaugcugcgccuguucgacuucaacaagcaggcgauccggcgccucaagaccccggcccagaugagcauccagcugaucaacaaggccgugaacgcccugaucaacgaccagcucaucaugaagaaccaccuccgggacaucaugggcauccccuacugcaacuacuccaaguacugcuaccugaaccacaccgucacggggaagaccagccugccccgcugcugccugguguccaacggcagcuaccugaacgagacccacuucuccgacgacaucgagcagcaggccgacaacaugaucaccgagcuccugcagaaggaguacaucgaccggcagggcaagacgccgcuggggcugguggaccucuucgucuucagcaccuccuucuaccugaucagcaucuuccugcaccucgugaagauccccacccaccgccacgugaucggcaagcccugccccaagccgcaccggcugaaccacauggggaucugcuccugcggccuguacaagcaccccgggguccccgugaaguggaagcgcugaggacuagucccuguucccagagcccacuuuuuuuucuuuuuuugaaauaaaauagccugucuuucagaucuaaaaaaaaaaaaaaaaaaaaaaaaaaaaaaaaaaaaaaaaaaaaaaaaaaaaaaaaaaaaaaaaaaaaaaaaaaaaaaaaaaaaaaaaaaaaaaaaaaaa

SEQ ID NO: 32275 - RNA, 1740 nt, Artificial Sequence
  mRNA product Design a-2 (A100) comprising derived and/or modified sequence from LASV(LASV003-NIG-2008;Clade II)__AIT17580__GPCmut7 (opt1)
aggagaguccgcucagccagguugcagaagcggcuuagcguguguccuaaucuucucucugcguguagguaggccugugccgcaaacaagcuuaccaugggccagaucaucaccuucuuccaggaggugccccacgucaucgaggaggugaugaacaucgugcugaucgcccucagccugcuggccauccucaaggggaucuacaacgucgcgaccugcggccuguucgggcugguguccuuccuccugcugugcggccgcagcugcuccacgaccuacaaggggguguacgagcuccagacccuggagcuggacauggccagccucaacaugaccaugccgcuguccugcacgaagaacaacagccaccacuacaucauggucggcaacgagaccggccuggagcucacccugaccaacacguccaucaucaaccacaaguucugcaaccugagcgacgcccacaagaagaaccucuacgaccacgcccugauguccaucaucagcaccuuccaccuguccauccccaacuucaaccaguacgaggccaugagcugcgacuucaacgggggcaagaucuccgugcaguacaaccucagccacaccuacgcgguggacgccgccaaccacugcgggaccaucgccaacggcguccugcagacguucaugcggauggcguggggcggguccuacaucgcccuggacagcggcaagggguccugggacugcaucaugaccagcuaccaguaccucaucauccagaacaccaccugggaggaccacugccaguucucccgccccagccccaucggcuaccuggggcugcucagccagcggacgcgcgacaucuacaucucccggcgccugcugggcaccuucaccuggacccucagcgacuccgagagcaacgagacgccgggcggguacugccugacccgguggaugcugaucgaggccgagcucaagugcuucggcaacaccgccguggccaagugcaacgagaagcacgacgaggaguucugcgacaugcugcgccuguucgacuucaacaagcaggcgauccggcgccucaaggcccccgcccagauguccauccagcugaucaacaaggccgugaacgcccugaucaacgaccagcucaucaugaagaaccaccuccgggacaucauggggauccccuacugcaacuacagcaaguacugcuaccugaaccacaccgucacgggccgcaccucccugccccggugcugccuggugagcaacggguccuaccugaacgagacccacuucagcgacgacaucgagcagcaggcggacaacaugaucaccgagcuccugcagaaggaguacauggaccgccagggcaagacgccgcugggccugguggaccucuucgucuucuccaccagcuucuaccugaucuccaucuuccugcaccucgugaagauccccacccaccggcacgugaucgggaagcccugccccaagccgcaccgccugaaccacaugggcaucugcagcugcgggcuguacaagcaccccggcguccccgugaaguggaagcggugaggacuagucccuguucccagagcccacuuuuuuuucuuuuuuugaaauaaaauagccugucuuucagaucuaaaaaaaaaaaaaaaaaaaaaaaaaaaaaaaaaaaaaaaaaaaaaaaaaaaaaaaaaaaaaaaaaaaaaaaaaaaaaaaaaaaaaaaaaaaaaaaaaaaa

SEQ ID NO: 32276 - RNA, 1740 nt, Artificial Sequence
  mRNA product Design a-2 (A100) comprising derived and/or modified sequence from LASV(LASV035-NIG-2009;Clade II)__AIT17588__GPCmut7 (opt1)
aggagaguccgcucagccagguugcagaagcggcuuagcguguguccuaaucuucucucugcguguagguaggccugugccgcaaacaagcuuaccaugggccagaucaucaccuucuuccaggaggugccccacgucaucgaggaggugaugaacaucgugcugaucgcccucagccugcuggccauccucaaggggaucuacaacgucgcgaccugcggccuguucgggcugguguccuuccuccugcugugcggccgcagcugcuccacgaccuacaaggggguguacgagcuccagacccuggagcuggacauggccagccucaacaugaccaugccgcuguccugcacgaagaacaacagccaccacuacaucauggucggcaacgagaccggccuggagcucacccugaccaacacguccaucaucaaccacaaguucugcaaccugagcgacgcccacaagaagaaccucuacgaccacgcccugauguccaucaucagcaccuuccaccuguccauccccaacuucaaccaguacgaggccaugagcugcgacuucaacgggggcaagaucuccgugcaguacaaccucagccacgcguacgccguggacgccgccaaccacugcgggaccaucgcgaacggcguccugcagaccuucaugcggauggccuggggcggguccuacaucgcccuggacagcggcaagggguccugggacugcaucaugacgagcuaccaguaccucaucauccagaacaccaccugggaggaccacugccaguucucccgccccagccccaucggcuaccuggggcugcucagccagcggacccgcgacaucuacaucucccggcgccugcugggcacguucaccuggacccucagcgacuccgagggcaacgagacccccgggggcuacugccugacgcgguggaugcugaucgaggccgagcucaagugcuucgggaacaccgccguggcgaagugcaacgagaagcacgacgaggaguucugcgacaugcugcgccuguucgacuucaacaagcaggccauccggcgccucaaggccccggcccagaugagcauccagcugaucaacaaggccgugaacgcgcugaucaacgaccagcucaucaugaagaaccaccuccgggacaucaugggcauccccuacugcaacuacuccaaguacugcuaccugaaccacaccgucaccgggaagacgagccugccccgcugcugccugguguccaacggcagcuaccugaacgagacccacuucuccgacgacaucgagcagcaggccgacaacaugaucaccgagcuccugcagaaggaguacaucgaccggcagggcaagaccccgcuggggcugguggaccucuucgucuucagcacguccuucuaccugaucagcaucuuccugcaccucgugaagauccccacccaccgccacgugaucggcaagcccugccccaagccgcaccggcugaaccacauggggaucugcuccugcggccuguacaagcaccccgggguccccgugaaguggaagcgcugaggacuagucccuguucccagagcccacuuuuuuuucuuuuuuugaaauaaaauagccugucuuucagaucuaaaaaaaaaaaaaaaaaaaaaaaaaaaaaaaaaaaaaaaaaaaaaaaaaaaaaaaaaaaaaaaaaaaaaaaaaaaaaaaaaaaaaaaaaaaaaaaaaaaa

SEQ ID NO: 32277 - RNA, 1740 nt, Artificial Sequence
  mRNA product Design a-2 (A100) comprising derived and/or modified sequence from LASV(LASV1000-NIG-2009;Clade II)__AIT17782__GPCmut7 (opt1)
aggagaguccgcucagccagguugcagaagcggcuuagcguguguccuaaucuucucucugcguguagguaggccugugccgcaaacaagcuuaccaugggccagaucaucaccuucuuccaggaggugccccacgucaucgaggaggugaugaacaucgugcugaucgcccucagccugcuggccauccucaaggggaucuacaacgucgcgaccugcggccuguucgggcugguguccuuccuccugcugugcggccgcagcugcuccacgaccuacaaggggguguacgagcuccagacccuggagcuggacauggccagccucaacaugaccaugccgcuguccugcacgaagaacaacagccaccacuacaucauggucggcaacgagaccggccuggagcucacccugaccaacacguccaucaucaaccacaaguucugcaaccugagcgacgcccacaagaagaaccucuacgaccacgcccugauguccaucaucagcaccuuccaccuguccauccccaacuucaaccaguacgaggccaugagcugcgacuucaacgggggcaagaucuccgugcaguacaaccucagccacaccuacgcgguggacgccgccaaccacugcgggaccaucgccaacggcguccugcagacguucaugcggauggcguggggcggguccuacaucgcccuggacagcggcaagggguccugggacugcaucaugaccagcuaccaguaccucaucauccagaacaccaccugggaggaccacugccaguucucccgccccagccccaucggcuaccuggggcugcucagccagcggacgcgcgacaucuacaucucccggcgccugcugggcaccuucaccuggacccucagcgacuccgagggcaacgagacgcccgggggcuacugccugacccgguggaugcugaucgaggccgagcucaagugcuucgggaacaccgccguggccaagugcaacgagaagcacgacgaggaguucugcgacaugcugcgccuguucgacuucaacaagcaggcgaucaagcggcucaagaccccggcccagaugagcauccagcugaucaacaaggccgugaacgcccugaucaacgaccagcucaucaugaagaaccaccuccgcgacaucaugggcauccccuacugcaacuacuccaaguacugcuaccugaaccacacggucaccgggaagaccagccugccccggugcugccugguguccaacggcagcuaccugaacgagacccacuucuccgacgacaucgagcagcaggccgacaacaugaucacggagcuccugcagaaggaguacaucgaccgccagggcaagaccccgcuggggcugguggaccucuucgucuucagcaccuccuucuaccugaucagcaucuuccugcaccucgugaagauccccacccaccggcacguggucggcaagcccugccccaagccgcaccgccugaaccacauggggaucugcuccugcggccuguacaagcaccccggggugcccgugaaguggaagcggugaggacuagucccuguucccagagcccacuuuuuuuucuuuuuuugaaauaaaauagccugucuuucagaucuaaaaaaaaaaaaaaaaaaaaaaaaaaaaaaaaaaaaaaaaaaaaaaaaaaaaaaaaaaaaaaaaaaaaaaaaaaaaaaaaaaaaaaaaaaaaaaaaaaaa

SEQ ID NO: 32278 - RNA, 1740 nt, Artificial Sequence
  mRNA product Design a-2 (A100) comprising derived and/or modified sequence from LASV(LASV221-NIG-2010;Clade II)__AIT17624__GPCmut7 (opt1)
aggagaguccgcucagccagguugcagaagcggcuuagcguguguccuaaucuucucucugcguguagguaggccugugccgcaaacaagcuuaccaugggccagaucaucaccuucuuccaggaggugccccacgucaucgaggaggugaugaacaucgugcugaucgcccucagccugcuggccauccucaaggggaucuacaacgucgcgaccugcggccuguucgggcugguguccuuccuccugcugugcggccgcagcugcuccacgaccuacaaggggguguacgagcuccagacccuggagcuggacauggccagccucaacaugaccaugccgcuguccugcacgaagaacaacagccaccacuacaucauggucggcaacgagaccggccuggagcucacccugaccaacacguccaucaucaaccacaaguucugcaaccugagcgacgcccacaagaagaaccucuacgaccacgcccugauguccaucaucagcaccuuccaccuguccauccccaacuucaaccaguacgaggccaugagcugcgacuucaacgggggcaagaucuccgugcaguacaaccucagccacaccuacgcgaucgacgccgccaaccacugcgggaccaucgccaacggcgugcugcagacguucaugcggauggcguggggcggguccuacaucgcccuggacagcggcaagggguccugggacugcaucaugaccagcuaccaguaccucaucauccagaacaccaccugggaggaccacugccaguucucccgccccagccccaucggcuaccuggggcugcucagccagcggacgcgcgacaucuacaucucccggcgccugcugggcaccuucaccuggacccucagcgacuccgagggcaacgagacgcccgggggcuacugccugacccgguggaugcugaucgaggccgagcucaagugcuucgggaacaccgccgucgccaagugcaacgagaagcacgacgaggaguucugcgacaugcugcgccuguucgacuucaacaagcaggcgauccggcgccucaagaccccggcccagaugagcauccagcugaucaacaaggccgugaacgcccugaucaacgaccagcucaucaugaagaaccaccuccgggacaucaugggcauccccuacugcaacuacuccaaguacugcuaccugaaccacacggugaccgggaagaccagccugccccgcugcugccuggucuccaacggcagcuaccugaacgagacccacuucuccgacgacaucgagcagcaggccgacaacaugaucacggagaugcuccagaaggaguacauggaccggcagggcaagaccccgcuggggcugguggaccuguucguguucagcaccuccuucuaccucaucagcaucuuccugcaccuggucaagauccccacccaccgccacgugaucggcaagcccugccccaagccgcaccggcucaaccacauggggaucugcuccugcggccuguacaagcaccccggggugcccgucaaguggaagcgcugaggacuagucccuguucccagagcccacuuuuuuuucuuuuuuugaaauaaaauagccugucuuucagaucuaaaaaaaaaaaaaaaaaaaaaaaaaaaaaaaaaaaaaaaaaaaaaaaaaaaaaaaaaaaaaaaaaaaaaaaaaaaaaaaaaaaaaaaaaaaaaaaaaaaa

SEQ ID NO: 32279 - RNA, 1740 nt, Artificial Sequence
  mRNA product Design a-2 (A100) comprising derived and/or modified sequence from LASV(LASV237-NIG-2010;Clade II)__AIT17638__GPCmut7 (opt1)
aggagaguccgcucagccagguugcagaagcggcuuagcguguguccuaaucuucucucugcguguagguaggccugugccgcaaacaagcuuaccaugggccagaucaucaccuucuuccaggaggugccccacgucaucgaggaggugaugaacaucgugcugaucgcccucagccugcuggccauccucaaggggaucuacaacgucgcgaccugcggccuguucgggcugguguccuuccuccugcugugcggccgcagcugcuccacgaccuacaaggggguguacgagcuccagacccuggagcuggacauggccagccucaacaugaccaugccgcuguccugcacgaagaacaacagccaccacuacaucauggucggcaacgagaccggccuggagcucacccugaccaacacguccaucaucaaccacaaguucugcaaccugagcgacgcccacaagaaggaccucuacgaccacgcccugauguccaucaucagcaccuuccaccuguccauccccaacuucaaccaguacgaggccaugagcugcgacuucaacgggggcaagaucuccgugcaguacaaccucagccacaccuacgcgguggacgccgccaaccacugcgggaccaucgccaacggcguccugcagacguucaugcggauggcguggggcggguccuacaucgcccuggacagcggcaagggguccugggacugcaucaugaccagcuaccaguaccucaucauccagaacaccaccugggaggaccacugccaguucucccgccccagccccaucggcuaccuggggcugcucagccagcggacgcgcgacaucuacaucucccggcgccugcugggcaccuucaccuggacccucagcgacuccgagggcaacgagacgcccgggggcuacugccugacccgguggaugcugaucgaggccgagcucaagugcuucgggaacaccgccguggccaagugcaacgagaagcacgacgaggaguucugcgacaugcugcgccuguucgacuucaacaagcaggcgauccggcgccucaagaccccggcccagaugagcauccagcugaucaacaaggccgugaacgcccugaucaacgaccagcucaucaugaagaaccaccuccgggacaucaugggcauccccuacugcaacuacuccaaguacugcuaccugaaccacacggucaccgggaagaccagccugccccgcugcugccugguguccaacggcagcuaccugaacgagacccacuucuccgacgacaucgagcagcaggccgacaacaugaucacggagcuccugcagaaggaguacauggaccggcagggcaagaccccgcuggggcugguggaccucuucgucuucagcaccuccuucuaccugaucagcaucuuccugcaccucaucaagauccccacccaccgccacaucacgggcaagcccugccccaagccgcaccggcugaaccacauggggaucugcuccugcggccuguacaagcaccccggggugcccgugaaguggaagcgcugaggacuagucccuguucccagagcccacuuuuuuuucuuuuuuugaaauaaaauagccugucuuucagaucuaaaaaaaaaaaaaaaaaaaaaaaaaaaaaaaaaaaaaaaaaaaaaaaaaaaaaaaaaaaaaaaaaaaaaaaaaaaaaaaaaaaaaaaaaaaaaaaaaaaa

SEQ ID NO: 32280 - RNA, 1740 nt, Artificial Sequence
  mRNA product Design a-2 (A100) comprising derived and/or modified sequence from LASV(LASV253-NIG-2011;Clade II)__AIT17670__GPCmut7 (opt1)
aggagaguccgcucagccagguugcagaagcggcuuagcguguguccuaaucuucucucugcguguagguaggccugugccgcaaacaagcuuaccaugggccagaucaucaccuucuuccaggaggugccccacgucaucgaggaggugaugaacaucgugcugaucgcccucagccugcuggccauccucaaggggaucuacaacgucgcgaccugcggccuguucgggcugguguccuuccuccugcugugcggccgcagcugcuccacgaccuacaaggggguguacgagcuccagacccuggagcuggacauggccagccucaacaugaccaugccgcuguccugcacgaagaacaacagccaccacuacaucauggucggcaacgagaccggccuggagcucacccugaccaacacguccaucaucaaccacaaguucugcaaccugagcgacgcccacaagaagaaccucuacgaccacgcccugauguccaucaucagcaccuuccaccuguccauccccaacuucaaccaguacgaggccaugagcugcgacuucaacgggggcaagaucuccgugcaguacaaccucagccacaccuacgcgguggacgccgccaaccacugcgggaccaucgccaacggcguccugcagacguucaugcggauggcguggggcggguccuacaucgcccuggacagcggcaagggguccugggacugcaucaugaccagcuaccaguaccucaucauccagaacaccaccugggaggaccacugccaguucucccgccccagccccaucggcuaccuggggcugcucagccagcggacgcgcgacaucuacaucucccggcgccugcugggcaccuucaccuggacccucagcgacuccgagggcaacgagacgcccgggggcuacugccugacccgguggaugcugaucgaggccgagcucaagugcuucgggaacaccgccguggccaagugcaacgagaagcacgacgaggaguucugcgacaugcugcgccuguucgacuucaacaagcaggcgauccggcgccucaaggccccggcccagaugagcauccagcugaucaacaaggccgugaacgcccugaucaacgaccagcucaucaugaagaaccaccuccgggacaucaugggcauccccuacugcaacuacuccaaguacugcuaccugaaccacaccgucacggggcgcaccagccugccccggugcugccugguguccaacggcagcuaccugaacgagacccacuucuccgacgacaucgagcagcaggcggacaacaugaucaccgagcuccugcagaaggaguacaucgaccgccagggcaagacgccgcuggggcugguggaccucuucgucuucagcaccuccuucuaccugaucagcaucuuccugcaccucgugaagauccccacccaccggcacaucaucggcaagcccugccccaagccgcaccgccugaaccacauggggaucugcuccugcggccuguacaagcaccccggggugcccgucaaguggaagcggugaggacuagucccuguucccagagcccacuuuuuuuucuuuuuuugaaauaaaauagccugucuuucagaucuaaaaaaaaaaaaaaaaaaaaaaaaaaaaaaaaaaaaaaaaaaaaaaaaaaaaaaaaaaaaaaaaaaaaaaaaaaaaaaaaaaaaaaaaaaaaaaaaaaaa

SEQ ID NO: 32281 - RNA, 1740 nt, Artificial Sequence
  mRNA product Design a-2 (A100) comprising derived and/or modified sequence from LASV(LASV254-NIG-2011;Clade II)__AIT17674__GPCmut7 (opt1)
aggagaguccgcucagccagguugcagaagcggcuuagcguguguccuaaucuucucucugcguguagguaggccugugccgcaaacaagcuuaccaugggccagaucaucaccuucuuccaggaggugccccacgucaucgaggaggugaugaacaucgugcugaucgcccucagccugcuggccauccucaaggggaucuacaacgucgcgaccugcggccuguucgggcugguguccuuccuccugcugugcggccgcagcugcuccacgaccuacaaggggguguacgagcuccagacccuggagcuggacaugaccaaccucaacaugacgaugccgcugagcugcaccaagaacaacucccaccacuacaucauggucggcaacgagaccggccuggagcucacccugacgaacaccagcaucaucaaccacaaguucugcaaccuguccgacgcccacaagaagaaccucuacaaccacgcccugaugagcaucaucuccaccuuccaccugagcauccccaacuucaaccaguacgaggccauguccugcgacuucaacgggggcaagaucagcgugcaguacaaccucucccacagcuacgccguggacgcggccaaccacugcgggaccaucgccaacggcguccugcagacguucaugcggauggccuggggcggguccuacaucgcgcuggacagcggcaaggggaacugggacugcaucaugaccuccuaccaguaccucaucauccagaacaccaccugggaggaccacugccaguucagccgccccucccccaucggcuaccuggggcugcucagccagcggacgcgcgacaucuacaucagccggcgccugcugggcaccuucaccuggacccucuccgacagcgagggcaacgagacgcccgggggcuacugccugacccgguggaugcugaucgaggccgagcucaagugcuucgggaacaccgccguggccaagugcaacgagaagcacgacgaggaguucugcgacaugcugcgccuguucgacuucaacaagcaggccauccggcgccucaagaccccggcgcaggccaacauccagcugaucaacaaggccgugaacgcccugaucaacgaccagcucaucaugaagaaccaccuccgggacaucaugggcauccccuacugcaacuacuccaaguacugcuaccugaaccacacggucaccgggaagaccagccugccccgcugcugccugguguccaacggcagcuaccugaacgagacccacuucuccgacgacaucgagcagcaggccgacaacaugaucacggagcuccugcagaaggaguacauggaccggcagggcaagaccccgcuggggcugguggaccucuucgucuucagcaccuccuucuaccugaucagcaucuuccugcaccucgugaagauccccacccaccgccacgugaucggcaagcccugccccaagccgcaccggcugaaccacauggggaucugcuccugcggccuguacaagcaccccgggguccccgugaaguggaagcgcugaggacuagucccuguucccagagcccacuuuuuuuucuuuuuuugaaauaaaauagccugucuuucagaucuaaaaaaaaaaaaaaaaaaaaaaaaaaaaaaaaaaaaaaaaaaaaaaaaaaaaaaaaaaaaaaaaaaaaaaaaaaaaaaaaaaaaaaaaaaaaaaaaaaaa

SEQ ID NO: 32282 - RNA, 1740 nt, Artificial Sequence
  mRNA product Design a-2 (A100) comprising derived and/or modified sequence from LASV(Nig08-A19;Clade III)__ADU56618__GPCmut7 (opt1)
aggagaguccgcucagccagguugcagaagcggcuuagcguguguccuaaucuucucucugcguguagguaggccugugccgcaaacaagcuuaccaugggccagaucgugaccuucuuccaggaggucccccacgugaucgaggaggugaugaacaucguccugaucgcccucagcauccuggccauccugaaggggcucuacaacaucgcgaccugcggccugaucgggcuggugacguuccuccugcuguccggccgcagcugcuccaugaccuacaaggggguguacgagcuccagacccuggagcugaacaugaacacccucaacaugacgaugccgcugagcugcaccaagaacaacucccaccacuacaucauggucggcaacgagaccggccuggagcucacccugacgaacaccagccugcuccaccacaaguucugcaaccuguccgacgcccacaagaagaaccuguacgaccacacccucaugagcaucaucuccaccuuccaccugagcauccccaacuucaaccaguacgaggccauguccugcgacuucaacgggggcaagaucacggugcaguacaaccugagccacuccuacgccaucgacgccgcgaaccacugcgggaccguggccaacggcguccuccagaccuucaugcggauggccuggggcgggagcuacaucgcccuggacuccggccgcgggaagugggacugcaucaugaccagcuaccaguaccugaucauccagaacacgaccugggaggaccacugccaguucucccggcccagccccaucggcuaccucgggcugcugucccagcgcacccgggacaucuacaucagccgccggcuccugggcaccuucacguggacccugagcgacuccgagggcaacgagacccccgggggcuacugccucacccgcuggaugcugaucgaggcggagcugaagugcuucgggaacacggccguggccaagugcaacgagaagcacgacgaggaguucugcgacaugcuccggcuguucgacuucaacaagcaggccauccgccggcugaaggccccggcgcagaugagcauccagcucaucaacaaggccgugaacgcccugaucaacgaccagcugaucaugaagaaccaccuccgcgacaucaugggcauccccuacugcaacuacuccaaguacugcuaccugaaccacaccagcaccgggcggaccucccugccccgcugcugccucgucagcaacggcuccuaccugaacgagacgcacuucagcgacgacaucgagcagcaggccgacaacaugaucaccgagaugcugcagaaggaguaccuggaccggcagggcaagaccccgcucgggcugguggaccuguucguguucuccaccagcuucuaccucaucuccaucuuccugcaccuggucaagauccccacgcaccgccacaucgugggcaagcccugccccaagccgcaccggcucaaccacauggggaucugcagcugcggccuguacaagcagcccggggugcccguccgcuggaagcggugaggacuagucccuguucccagagcccacuuuuuuuucuuuuuuugaaauaaaauagccugucuuucagaucuaaaaaaaaaaaaaaaaaaaaaaaaaaaaaaaaaaaaaaaaaaaaaaaaaaaaaaaaaaaaaaaaaaaaaaaaaaaaaaaaaaaaaaaaaaaaaaaaaaaa

SEQ ID NO: 32283 - RNA, 1743 nt, Artificial Sequence
  mRNA product Design a-2 (A100) comprising derived and/or modified sequence from LASV(G1180-SLE-2010;Clade IV)__AIT17168__GPCmut7 (opt1)
aggagaguccgcucagccagguugcagaagcggcuuagcguguguccuaaucuucucucugcguguagguaggccugugccgcaaacaagcuuaccaugggccagaucgugaccuucuuccaggaggucccccacgugaucgaggaggugaugaacaucguccugaucgcccucagcauccuggccgugcugaaggggcucuacaacuucgcgaccugcggccugguggggcugcucacguuccugcugcucugcggccgcuccugcaccgccagccgguacaagggggucuacgagcugcagacccuggagcucaacauggagacccugaacaugacgaugccgcuguccugcaccaagaacaacagccaccacuacaucauggugggcaacgagaccggccucgagcugacccugacgaacaccuccaucaucaaccacaaguucugcaaccucagcgacgcccacaagaagaaccuguacgaccacgcccugauguccaucaucagcaccuuccaccucuccauccccaacuucaaccaguacgaggccaugagcugcgacuucaacgggggcaagaucuccgugcaguacaaccugagccacuccuacgcgggggacgccgccaaccacugcggcaccgucgccaacggggugcugcagacguucaugcgcauggcguggggcggcagcuacaucgcccucgacuccgggcacggcagcugggacugcaucaugaccuccuaccaguaccugaucauccagaacaccaccugggaggaccacugccaguucagccggcccucccccaucggguaccugggccuccugagccagcgcacgcgggacaucuacaucagccgccggcugcucggcaccuucaccuggacccuguccgacagcgaggggaaggacacgccgggcggguacugccugacccgcuggaugcucaucgaggccgagcugaagugcuucggcaacaccgccguggccaagugcaacgagaagcacgacgaggaguucugcgacaugcugcggcuguucgacuucaacaagcaggcgauccagcgccugaaggcccccgcccagauguccauccagcugaucaacaaggccgucaacgcccucaucaacgaccagcugaucaugaagaaccaccuccgggacaucauggggauccccuacugcaacuacagcaaguacugcuaccucaaccacaccacgaccggcaagaccucccugcccaagugcugccuggugagcaacggcuccuaccucaacgagacccacuucagcgacgacaucgagcagcaggcggacaacaugaucacggagaugcugcagaaggaguacauggagcgccaggggaagaccccgcugggccugguggaccucuucgucuucuccaccagcuucuaccugaucuccaucuuccugcaccucgugaagauccccacccaccggcacaucgugggcaagagcugccccaagccccaccgccugaaccacauggggaucugcuccugcgggcuguacaagcagccgggcguccccgugaaguggaagcggugaggacuagucccuguucccagagcccacuuuuuuuucuuuuuuugaaauaaaauagccugucuuucagaucuaaaaaaaaaaaaaaaaaaaaaaaaaaaaaaaaaaaaaaaaaaaaaaaaaaaaaaaaaaaaaaaaaaaaaaaaaaaaaaaaaaaaaaaaaaaaaaaaaaaa

SEQ ID NO: 32284 - RNA, 1743 nt, Artificial Sequence
  mRNA product Design a-2 (A100) comprising derived and/or modified sequence from LASV(G1442-SLE-2011;Clade IV)__AIT17180__GPCmut7 (opt1)
aggagaguccgcucagccagguugcagaagcggcuuagcguguguccuaaucuucucucugcguguagguaggccugugccgcaaacaagcuuaccaugggccagaucgugaccuucuuccaggaggucccccacgugaucgaggaggugaugaacaucguccugaucgcccucagcauccuggccgugcugaaggggcucuacaacguggcgaccugcggccugaucgggcuggucacguuccuccugcugugcggccgcuccugcaccaccacccucuacaaggggguguacgagcugcagacgcuggagcucaacauggagacccugaacaugaccaugccgcugagcugcaccaagaacaacucccaccacuacauccgggugggcaacgagacgggccucgagcugacccugaccaacaccagcaucaucaaccacaaguucugcaaccucuccgacgcccacaagaagaaccuguacgaccacgcccugaugagcaucaucuccacguuccaccucagcauccccaacuucaaccaguacgaggccauguccugcgacuucaacgggggcaagaucagcguccaguacaaccugucccacagcuacgccggggacgcggccaaccacugcggcaccguggccaacggggugcugcagaccuucaugcgcauggccuggggcggcuccuacaucgcgcucgacagcgggcggggcaacugggacugcaucaugaccuccuaccaguaccugaucauccagaacacgaccugggacgaccacugccaguucagccgccccucccccaucggguaccugggccuccugagccagcggacccgcgacgucuacaucucccggcgccugcucggcaccuucacguggacccugagcgacagcgaggggaaggacaccccgggcggguacugccugacccgguggaugcucaucgaggccgagcugaagugcuucggcaacacggccguggccaagugcaacgagaagcacgacgaggaguucugcgacaugcugcgccucuucgacuucaacaagcaggccauccagcggcugaaggcgcccgcccagauguccauccagcugaucaacaaggccgugaacgcccucaucaacgaccagcugaucaugaagaaccaccuccgcgacaucauggggauccccuacugcaacuacagcaaguacugcuaccugaacaacaccgccaccggcaagaccucccugcccaagugcugccugaucagcaacggcuccuaccucaacgagacgcacuucagcgacgacaucgagcaggaggcggacaacaugaucaccgagaugcugcagaaggaguacauggagcggcaggggaagaccccgcugggccuggucgaccucuucguguucuccaccagcuucuaccugaucuccaucuuccugcaccucgugaagauccccacgcaccgccacaucgucggcaagagcugccccaagccccaccggcugaaccacauggggaucugcuccugcgggcuguacaagcagccgggcgugcccgugcgcuggaagcggugaggacuagucccuguucccagagcccacuuuuuuuucuuuuuuugaaauaaaauagccugucuuucagaucuaaaaaaaaaaaaaaaaaaaaaaaaaaaaaaaaaaaaaaaaaaaaaaaaaaaaaaaaaaaaaaaaaaaaaaaaaaaaaaaaaaaaaaaaaaaaaaaaaaaa

SEQ ID NO: 32285 - RNA, 1743 nt, Artificial Sequence
  mRNA product Design a-2 (A100) comprising derived and/or modified sequence from LASV(G3010-SLE-2013;Clade IV)__AIT17344__GPCmut7 (opt1)
aggagaguccgcucagccagguugcagaagcggcuuagcguguguccuaaucuucucucugcguguagguaggccugugccgcaaacaagcuuaccaugggccagaucgugaccuucuuccaggaggucccccacgugaucgaggaggugaugaacaucguccugaucgcccucagcauccuggccgugcugaaggggcucuacaacuucgcgaccugcggccugguggggcuggucacguuccuccugcugugcggccgcuccugcaccaccagccucuacaaggggguguacgagcugcagacccuggagcucaacauggagacgcugaacaugaccaugccgcuguccugcaccaagaacaacagccaccacuacaucauggugggcaacgagaccggccucgagcugacgcugaccaacaccuccaucaucaaccacaaguucugcaaccucagcgacgcccacaagaagaaccuguacaaccacgcccugauguccaucaucagcaccuuccaccucuccauccccaacuucaaccaguacgaggccaugagcugcgacuucaacgggggcaagaucuccguccaguacaaccugagccacuccuacgccggggacgcggccagccacugcggcacgguggccaacggggugcugcagaccuucaugcggauggccuggggcggcuccuacaucgcgcucgacagcggguacggcaagugggacugcaucaugaccuccuaccaguaccugaucauccagaacaccacgugggaggaccacugccaguucagccgccccucccccaucggguaccugggccuccugagccagcggacccgcgacaucuacaucagccggcgccugcucggcaccuucaccuggacgcuguccgacagcgaggggaaggacaccccgggcggguacugccugacccgguggaugcucaucgaggccgagcugaagugcuucggcaacaccgccgucgccaagugcaacgagaagcacgacgaggaguucugcgacaugcugcgccucuucgacuucaacaagcaggccauccagcggcugaagacgcccgcgcagauguccauccagcugaucaacaaggccgugaacgcccucaucaacgaccagcugaucaugaagaaccaccuccgcgacaucauggggauccccuacugcaacuacagcaaguacugcuaccugaaccacaccaccaccggcaagacgucccugcccaagugcugccuggugagcaacggcuccuaccucaacgagacccacuucagcgacgacaucgagcagcaggccgacaacaugaucaccgagaugcugcagaaggaguacauggagcggcaggggaagaccccgcugggccuggucgaccucuucguguucuccacgagcuucuaccugaucuccaucuuccugcaccucgugaagauccccacccaccgccacaucgucggcaagagcugccccaagccccaccggcugaaccacauggggaucugcuccugcgggcuguacaagcagccgggcgugcccgugcgcuggaagcggugaggacuagucccuguucccagagcccacuuuuuuuucuuuuuuugaaauaaaauagccugucuuucagaucuaaaaaaaaaaaaaaaaaaaaaaaaaaaaaaaaaaaaaaaaaaaaaaaaaaaaaaaaaaaaaaaaaaaaaaaaaaaaaaaaaaaaaaaaaaaaaaaaaaaa

SEQ ID NO: 32286 - RNA, 1743 nt, Artificial Sequence
  mRNA product Design a-2 (A100) comprising derived and/or modified sequence from LASV(G502-SLE-2009;Clade IV)__AIT17126__GPCmut7 (opt1)
aggagaguccgcucagccagguugcagaagcggcuuagcguguguccuaaucuucucucugcguguagguaggccugugccgcaaacaagcuuaccaugggccagaucgugaccuucuuccaggaggucccccacgugaucgaggaggugaugaacaucguccugaucgcccucagcauccuggccgugcugaaggggcucuacaacuucgcgaccugcggccugguggggcugcucacguuccugcugcucugcggccgcuccugcaccaccgggcuguacaagggcgucuacgagcugcagacccucgagcugaacauggagacgcugaacaugaccaugccgcucagcugcaccaagaacaacucccaccacuacaucauggugggcaacgagaccgggcuggagcugacgcucaccaacaccagcaucaucaaccacaaguucugcaaccuguccgacgcccacaagaagaaccuguacgaccacgcccucaugagcaucaucuccaccuuccaccugagcauccccaacuucaaccaguacgaggccauguccugcgacuucaacggcgggaagaucagcgugcaguacaaccugucccacagcuacgccggcgacgcggccgaccacugcgggacggucgccaacggcgugcuccagaccuucaugcggauggccuggggcggguccuacaucgcgcuggacagcggccgcgggcggugggacugcaucaugaccuccuaccaguaccugaucauccagaacaccacgugggaggaccacugccaguucagccgccccucccccaucggcuaccucggccugcugagccagcggacccgcgacaucuacaucucccggcgccuccuggggaccuucaccuggacgcugagcgacagcgagggcaaggacacccccgggggcuacugccucacccgguggaugcugaucgaggccgagcugaagugcuucgggaacaccgccguggccaagugcaacgagaagcacgacgaggaguucugcgacaugcuccgccuguucgacuucaacaagcaggccauccagcggcugaaggcgccggcccagauguccauccagcucaucaacaaggccgucaacgcccugaucaacgaccagcuggugaugaagaaccaccuccgcgacaucaugggcauccccuacugcaacuacagccgguacugcuaccugaaccacacgaccaccggccgcaccucccugcccaagugcugccucgugagcaacggguccuaccugaacgagacgcacuucagcgacgacaucgagcagcaggccgacaacaugaucaccgagaugcugcagaaggaguacauggagcggcagggcaagaccccgcuggggcucgucgaccuguucguguucuccaccagcuucuaccugaucuccaucuuccuccaccuggugaagauccccacgcaccgccacaucgucggcaagagcugccccaagccccaccggcugaaccacauggggaucugcuccugcggccucuacaagcagccgggcgugcccgugaaguggaagcgcugaggacuagucccuguucccagagcccacuuuuuuuucuuuuuuugaaauaaaauagccugucuuucagaucuaaaaaaaaaaaaaaaaaaaaaaaaaaaaaaaaaaaaaaaaaaaaaaaaaaaaaaaaaaaaaaaaaaaaaaaaaaaaaaaaaaaaaaaaaaaaaaaaaaaa

SEQ ID NO: 32287 - RNA, 1743 nt, Artificial Sequence
  mRNA product Design a-2 (A100) comprising derived and/or modified sequence from LASV(G733-SLE-2010;Clade IV)__AIT17154__GPCmut7 (opt1)
aggagaguccgcucagccagguugcagaagcggcuuagcguguguccuaaucuucucucugcguguagguaggccugugccgcaaacaagcuuaccaugggccagaucgugaccuucuuccaggaggucccccacgugaucgaggaggugaugaacaucguccugaucgcccucagcauccuggccgugcugaaggggcucuacaacuucgcgaccugcggcaucguggggcuggucuccuuccugcuccugugcggccgcagcugcacgaccucccuguacaaggggguguacgagcuccagacccuggagcugaacauggagacccucaacaugacgaugccgcugagcugcaccaagaacaacucccaccacuacaucauggugggcaacgagaccggccuggagcucacccugacgaacaccagcaucaucaaccacaaguucugcaaccuguccgacgcccacaagaagaaccucuacgaccacgcccugaugagcaucaucuccaccuuccaccugagcauccccaacuucaaccaguacgaggccauguccugcgacuucaacgggggcaagaucagcguccaguacaaccucucccacagcuacgccggggacgcggccaaccacugcggcaccaucgccaacggggugcugcagacguucaugcggauggccuggggcggcuccuacaucgcgcuggacagcgggcgcgaccggugggacugcaucaugaccuccuaccaguaccucaucauccagaacaccaccugggaggaccacugccaguucagccgccccucccccaucggcuaccuggggcugcucagccagcggacgcgcgacaucuacaucagccggcgccugcugggcaccuucaccuggacccucuccgacagcgagggcaaggacacgcccgggggcuacugccugacccgguggaugcugaucgaggccgagcucaagugcuucgggaacaccgccguggccaagugcaacgagaagcacgacgaggaguucugcgacaugcugcgccuguucgacuucaacaagcaggccauccagcggcucaaggcgccggcccagauguccauccagcugaucaacaaggccgucaacgcccugaucaacgaccagcucaucaugaagaaccaccuccgcgacaucaugggcauccccuacugcaacuacagcaaguacugcuaccugaaccacaccacgaccgggaagaccucccugcccaagugcugccuggugagcaacggcuccuaccugaacgagacccacuucagcgacgacaucgagcagcaggccgacaacaugaucacggagaugcuccagaaggaguacauggagcggcagggcaagaccccgcuggggcugguggaccuguucgucuucuccaccagcuucuaccucaucuccaucuuccugcaccuggugaagauccccacccaccgccacguggucggcaagagcugccccaagccccaccggcucaaccacauggggaucugcuccugcggccuguacgggcagccgggcgugcccgugaaguggaagcgcugaggacuagucccuguucccagagcccacuuuuuuuucuuuuuuugaaauaaaauagccugucuuucagaucuaaaaaaaaaaaaaaaaaaaaaaaaaaaaaaaaaaaaaaaaaaaaaaaaaaaaaaaaaaaaaaaaaaaaaaaaaaaaaaaaaaaaaaaaaaaaaaaaaaaa

SEQ ID NO: 32288 - RNA, 1743 nt, Artificial Sequence
  mRNA product Design a-2 (A100) comprising derived and/or modified sequence from MOPV/LASV reassortant(IGS-1;Clade IV)__AFY05576__GPCmut7 (opt1)
aggagaguccgcucagccagguugcagaagcggcuuagcguguguccuaaucuucucucugcguguagguaggccugugccgcaaacaagcuuaccaugggccagaucgugaccuucuuccaggaggucccccacgugaucgaggaggugaugaacaucguccugaucgcccucagcgugcuggccgugcugaaggggcucuacaacuucgcgaccugcggccuggucgggcuggugacguuccuccugcugugcggccgcuccugcaccaccagccucuacaaggggguguacgagcugcagacccuggagcucaacauggagacgcugaacaugaccaugccgcuguccugcaccaagaacaacagccaccacuacaucauggucggcaacgagaccggccucgagcugacgcugaccaacaccuccaucaucaaccacaaguucugcaaccucagcgacgcccacaagaagaaccuguacgaccacgcccugauguccaucaucagcaccuuccaccucuccauccccaacuucaaccaguacgaggccaugagcugcgacuucaacgggggcaagaucuccgugcaguacaaccugagccacuccuacgccggggacgcggccaaccacugcggcacgguggccaacgggguccugcagaccuucaugcggauggccuggggcggcagcuacaucgcgcucgacuccgggcgcggcaacugggacugcaucaugaccagcuaccaguaccugaucauccagaacaccacgugggaggaccacugccaguucucccggcccagccccaucggguaccugggccuccugucccagcgcacccgggacaucuacaucagccgccggcugcucggcaccuucaccuggacgcugagcgacuccgagggggaggacaccccgggcggguacugccugacccgcuggaugcucaucgaggccgagcugaagugcuucggcaacaccgccguggccaagugcaacgagaagcacgacgaggaguucugcgacaugcugcggcuguucgacuucaacaagcaggccauccagcgccugaaggcgcccgcccagaugagcauccagcugaucaacaaggccgugaacgcccucaucaacgaccagcugaucaugaagaaccaccuccgggacaucauggggauccccuacugcaacuacuccaaguacugcuaccucaaccacacgaccaccggccgcaccagccugcccaagugcugccuggucuccaacggcagcuaccucaacgagacgcacuucuccgacgacaucgagcagcaggccgacaacaugaucaccgagaugcugcagaaggaguacauggagcggcaggggaagaccccgcugggccugguggaccucuucguguucagcaccuccuucuaccugaucagcaucuuccugcaccucgucaagauccccacgcaccgccacaucguggggaaguccugccccaagccccaccggcugaaccacaugggcaucugcagcugcgggcuguacaagcagccgggcgugcccgucaaguggaagcgcugaggacuagucccuguucccagagcccacuuuuuuuucuuuuuuugaaauaaaauagccugucuuucagaucuaaaaaaaaaaaaaaaaaaaaaaaaaaaaaaaaaaaaaaaaaaaaaaaaaaaaaaaaaaaaaaaaaaaaaaaaaaaaaaaaaaaaaaaaaaaaaaaaaaaa

SEQ ID NO: 32289 - RNA, 1743 nt, Artificial Sequence
  mRNA product Design a-2 (A100) comprising derived and/or modified sequence from LASV(LM765-SLE-2012;Clade IV)__AIT17814__GPCmut7 (opt1)
aggagaguccgcucagccagguugcagaagcggcuuagcguguguccuaaucuucucucugcguguagguaggccugugccgcaaacaagcuuaccaugggccagaucgugaccuucuuccaggaggucccccacgugaucgaggaggugaugaacaucguccugaucgcccucagcauccuggccgugcugaaggggcucuacaacuucgcgaccugcggccugguggggcuggucacguuccuccugcugugcggccgcuccugcaccaccagccucuacaaggggguguacgagcugcagacccuggagcucaacauggagacgcugaacaugaccaugccgcuguccugcaccaagaacaacagccaccacuacaucauggugggcaacgagaccggccucgagcugacgcugaccaacaccuccaucaucgaccacaaguucugcaaccucagcgacgcccaccggaagaaccuguacgaccacgcccugauguccaucaucagcaccuuccaccucuccauccccaacuucaaccaguacgaggccaugagcugcgacuucaacgggggcaagaucuccguccaguacaaccugagccacuccuacgccaaggacgcggccgaccacugcgggacgguggccaacggcgugcugcagaccuucaugcgcauggccuggggcgggagcuacaucgcgcucgacuccggccgggggcgcugggacugcaucaugaccagcuaccaguaccugaucauccagaacaccacgugggaggaccacugccaguucucccggcccagccccaucggcuaccuggggcuccugucccagcgcacccgggacaucuacaucagccgccggcugcucggcaccuucaccuggacgcugagcgacuccgagggcaaggacacccccgggggcuacugccugacccgcuggaugcucaucgaggccgagcugaagugcuucgggaacaccgccgucgccaagugcaacgagaagcacgacgaggaguucugcgacaugcugcggcuguucgacuucaacaagcaggccauccagcgccugaaggcgccggcccagaugagcauccagcugaucaacaaggccgugaacgcccucaucaacgaccagcugaucaugaagaaccaccuccgggacaucaugggcauccccuacugcaacuacuccaaguacugcuaccucaaccacacgaccaccgggaagaccagccugcccaagugcugccugguguccaacggcagcuaccucaacgagacgcacuucuccgacgacaucgagcagcaggccgacaacaugaucaccgagaugcugcagaaggaguacauggagcgccagggcaagaccccgcuggggcuggucgaccucuucguguucagcaccuccuucuaccugaucagcaucuuccugcaccucgugaagauccccacgcaccggcacaucgucggcaagcccugccccaagccgcaccgccugaaccacauggggaucugcuccugcggccuguacaagcagcccggggugcccgugaaguggaagcggugaggacuagucccuguucccagagcccacuuuuuuuucuuuuuuugaaauaaaauagccugucuuucagaucuaaaaaaaaaaaaaaaaaaaaaaaaaaaaaaaaaaaaaaaaaaaaaaaaaaaaaaaaaaaaaaaaaaaaaaaaaaaaaaaaaaaaaaaaaaaaaaaaaaaa

SEQ ID NO: 32290 - RNA, 1743 nt, Artificial Sequence
  mRNA product Design a-2 (A100) comprising derived and/or modified sequence from LASV(LM776-SLE-2012;Clade IV)__AIT17824__GPCmut7 (opt1)
aggagaguccgcucagccagguugcagaagcggcuuagcguguguccuaaucuucucucugcguguagguaggccugugccgcaaacaagcuuaccaugggccagaucgugaccuucuuccaggaggucccccacgugaucgaggaggugaugaacaucguccugaucgcccucagcauccuggccgugcugaaggggcucuacaacuucgcgaccugcggccugguggggcuggucacguuccuccugcugugcggccgcuccugcaccaccagcguguacaaggggguguacgagcuccagacccuggagcugaacauggagacgcucaacaugaccaugccgcuguccugcaccaagaacaacagccaccacuacaucauggucggcaacgagaccggccuggagcucacgcugaccaacaccuccaucaucaaccacaaguucugcaaccugagcgacgcccacaagaagaaccucuacgaccacgcccugauguccaucaucagcaccuuccaccuguccauccccaacuucaaccaguacgaggccaugagcugcgacuucaacgggggcaagaucuccgugcaguacaaccucagccacuccuacgccggggacgcggccaaccacugcggcacgguggccaacgggguccugcagaccuucaugcggauggccuggggcggcagcuacaucgcgcuggacuccgggcacggcaagugggacugcaucaugaccagcuaccaguaccucaucauccagaacaccacgugggaggaccacugccaguucucccgccccagccccaucggguaccugggccugcucucccagcggacccgcgacaucuacaucagccggcgccugcugggcaccuucaccuggacgcucagcgacuccgaggggaaggacaccccgggcggguacugccugacccgguggaugcugaucgaggccgagcucaagugcuucggcaacaccgccguggccaagugcaacgagaagcacgacgaggaguucugcgacaugcugcgccuguucgacuucaacaagcaggccauccagcggcucaaggcgcccgcccagaugagcauccagcugaucaacaaggccgugaacgcccugaucaacgaccagcucaucaugaagaaccaccuccgcgacaucauggggauccccuacugcaacuacuccaaguacugcuaccugaaccacacgaccaccggcaagaccagccugcccaagugcugccuggucuccaacggcagcuaccugaacgagacgcacuucuccgacgacaucgagcagcaggccgacaacaugaucaccgagaugcuccagaaggaguacauggagcggcaggggaagaccccgcugggccugguggaccuguucguguucagcaccuccuucuaccucaucagcaucuuccugcaccuggucaagauccccacgcaccgccacaucguggggaaguccugccccaagccccaccggcucaaccacaugggcaucugcagcugcgggcuguacaagcagccgggcgugcccguccgcuggaagcggugaggacuagucccuguucccagagcccacuuuuuuuucuuuuuuugaaauaaaauagccugucuuucagaucuaaaaaaaaaaaaaaaaaaaaaaaaaaaaaaaaaaaaaaaaaaaaaaaaaaaaaaaaaaaaaaaaaaaaaaaaaaaaaaaaaaaaaaaaaaaaaaaaaaaa

SEQ ID NO: 32291 - RNA, 1743 nt, Artificial Sequence
  mRNA product Design a-2 (A100) comprising derived and/or modified sequence from LASV(Mad39;Clade IV)__ANH09722__GPCmut7 (opt1)
aggagaguccgcucagccagguugcagaagcggcuuagcguguguccuaaucuucucucugcguguagguaggccugugccgcaaacaagcuuaccaugggccagaucgugaccuucuuccaggaggucccccacgugaucgaggaggugaugaacaucguccugaucgcccucagcauccuggccgugcugaaggggcucuacaacguggcgaccugcggccugaucgggcuggucacguuccuccugcugugcggccgcuccugcaccaccacccucuacaaggggguguacgagcugcaggcccuggagcucaacauggagacgcugaacaugaccaugccgcugagcugcaccaagaacaacucccaccacuacauccgggugggcaacgagaccggccucgagcugacgcugaccaacaccagccucaucaaccacaaguucugcaaccuguccgacgcccacaagaagaaccuguacgaccacgcccucaugagcaucaucuccaccuuccaccugagcauccccaacuucaaccaguacgaggccauguccugcgacuucaacgacgggaagaucagcguccaguacaaccugucccacacguacgcgggcgacaccgccaaccacugcgggaccguggccaacggcgugcuccagaccuucaugcgcauggccuggggcgggagcuacaucgcgcuggacuccggccgcgggggcugggacugcaucaugacgagcuaccaguaccugaucauccagaacaccaccugggaggaccacugccaguucucccggcccagccccaucggguaccucggccugcugucccagcggacccgcgacaucuacaucagccggcgccuccugggcacguucaccuggacccuguccgacagcgaggggaaggacaccccgggcggguacugccucacgcgguggaugcugaucgaggccgagcugaagugcuucggcaacaccgccgucgccaagugcaacgagaagcacgacgaggaguucugcgacaugcuccgccuguucgacuucaacaagcaggccauccagcggcugaaggcgcccgcccagaugagcauccagcucaucaacaaggccgugaacgcccugaucaacgaccagcugaucaugaagaaccaccuccgcgacaucauggggauccccuacugcaacuacuccaaguacugcuaccugaaccacaccgugaccggcaagacgagccugcccaagugcugccucgucuccaacggcagcuaccugaacgagacccacuucuccgacgacaucgagcagcaggccgacaacaugaucaccgagaugcugcagaaggaguacauggagcggcaggggaagaccccgcugggccucguggaccuguucguguucagcacguccuucuaccugaucagcaucuuccuccaccuggucaagauccccacccaccgccacgugguggggaagcccugccccaagccgcaccggcugaaccacaugggcaucugcuccugcggguucuacaagcagcccggcguccccgugcgcuggaagcggugaggacuagucccuguucccagagcccacuuuuuuuucuuuuuuugaaauaaaauagccugucuuucagaucuaaaaaaaaaaaaaaaaaaaaaaaaaaaaaaaaaaaaaaaaaaaaaaaaaaaaaaaaaaaaaaaaaaaaaaaaaaaaaaaaaaaaaaaaaaaaaaaaaaaa

SEQ ID NO: 32292 - RNA, 1743 nt, Artificial Sequence
  mRNA product Design a-2 (A100) comprising derived and/or modified sequence from LASV(Z0947-SLE-2011;Clade IV)__AIT17840__GPCmut7 (opt1)
aggagaguccgcucagccagguugcagaagcggcuuagcguguguccuaaucuucucucugcguguagguaggccugugccgcaaacaagcuuaccaugggccagaucgugaccuucuuccaggaggucccccacgugaucgaggaggugaugaacaucguccugaucgcccucagcauccuggccgugcugaaggggcucuacaacuucgcgaccugcggccugguggggcuggucacguuccuccugcugugcggccgcuccugcaccaucagccucuacaaggggguguacgagcugcagacccuggagcucaacauggagacccugaacaugacgaugccgcuguccugcaccaagaacaacagccaccacuacaucauggugggcaacgagaccggccucgagcugacccugacgaacaccuccaucaucaaccacaaguucugcaaccucagcgacgcccacaagaagaaccuguacgaccacgcccugauguccaucaucagcaccuuccaccucuccauccccaacuucaaccaguacgaggccaugagcugcgacuucaacgggggcaagaucuccguccaguacaaccugagccacuccuacgccggggacgcggccaaccacugcggcaccguggccaacggggugcugcagacguucaugcggauggccuggggcggcagcuacaucgcgcucgacuccgggcgcgaccggugggacugcaucaugaccagcuaccaguaccugaucauccagaacaccaccugggaggaccacugccaguucucccgccccagccccaucggcuaccuggggcuccugucccagcggacgcgcgacaucuacaucagccggcgccugcucggcaccuucaccuggacccugagcgacuccgagggcaaggacacgcccgggggcuacugccugacccgguggaugcucaucgaggccgagcugaagugcuucgggaacaccgccgucgccaagugcaacgagaagcacgacgaggaguucugcgacaugcugcgccucuucgacuucaacaagcaggccauccagcggcugaaggcgccggcccagaugagcauccagcugaucaacaaggccgugaacgcccucaucaacgaccagcugaucaugaagaaccaccuccgcgacaucaugggcauccccuacugcaacuacuccaaguacugcuaccugaaccacaccacgaccgggaagaccagccugcccaagugcugccugguguccaacggcagcuaccucaacgagacccacuucuccgacgacaucgagcagcaggccgacaacaugaucacggagaugcugcagaaggaguacauggagcggcagggcaagaccccgcuggggcuggucgaccucuucguguucagcaccuccuucuaccugaucagcaucuuccugcaccucgugaagauccccacccaccgccacaucgucggcaagcccugccccaagccgcaccggcugaaccacauggggaucugcuccugcggccuguacaagcagcccggggugcccgugaaguggaagcgcugaggacuagucccuguucccagagcccacuuuuuuuucuuuuuuugaaauaaaauagccugucuuucagaucuaaaaaaaaaaaaaaaaaaaaaaaaaaaaaaaaaaaaaaaaaaaaaaaaaaaaaaaaaaaaaaaaaaaaaaaaaaaaaaaaaaaaaaaaaaaaaaaaaaaa

SEQ ID NO: 32293 - RNA, 1743 nt, Artificial Sequence
  mRNA product Design a-2 (A100) comprising derived and/or modified sequence from LASV(Josiah;Clade IV)__NP_694870__GPCmut7 (opt4)
aggagaguccgcucagccagguugcagaagcggcuuagcguguguccuaaucuucucucugcguguagguaggccugugccgcaaacaagcuuaccaugggccagaucgugaccuucuuccaggaggugccccacgugaucgaggaggugaugaacaucgugcugaucgcccugagcgugcuggccgugcugaagggccuguacaacuucgccaccugcggccuggugggccuggugaccuuccugcugcugugcggcagaagcugcaccaccagccuguacaagggcguguacgagcugcagacccuggagcugaacauggagacccugaacaugaccaugccccugagcugcaccaagaacaacagccaccacuacaucauggugggcaacgagaccggccuggagcugacccugaccaacaccagcaucaucaaccacaaguucugcaaccugagcgacgcccacaagaagaaccuguacgaccacgcccugaugagcaucaucagcaccuuccaccugagcauccccaacuucaaccaguacgaggccaugagcugcgacuucaacggcggcaagaucagcgugcaguacaaccugagccacagcuacgccggcgacgccgccaaccacugcggcaccguggccaacggcgugcugcagaccuucaugagaauggccuggggcggcagcuacaucgcccuggacagcggcagaggcaacugggacugcaucaugaccagcuaccaguaccugaucauccagaacaccaccugggaggaccacugccaguucagcagacccagccccaucggcuaccugggccugcugagccagagaaccagagacaucuacaucagcagaagacugcugggcaccuucaccuggacccugagcgacagcgagggcaaggacacccccggcggcuacugccugaccagauggaugcugaucgaggccgagcugaagugcuucggcaacaccgccguggccaagugcaacgagaagcacgacgaggaguucugcgacaugcugagacuguucgacuucaacaagcaggccauccagagacugaaggcccccgcccagaugagcauccagcugaucaacaaggccgugaacgcccugaucaacgaccagcugaucaugaagaaccaccugagagacaucaugggcauccccuacugcaacuacagcaaguacugcuaccugaaccacaccaccaccggcagaaccagccugcccaagugcugccuggugagcaacggcagcuaccugaacgagacccacuucagcgacgacaucgagcagcaggccgacaacaugaucaccgagaugcugcagaaggaguacauggagagacagggcaagaccccccugggccugguggaccuguucguguucagcaccagcuucuaccugaucagcaucuuccugcaccuggugaagauccccacccacagacacaucgugggcaagagcugccccaagccccacagacugaaccacaugggcaucugcagcugcggccuguacaagcagcccggcgugcccgugaaguggaagagaugaggacuagucccuguucccagagcccacuuuuuuuucuuuuuuugaaauaaaauagccugucuuucagaucuaaaaaaaaaaaaaaaaaaaaaaaaaaaaaaaaaaaaaaaaaaaaaaaaaaaaaaaaaaaaaaaaaaaaaaaaaaaaaaaaaaaaaaaaaaaaaaaaaaaa

SEQ ID NO: 32294 - RNA, 1740 nt, Artificial Sequence
  mRNA product Design a-2 (A100) comprising derived and/or modified sequence from LASV(LP;Clade I)__AAF86701__GPCmut7 (opt4)
aggagaguccgcucagccagguugcagaagcggcuuagcguguguccuaaucuucucucugcguguagguaggccugugccgcaaacaagcuuaccaugggccagaucaucaccuucuuccaggaggugccccacgugaucgaggaggugaugaacaucgugcugaucgcccugagccugcuggccauccugaagggccuguacaacaucgccaccugcggcaucaucggccugguggccuuccuguuccugugcggcaagagcugcagccugacccugaagggcggcuacgagcugcagacccuggagcugaacauggagacccugaacaugaccaugccccugagcugcaccaagaacagcagccaccacuacaucagagugggcaacgagaccggccuggagcugacccugaccaacaccagcaucaucaaccacaaguucugcaaccugagcgacgcccacaagaagaaccuguacgaccacgcccugaugagcaucaucagcaccuuccaccugagcauccccaacuucaaccaguacgaggccaugagcugcgacuucaacggcggcaagaucagcgugcaguacaaccugagccacagcuacgccggcgacgccgccgagcacugcggcaccguggccaacggcgugcugcagaccuucaugagaauggccuggggcggcagauacaucgcccuggacagcggcaagggcaacugggacugcaucaugaccagcuaccaguaccugaucauccagaacaccaccugggaggaccacugccaguucagcagacccagccccaucggcuaccugggccugcugagccagagaaccagagacaucuacaucagcagaagacugcugggcaccuucaccuggacccugagcgacagcgagggcaacgagacccccggcggcuacugccugaccagauggaugcugaucgaggccgagcugaagugcuucggcaacaccgccguggccaagugcaacgagaagcacgacgaggaguucugcgacaugcugagacuguucgacuucaacaagcaggccaucagaagacugaaggcccccgcccagaugagcauccagcugaucaacaaggccgugaacgcccugaucaacgaccagcugaucaugaagaaccaccugagagacaucaugggcauccccuacugcaacuacagcaaguacugcuaccugaaccacaccagcagcggcagaaccagccugcccaagugcugccugaucagcaacggcagcuaccugaacgagacccaguucagcgacgacaucgagcagcaggccgacaacaugaucaccgagaugcugcagaaggaguacaucgagagacagggcaagaccccccugggccugguggacaucuucaucuucagcaccagcuucuaccugaucagcaucuuccugcaccugaucaagauccccacccacagacacaucgugggcaagcccugccccaagccccacagacugaaccacaugggcgugugcagcugcggccuguacaagcaccccggcgugcccaccaaguggaagagaugaggacuagucccuguucccagagcccacuuuuuuuucuuuuuuugaaauaaaauagccugucuuucagaucuaaaaaaaaaaaaaaaaaaaaaaaaaaaaaaaaaaaaaaaaaaaaaaaaaaaaaaaaaaaaaaaaaaaaaaaaaaaaaaaaaaaaaaaaaaaaaaaaaaaa

SEQ ID NO: 32295 - RNA, 1740 nt, Artificial Sequence
  mRNA product Design a-2 (A100) comprising derived and/or modified sequence from LASV(803213;Clade II)__AAF86703__GPCmut7 (opt4)
aggagaguccgcucagccagguugcagaagcggcuuagcguguguccuaaucuucucucugcguguagguaggccugugccgcaaacaagcuuaccaugggccagaucaucaccuucuuccaggaggugccccacgugaucgaggaggugaugaacaucgugcugaucgcccugagccugcuggccauccugaagggcaucuacaacguggccaccugcggccuguucggccugaucagcuuccugcugcugugcggcagaagcugcagcgugaccuacaagggcguguacgagcugcagacccuggagcugaacauggccaaccugaacaugaccaugccccugagcugcaccaagaacaacagccaccacuacaucauggugggcaacgagaccggccuggagcugacccugaccaacaccagcaucaucaaccacaaguucugcaaccugagcgacgcccacaagaagaaccuguacgaccacgcccugaugagcaucaucagcaccuuccaccugagcauccccaacuucaaccaguacgaggccaugagcugcgacuucaacggcggcaagaucagcgugcaguacaaccugagccacagcuucgccguggacgccgccaaccacugcggcaccaucgccaacggcgugcugcagaccuucaugagaauggccuggggcggcagcuacaucgcccuggacagcggcaagggcaacugggacugcaucaugaccagcuaccaguaccugaucauccagaacaccaccugggaggaccacugccaguucagcagacccagccccaucggcuaccugggccugcugagccagagaaccagagacaucuacaucagcagaagacugcugggcaccuucaccuggacccugagcgacagcgagggcaacgaggcccccggcggcuacugccugaccagauggaugcugaucgaggccgagcugaagugcuucggcaacaccgccguggccaagugcaacgagaagcacgacgaggaguucugcgacaugcugagacuguucgacuucaacaagcaggccaucaagagacugaagacccccgcccagaugagcauccagcugaucaacaaggccgugaacgcccugaucaacgaccagcugaucaugaagaaccaccugagagacaucaugggcauccccuacugcaacuacagcagauacugcuaccugaaccacaccgugaccggcaagaccagccugcccagaugcugccuggugagcaacggcagcuaccugaacgagacccacuucagcgacgacaucgagcagcaggccgacaacaugaucaccgagaugcugcagaaggaguacauggacagacagggcaagaccccccugggccugguggaccuguucguguucagcaccagcuucuaccugaucagcaucuuccugcaccuggugaagauccccacccacagacacaucgugggcaagcccugccccaagccccacagacugaaccacaugggcaucugcagcugcggccuguacaagcaccccggcgugcccgugaaguggaagagaugaggacuagucccuguucccagagcccacuuuuuuuucuuuuuuugaaauaaaauagccugucuuucagaucuaaaaaaaaaaaaaaaaaaaaaaaaaaaaaaaaaaaaaaaaaaaaaaaaaaaaaaaaaaaaaaaaaaaaaaaaaaaaaaaaaaaaaaaaaaaaaaaaaaaa

SEQ ID NO: 32296 - RNA, 1740 nt, Artificial Sequence
  mRNA product Design a-2 (A100) comprising derived and/or modified sequence from LASV(GA391;Clade III)__CAA36645__GPCmut7 (opt4)
aggagaguccgcucagccagguugcagaagcggcuuagcguguguccuaaucuucucucugcguguagguaggccugugccgcaaacaagcuuaccaugggccagaucgugaccuucuuccaggaggugccccacgugaucgaggaggugaugaacaucgugcugaucgcccugagcauccuggccauccugaagggccuguacaacguggccaccugcggccugaucggccuggugaccuuccugcugcugagcggcagaagcugcagccugaucuacaagggcaccuacgagcugcagacccuggagcugaacauggagacccugaacaugaccaugccccugagcugcaccaagaacaacagccaccacuacaucagagugggcaacgagaccggccuggagcugacccugaccaacaccagcauccugaaccacaaguucugcaaccugagcgacgcccacaagagaaaccuguacgaccacagccugaugagcaucaucagcaccuuccaccugagcauccccaacuucaaccaguacgaggccaugagcugcgacuucaacggcggcaagaucaccgugcaguacaaccugagccacagcuucgccguggacgccgccggccacugcggcacccuggccaacggcgugcugcagaccuucaugagaauggccuggggcggcagcuacaucgcccuggacagcggcagaggcaacugggacugcaucaugaccagcuaccaguaccugaucauccagaacaccaccugggacgaccacugccaguucagcagacccagccccaucggcuaccugggccugcugagccagagaaccagagacaucuacaucagcagaagacugcugggcaccuucaccuggacccugagcgacagcgagggcaacgagacccccggcggcuacugccugaccagauggaugcugaucgaggccgagcugaagugcuucggcaacaccgccguggccaagugcaacgagaagcacgacgaggaguucugcgacaugcugagacuguucgacuucaacaagcaggccaucagaagacugaagacccccgcccagaugagcauccagcugaucaacaaggccgugaacgcccugaucaacgaccagcugaucaugaagaaccaccugagagacaucaugggcauccccuacugcaacuacagcagauacugcuaccugaaccacaccagcaccggcaagaccagccugcccagaugcugccugaucagcaacggcagcuaccugaacgagaccaaguucagcgacgacaucgagcagcaggccgacaacaugaucaccgagaugcugcagaaggaguacaucgacagacagggcaagaccccccugggccugguggaccuguucguguucagcaccagcuucuaccugaucagcaucuuccugcaccuggugaagauccccacccacagacacaucgugggcaagcccugccccaagccccacagacugaaccacaugggcaucugcagcugcggccuguacaagcagcccggcgugcccgugagauggaagagaugaggacuagucccuguucccagagcccacuuuuuuuucuuuuuuugaaauaaaauagccugucuuucagaucuaaaaaaaaaaaaaaaaaaaaaaaaaaaaaaaaaaaaaaaaaaaaaaaaaaaaaaaaaaaaaaaaaaaaaaaaaaaaaaaaaaaaaaaaaaaaaaaaaaaa

SEQ ID NO: 32297 - RNA, 1743 nt, Artificial Sequence
  mRNA product Design a-2 (A100) comprising derived and/or modified sequence from LASV(AV;Clade V)__CCA30314__GPCmut7 (opt4)
aggagaguccgcucagccagguugcagaagcggcuuagcguguguccuaaucuucucucugcguguagguaggccugugccgcaaacaagcuuaccaugggccagaucgugaccuucuuccaggaggugccccacgugaucgaggaggugaugaacaucgugcugaucgcccugagcauccuggccgugcugaagggccuguacaacaucgccaccugcggccugaucggccugaucaccuuccugcugcugugcggcagaagcugcagcagcaaccuguacaagggcguguacgagcugcagagccuggaccugaacauggagacccugaacaugaccaugccccugagcugcaccaagaacaacagccaccacuacaucagagugggcaacgacaccggccuggagcugacccugaccaacaccagcauccugaaccacaaguucugcaaccugagcgacgcccacaagaaggaccuguacgaccacgcccugaugagcaucaucagcaccuuccaccugagcauccccaacuucaaccaguacgaggccaugagcugcgacuucaacggcggcaagaucagcgugcaguacaaccugagccacagcuacgccaucgacgccgccaaccacugcggcaccguggccaacggcauccugcagaccuucaugagaauggccuggggcggcagcuacaucgcccuggacagcggcagaggcaacugggacugcaucaugaccagcuaccaguaccugaucauccagaacaccaccugggagaaccacugccaguucagcagacccagccccaucggcuaccugggccugcugagccagagaaccagagacaucuacaucagcagaagacugcugggcaccuucaccuggacccugagcgacagcgagggcaacgccacccccggcggcuacugccugaccagauggaugcugaucgaggccgagcugaagugcuucggcaacaccgccguggccaagugcaacgagaagcacgacgaggaguucugcgacaugcugagacuguucgacuucaacaagcaggccaucagcagacugaagagccccgcccagaugagcauccagcugaucaacaaggccgugaacgcccugaucaacgaccagcugaucaugaagaaccaccugagagacaucaugggcauccccuacugcaacuacagcaaguacugcuaccugaaccacaccaucaccggcaagaccagccugcccaagugcugccuggugagcaacggcagcuaccugaacgagacccacuucagcgacgacaucgagcagcaggccgacaacaugaucaccgagaugcugcagaaggaguacauggagagacagggcaagaccccccugggccugguggaccuguucguguucagcaccagcuucuaccugaucagcaucuuccugagacuggugaagauccccacccacagacacaucgugggcaagcccugccccaagccccacagacugaaccacaugggcaucugcagcugcggccuguacaagcagcccggcgugcccgugagauggaagagaugaggacuagucccuguucccagagcccacuuuuuuuucuuuuuuugaaauaaaauagccugucuuucagaucuaaaaaaaaaaaaaaaaaaaaaaaaaaaaaaaaaaaaaaaaaaaaaaaaaaaaaaaaaaaaaaaaaaaaaaaaaaaaaaaaaaaaaaaaaaaaaaaaaaaa

SEQ ID NO: 32298 - RNA, 1740 nt, Artificial Sequence
  mRNA product Design a-2 (A100) comprising derived and/or modified sequence from LASV(Togo/2016/7082;Clade VI)__AMR44577__GPCmut7 (opt4)
aggagaguccgcucagccagguugcagaagcggcuuagcguguguccuaaucuucucucugcguguagguaggccugugccgcaaacaagcuuaccaugggccagaucaucaccuucuuccaggaggugccccacgugaucgaggaggugaugaacaucgugcugaucgcccugagccugcuggccauccugaagggcguguacaacguggccaccugcggcaucaucggccuggugaccuuccuguuccugugcggcagaagcugcagccugaucuacaagggcagcuacgagcugcagacccuggagcugaacauggagacccugaacaugaccaugccccugagcugcaccaagaacagcagccaccacuacaucagagugggcaacgagaccggccuggagcugacccugaccaacaccagcaucaucaaccacaaguucugcaaccugagcgacgcccacaagagaaaccuguacgaccacgcccugaugagcauccugagcaccuuccaccugagcauccccaacuucaaccaguacgaggccaugagcugcgacuucaacggcggcaagaucagcgugcaguacaaccugagccacgccuacgccguggacgccgccgagcacugcggcaccguggccaacggcgugcugcagaccuucaugagaauggccuggggcggcagcuacaucgcccuggacagcggcagaggcaacugggacugcaucaugaccagcuaccaguaccugaucauccagaacaccaccugggaggaccacugccaguucagcagacccagccccaucggcuaccugggccugcugagccagagaaccagagacaucuacaucagcagaagacugcugggcaccuucaccuggacccugagcgacagcgagggcaacgagacccccggcggcuacugccugaccagauggaugcugaucgaggccgagcugaagugcuucggcaacaccgccguggccaagugcaacgagaagcacgacgaggaguucugcgacaugcugagacuguucgacuucaacaagcaggccauccagagacugaagagccccgcccagaugagcauccagcugaucaacaaggccgugaacgcccugaucaacgaccagcugaucaugaagaaccaccugagagacaugaugggcauccccuacugcaacuacagcaaguacugcuaccugaaccacaccagcagcggcagaaccagccugcccaagugcugccuggugagcaacggcagcuaccugaacgagacccacuucagcgacgacaucgagcagcaggccgacaacaugaucaccgagaugcugcagaaggaguacaucgacagacagggcaagaccccccugggccugguggaccuguucguguucagcaccagcuucuaccugaucagcaucuuccugcaccugaucaagauccccacccacagacacaucgugggcaagcccugccccaagccccacagacugaaccacaugggcaucugcagcugcggccuguacaagcagcccggcgugcccaccagauggaagagaugaggacuagucccuguucccagagcccacuuuuuuuucuuuuuuugaaauaaaauagccugucuuucagaucuaaaaaaaaaaaaaaaaaaaaaaaaaaaaaaaaaaaaaaaaaaaaaaaaaaaaaaaaaaaaaaaaaaaaaaaaaaaaaaaaaaaaaaaaaaaaaaaaaaaa

SEQ ID NO: 32299 - RNA, 1740 nt, Artificial Sequence
  mRNA product Design a-2 (A100) comprising derived and/or modified sequence from LASV(KAK-428;Clade n.d. (VII))__ANH09740__GPCmut7 (opt4)
aggagaguccgcucagccagguugcagaagcggcuuagcguguguccuaaucuucucucugcguguagguaggccugugccgcaaacaagcuuaccaugggccagaucgugaccuucuuccaggaggugccccacgugaucgaggaggugaugaacaucgugcugaucgcccugagccugcuggccauccugaagggccuguacaacuucgccaccugcggcgugaucggccugaucaccuuccugcugcugugcggcagaagcugcagcgccaccuacaagggccaguacgagcugcagacccuggagcugaacauggagagccugaacaugaccaugccccugagcugcaccaagaacaacagccaccacuacaucagagccggcaacaacaccggccuggagcugacccugaccaacaccagcaucaucagccacaaguucugcaaccugagcgacgcccacaagaagaaccuguacgaccacacccugaugagcaucaucaccaccuuccaccugagcauccccaacuucaaccaguacgaggccaugagcugcgacuucaacggcggcaagaucagcauccaguacaaccugagccacagcuacgccggcgacgccgcccagcacugcggcaccguggccaacggcgugcugcagaccuucaugagaauggccuggggcggcagcuaccuggcccuggacagcggcagaagaggcugggacugcaucaucagcagcuaccaguaccugaucauccagaacaccaccugggacgaccacugccaguucagcagacccagccccaucggcuaccugggcuucgugagccagaagaccagagacaucuacaucagcagaagacugcugggcaccuucaccuggacccugagcgacagcgagggccacgacaugcccggcggcuacugccugaccagauggaugcugaucgaggccgaccugaagugcuucggcaacaccgccguggccaagugcaacgagaagcacgacgaggaguucugcgacauguggagacuguucgacuucaacaagcaggccauccagagacugaaggcccccgcccagaugaacauccagcugaucaacaaggccgugaacgcccugaucaacgaccagcugaugaugaagaaccaccugagagacaucaugggcauccccuacugcaacuacagcaaguucugcuaccugaacaacaccaccaccggcagaaccagccugcccagaugcugccugaucagcaacggcagcuaccugaacgagacccacuucagcgacgacaucgagcagcaggccgacaacaugaucaccgagaugcugcagaaggaguacauggacagacagggcaagaccccccugggccugguggaccuguucguguucagcaccagcuucuaccugaucaccaucuuccugcaccuggugaagauccccacccacagacacaucgugggcaagcccugccccaagccccacagacugaaccacaugggcaucugcagcugcggccuguacaagcagcccggcgugcccgugagauggaagagaugaggacuagucccuguucccagagcccacuuuuuuuucuuuuuuugaaauaaaauagccugucuuucagaucuaaaaaaaaaaaaaaaaaaaaaaaaaaaaaaaaaaaaaaaaaaaaaaaaaaaaaaaaaaaaaaaaaaaaaaaaaaaaaaaaaaaaaaaaaaaaaaaaaaaa

SEQ ID NO: 32300 - RNA, 1740 nt, Artificial Sequence; identical to SEQ ID NO: 32294
  mRNA product Design a-2 (A100) comprising derived and/or modified sequence from LASV(Pinneo-NIG-1969;Clade I)__AIT17836__GPCmut7 (opt4)

SEQ ID NO: 32301 - RNA, 1740 nt, Artificial Sequence
  mRNA product Design a-2 (A100) comprising derived and/or modified sequence from LASV(ISTH0009-NIG-2011;Clade II)__AIT17404__GPCmut7 (opt4)
aggagaguccgcucagccagguugcagaagcggcuuagcguguguccuaaucuucucucugcguguagguaggccugugccgcaaacaagcuuaccaugggccagaucaucaccuucuuccaggaggugccccacgugaucgaggaggugaugaacaucgugcugaucgcccugagccugcuggccauccugaagggcaucuacaacguggccaccugcggccuguucggccuggugagcuuccugcugcugugcggcagaagcugcagcaccaccuacaagggcguguacgagcugcagacccuggagcuggacauggccagccugaacaugaccaugccccugagcugcaccaagaacaacagccaccacuacaucauggugggcaacgagaccggccuggagcugacccugaccaacaccagcaucaucaaccacaaguucugcaaccugagcgacgcccacaagaagaaccuguacgaccacgcccugaugagcaucaucagcaccuuccaccugagcauccccaacuucaaccaguacgaggccaugagcugcgacuucaacggcggcaagaucagcgugcaguacaaccugagccacgccuacgccguggacgccgccaaccacugcggcaccaucgccaacggcgugcugcagaccuucaugagaauggccuggggcggcagcuacaucgcccuggacagcggcaagggcagcugggacugcaucaugaccagcuaccaguaccugaucauccagaacaccaccugggaggaccacugccaguucagcagacccagccccaucggcuaccugggccugcugagccagagaaccagagacaucuacaucagcagaagacugcugggcaccuucaccuggacccugagcgacagcgagggcaacgagacccccggcggcuacugccugaccagauggaugcugaucgaggccgagcugaagugcuucggcaacaccgccguggccaagugcaacgagaagcacgacgaggaguucugcgacaugcugagacuguucgacuucaacaagcaggccaucagaagacugaagacccccgcccagaugagcauccagcugaucaacaaggccgugaacgcccugaucaacgaccagcugaucaugaagaaccaccugagagacaucaugggcauccccuacugcaacuacagcaaguacugcuaccugaaccacaccgugaccggcaagaccagccugcccagaugcugccuggugagcaacggcagcuaccugaacgagacccacuucagcgacgacaucgagcagcaggccgacaacaugaucaccgagcugcugcagaaggaguacauggacagacagggcaagaccccccugggccugguggaccuguucguguucagcaccagcuucuaccugaucagcaucuuccugcaccugaucaagauccccacccacagacacaucaccggcaagcccugccccaagccccacagacugaaccacaugggcaucugcagcugcggccuguacaagcaccccggcgugcccgugaaguggaagagaugaggacuagucccuguucccagagcccacuuuuuuuucuuuuuuugaaauaaaauagccugucuuucagaucuaaaaaaaaaaaaaaaaaaaaaaaaaaaaaaaaaaaaaaaaaaaaaaaaaaaaaaaaaaaaaaaaaaaaaaaaaaaaaaaaaaaaaaaaaaaaaaaaaaaa

SEQ ID NO: 32302 - RNA, 1740 nt, Artificial Sequence
  mRNA product Design a-2 (A100) comprising derived and/or modified sequence from LASV(ISTH2010-NIG-2012;Clade II)__AIT17482__GPCmut7 (opt4)
aggagaguccgcucagccagguugcagaagcggcuuagcguguguccuaaucuucucucugcguguagguaggccugugccgcaaacaagcuuaccaugggccagaucaucaccuucuuccaggaggugccccacgugaucgaggaggugaugaacaucgugcugaucgcccugagccugcuggccauccugaagggcaucuacaacguggccaccugcggccuguucggccuggugagcuuccugcugcugugcggcagaagcugcagcaccaccuacaagggcguguacgagcugcagacccuggagcuggacauggccagccugaacaugaccaugccccugagcugcaccaagaacaacagccaccacuacaucauggugggcaacgagaccggccuggagcugacccugaccaacaccagcaucaucaaccacaaguucugcaaccugagcgacgcccacaagaagaaccuguacgaccacgcccugaugagcaucaucagcaccuuccaccugagcauccccaacuucaaccaguacgaggccaugagcugcgacuucaacggcggcaagaucagcgugcaguacaaccugagccacgccuacgccguggacgccgccaaccacugcggcaccaucgccaacggcgugcugcagaccuucaugagaauggccuggggcggcagcuacaucgcccuggacagcggcaagggcagcugggacugcaucaugaccagcuaccaguaccugaucauccagaacaucaccugggaggaccacugccaguucagcagacccagccccaucggcuaccugggccugcugagccagagaaccagagacaucuacaucagcagaagacugcugggcaccuucaccuggacccugagcgacagcgagggcaacgagacccccggcggcuacugccugaccagauggaugcugaucgaggccgagcugaagugcuucggcaacaccgccguggccaagugcaacgagaagcacgacgaggaguucugcgacaugcugagacuguucgacuucaacaagcaggccaucagaagacugaagacccccgcccagaugagcauccagcugaucaacaaggccgugaacgcccugaucaacgaccagcugaucaugaagaaccaccugagagacaucaugggcauccccuacugcaacuacagcaaguacugcuaccugaaccacaccgugaccggcaagaccagccugcccagaugcugccuggugagcaacggcagcuaccugaacgagacccacuucagcgacgacaucgagcagcaggccgacaacaugaucaccgagcugcugcagaaggaguacaucgacagacagggcaagaccccccugggccugguggaccuguucguguucagcaccagcuucuaccugaucagcaucuuccugcaccuggugaagauccccacccacagacacguggugggcaagcccugccccaagccccacagacugaaccacaugggcaucugcagcugcggccuguacaagcaccccggcgugcccgugaaguggaagagaugaggacuagucccuguucccagagcccacuuuuuuuucuuuuuuugaaauaaaauagccugucuuucagaucuaaaaaaaaaaaaaaaaaaaaaaaaaaaaaaaaaaaaaaaaaaaaaaaaaaaaaaaaaaaaaaaaaaaaaaaaaaaaaaaaaaaaaaaaaaaaaaaaaaaa

SEQ ID NO: 32303 - RNA, 1740 nt, Artificial Sequence
  mRNA product Design a-2 (A100) comprising derived and/or modified sequence from LASV(Lassa virus/H.sapiens-wt/NGA/2015/ISTH_0543;Clade II)__AVO03639__GPCmut7 (opt4)
aggagaguccgcucagccagguugcagaagcggcuuagcguguguccuaaucuucucucugcguguagguaggccugugccgcaaacaagcuuaccaugggccagaucaucaccuucuuccaggaggugccccacgugaucgaggaggugaugaacaucgugcugaucgcccugagccugcuggccauccugaagggcaucuacaacguggccaccugcggccuguucggccuggugagcuuccugcugcugugcggcagaagcugcagcaccaccuacaagggcguguacgagcugcagacccuggagcuggacauggccaaccugaacaugaccaugccccugagcugcaccaagaacaacagccaccacuacaucauggugggcaacgagaccggccuggagcugacccugaccaacaccagcaucaucaaccacaaguucugcaaccugagcgacgcccacaagaagaaccuguacgaccacgcccugaugagcaucaucagcaccuuccaccugagcauccccaacuucaaccaguacgaggccaugagcugcgacuucaacggcggcaagaucagcgugcaguacaaccugagccacaccuacgccguggacgccgccaaccacugcggcaccaucgccaacggcgugcugcagaccuucaugagaauggccuggggcggcagcuacaucgcccuggacagcggcaagggcagcugggacugcaucaugaccagcuaccaguaccuggugauccagaacaccaccugggaggaccacugccaguucagcagacccagccccaucggcuaccugggccugcugagccagagaaccagagacaucuacaucagcagaagacugcugggcaccuucaccuggacccugagcgacagcgagggcaacgagacccccggcggcuacugccugaccagauggaugcugaucgaggccgagcugaagugcuucggcaacaccgccguggccaagugcaacgagaagcacgacgaggaguucugcgacaugcugagacuguucgacuucaacaagcaggccaucagaagacugaagacccccgcccagaugagcauccagcugaucaacaaggccgugaacgcccugaucaacgaccagcugaucaugaagaaccaccugagagacaucaugggcauccccuacugcaacuacagcaaguacugcuaccugaaccacaccgugaccggcaagaccagccugcccagaugcugccuggugagcaacggcagcuaccugaacgagacccacuucagcgacgacaucgagcagcaggccgacaacaugaucaccgagcugcugcagaaggaguacaucgacagacagggcaagaccccccugggccugguggaccuguucguguucagcaccagcuucuaccugaucagcaucuuccugcaccuggugaagauccccacccacagacacaucaccggcaagcccugccccaagccccacagacugaaccacaugggcaucugcagcugcggccuguacaagcaccccggcgugcccgugaaguggaagagaugaggacuagucccuguucccagagcccacuuuuuuuucuuuuuuugaaauaaaauagccugucuuucagaucuaaaaaaaaaaaaaaaaaaaaaaaaaaaaaaaaaaaaaaaaaaaaaaaaaaaaaaaaaaaaaaaaaaaaaaaaaaaaaaaaaaaaaaaaaaaaaaaaaaaa

SEQ ID NO: 32304 - RNA, 1740 nt, Artificial Sequence
  mRNA product Design a-2 (A100) comprising derived and/or modified sequence from LASV(Lassa virus/H.sapiens-wt/NGA/2016/ISTH_0009;Clade II)__AVO03571__GPCmut7 (opt4)
aggagaguccgcucagccagguugcagaagcggcuuagcguguguccuaaucuucucucugcguguagguaggccugugccgcaaacaagcuuaccaugggccagaucaucaccuucuuccaggaggugccccacgugaucgaggaggugaugaacaucgugcugaucgcccugagccugcuggccauccugaagggcaucuacaacguggccaccugcggccugcugggccuggugagcuuccugcugcugugcggcagaagcugcagcaccaccuacaagggcguguacgagcugcagacccuggagcuggacauggccagccugaacaugaccaugccccugagcugcaccaagaacaacagccaccacuacaucauggugggcaacgagaccggccuggagcugacccugaccaacaccagcaucaucaaccacaaguucugcaaccugagcgacgcccacaagaagaaccuguacgaccacgcccugaugagcaucaucagcaccuuccaccugagcauccccaacuucaaccaguacgaggccaugagcugcgacuucaacggcggcagaaucagcgugcaguacaaccugagccacagcuacgccguggacgccgccaaccacugcggcaccaucgccaacggcgugcugcagaccuucaugagaauggccuggggcggcagcuacaucgcccuggacagcggcaagggcagcugggacugcaucaugaccagcuaccaguaccugaucauccagaacaccaccugggaggaccacugccaguucagcagacccagccccaucggcuaccugggccugcugagccagagaaccagagacaucuacaucagcagaagacugcugggcaccuucaccuggacccugagcgacagcgagggcaacgagacccccggcggcuacugccugaccagauggaugcugaucgaggccgagcugaagugcuucggcaacaccgccguggccaagugcaacgagaagcacgacgaggaguucugcgacaugcugagacuguucgacuucaacaagcaggccaucagaagacugaagacccccgcccagaugagcauccagcugaucaacaaggccgugaacgcccugaucaacgaccagcugaucaugaagaaccaccugagagacaucaugggcauccccuacugcaacuacagcaaguacugcuaccugaaccacaccgugaccggcaagaccagccugcccagaugcugccuggugagcaacggcagcuaccugaacgagacccacuucagcgacgacaucgagcagcaggccgacaacaugaucaccgagcugcugcagaaggaguacaucgacagacagggcaagaccccccugggccugguggaccuguucguguucagcaccagcuucuaccugaucagcaucuuccugcaccuggugaagauccccacccacagacacaucaccggcaagcccugccccaagccccacagacugaaccacaugggcaucugcagcugcggccuguacaaccaccccggcgugcccgugaaguggaagagaugaggacuagucccuguucccagagcccacuuuuuuuucuuuuuuugaaauaaaauagccugucuuucagaucuaaaaaaaaaaaaaaaaaaaaaaaaaaaaaaaaaaaaaaaaaaaaaaaaaaaaaaaaaaaaaaaaaaaaaaaaaaaaaaaaaaaaaaaaaaaaaaaaaaaa

SEQ ID NO: 32305 - RNA, 1740 nt, Artificial Sequence
  mRNA product Design a-2 (A100) comprising derived and/or modified sequence from LASV(Lassa virus/H.sapiens-wt/NGA/2016/ISTH_0017;Clade II)__AVO03567__GPCmut7 (opt4)
aggagaguccgcucagccagguugcagaagcggcuuagcguguguccuaaucuucucucugcguguagguaggccugugccgcaaacaagcuuaccaugggccagaucaucaccuucuuccaggaggugccccacgugaucgaggaggugaugaacaucgugcugaucgcccugagccugcuggccauccugaagggcaucuacaacguggccaccugcggccuguucggccuggugagcuuccugcugcugugcggcagaagcugcagcaccaccuacaagggcguguacgagcugcagacccuggagcuggacauggccagccugaacaugaccaugccccugagcugcaccaagaacaacagccaccacuacaucauggugggcaacgagaccggccuggagcugacccugaccaacaccagcaucaucaaccacaaguucugcaaccugagcgacgcccacaagaagaaccuguacgaccacgcccugaugagcaucaucagcaccuuccaccugagcauccccaacuucaaccaguacgaggccaugagcugcgacuucaacggcggcaagaucagcgugcaguacaaccugagccacaccuacgccaucgacgccgccaaccacugcggcaccaucgccaacggcgugcugcagaccuucaugagaauggccuggggcggcagcuacaucgcccuggacagcggcaagggcagcugggacugcaucaugaccagcuaccaguaccugaucauccagaacaccaccugggaggaccacugccaguucagcagacccagccccaucggcuaccugggccugcugagccagagaaccagagacaucuacaucagcagaagacugcugggcaccuucaccuggacccugagcgacagcgagggcaacgagacccccggcggcuacugccugaccagauggaugcugaucgaggccgagcugaagugcuucggcaacaccgccguggccaagugcaacgagaagcacgacgaggaguucugcgacaugcugagacuguucgacuucaacaagcaggccaucagaagacugaagacccccgcccagaugagcauccagcugaucaacaaggccgugaacgcccugaucaacgaccagcugaucaugaagaaccaccugagagacaucaugggcauccccuacugcaacuacagcaaguacugcuaccugaaccacaccgugaccggcaagaccagccugcccagaugcugccuggugagcaacggcagcuaccugaacgagacccacuucagcgacgacaucgagcagcaggccgacaacaugaucaccgagcugcugcagaaggaguacauggacagacagggcaagaccccccugggccugguggaccuguucguguucagcaccagcuucuaccugaucagcaucuuccugcaccuggugagaauccccacccacagacacgugaucggcaagcccugccccaagccccacagacugaaccacaugggcaucugcagcugcggccuguacaagcaccccggcgugcccgugaaguggaagagaugaggacuagucccuguucccagagcccacuuuuuuuucuuuuuuugaaauaaaauagccugucuuucagaucuaaaaaaaaaaaaaaaaaaaaaaaaaaaaaaaaaaaaaaaaaaaaaaaaaaaaaaaaaaaaaaaaaaaaaaaaaaaaaaaaaaaaaaaaaaaaaaaaaaaa

SEQ ID NO: 32306 - RNA, 1740 nt, Artificial Sequence
  mRNA product Design a-2 (A100) comprising derived and/or modified sequence from LASV(Lassa virus/H.sapiens-wt/NGA/2018/ISTH_0959;Clade II)__AVV65099__GPCmut7 (opt4)
aggagaguccgcucagccagguugcagaagcggcuuagcguguguccuaaucuucucucugcguguagguaggccugugccgcaaacaagcuuaccaugggccagaucaucaccuucuuccaggaggugccccacgugaucgaggaggugaugaacaucgugcugaucgcccugagccugcuggccauccugaagggcaucuacaacguggugaccugcggccuguucggccuggugagcuuccugcugcugugcggcagaagcugcagcaccaccuacaagggcguguacgagcugcagacccuggagcuggacauggccagccugaacaugaccaugccccugagcugcaccaagaacaacagccaccacuacaucauggugggcaacgagaccggccuggagcugacccugaccaacaccagcaucaucaaccacaaguucugcaaccugagcgacgcccacaagaagaaccuguacgaccacgcccugaugagcaucaucagcaccuuccaccugagcauccccaacuucaaccaguacgaggccaugagcugcgacuucaacggcggcaagaucagcgugcaguacaaccugagccacgccuacgccaucgacgccgccaaccacugcggcaccaucgccaacggcgugcugcagaccuucaugagaauggccuggggcggcagcuacaucgcccuggacagcggcaagggcagcugggacugcaucaugaccagcuaccaguaccugaucauccagaacaccaccugggaggaccacugccaguucagcagacccagccccaucggcuaccugggccugcugagccagagaaccagagacaucuacaucagcagaagacugcugggcaccuucaccuggacccugagcgacagcgagggcaacgagacccccggcggcuacugccugaccagauggaugcugaucgaggccgagcugaagugcuucggcaacaccgccguggccaagugcaacgagaagcacgacgaggaguucugcgacaugcugagacuguucgacuucaacaagcaggccaucagaagacugaagacccccgcccagaugagcauccagcugaucaacaaggccgugaacgcccugaucaacgaccagcugaucaugaagaaccaccugagagacaucaugggcauccccuacugcaacuacagcaaguacugcuaccugaaccacaccgugaccggcaagaccagccugcccagaugcugccuggugagcaacggcagcuaccugaacgagacccacuucagcgacgacaucgagcagcaggccgacaacaugaucaccgagcugcugcagaaggaguacaucgacagacagggcaagaccccccugggccugguggaccuguucguguucagcaccagcuucuaccugaucagcaucuuccugcaccuggugaagauccccacccacagacacgugaucggcaagcccugccccaagccccacagacugaaccacaugggcaucugcagcugcggccuguacaagcaccccggcgugcccgugaaguggaagagaugaggacuagucccuguucccagagcccacuuuuuuuucuuuuuuugaaauaaaauagccugucuuucagaucuaaaaaaaaaaaaaaaaaaaaaaaaaaaaaaaaaaaaaaaaaaaaaaaaaaaaaaaaaaaaaaaaaaaaaaaaaaaaaaaaaaaaaaaaaaaaaaaaaaaa

SEQ ID NO: 32307 - RNA, 1740 nt, Artificial Sequence
  mRNA product Design a-2 (A100) comprising derived and/or modified sequence from LASV(LASV003-NIG-2008;Clade II)__AIT17580__GPCmut7 (opt4)
aggagaguccgcucagccagguugcagaagcggcuuagcguguguccuaaucuucucucugcguguagguaggccugugccgcaaacaagcuuaccaugggccagaucaucaccuucuuccaggaggugccccacgugaucgaggaggugaugaacaucgugcugaucgcccugagccugcuggccauccugaagggcaucuacaacguggccaccugcggccuguucggccuggugagcuuccugcugcugugcggcagaagcugcagcaccaccuacaagggcguguacgagcugcagacccuggagcuggacauggccagccugaacaugaccaugccccugagcugcaccaagaacaacagccaccacuacaucauggugggcaacgagaccggccuggagcugacccugaccaacaccagcaucaucaaccacaaguucugcaaccugagcgacgcccacaagaagaaccuguacgaccacgcccugaugagcaucaucagcaccuuccaccugagcauccccaacuucaaccaguacgaggccaugagcugcgacuucaacggcggcaagaucagcgugcaguacaaccugagccacaccuacgccguggacgccgccaaccacugcggcaccaucgccaacggcgugcugcagaccuucaugagaauggccuggggcggcagcuacaucgcccuggacagcggcaagggcagcugggacugcaucaugaccagcuaccaguaccugaucauccagaacaccaccugggaggaccacugccaguucagcagacccagccccaucggcuaccugggccugcugagccagagaaccagagacaucuacaucagcagaagacugcugggcaccuucaccuggacccugagcgacagcgagagcaacgagacccccggcggcuacugccugaccagauggaugcugaucgaggccgagcugaagugcuucggcaacaccgccguggccaagugcaacgagaagcacgacgaggaguucugcgacaugcugagacuguucgacuucaacaagcaggccaucagaagacugaaggcccccgcccagaugagcauccagcugaucaacaaggccgugaacgcccugaucaacgaccagcugaucaugaagaaccaccugagagacaucaugggcauccccuacugcaacuacagcaaguacugcuaccugaaccacaccgugaccggcagaaccagccugcccagaugcugccuggugagcaacggcagcuaccugaacgagacccacuucagcgacgacaucgagcagcaggccgacaacaugaucaccgagcugcugcagaaggaguacauggacagacagggcaagaccccccugggccugguggaccuguucguguucagcaccagcuucuaccugaucagcaucuuccugcaccuggugaagauccccacccacagacacgugaucggcaagcccugccccaagccccacagacugaaccacaugggcaucugcagcugcggccuguacaagcaccccggcgugcccgugaaguggaagagaugaggacuagucccuguucccagagcccacuuuuuuuucuuuuuuugaaauaaaauagccugucuuucagaucuaaaaaaaaaaaaaaaaaaaaaaaaaaaaaaaaaaaaaaaaaaaaaaaaaaaaaaaaaaaaaaaaaaaaaaaaaaaaaaaaaaaaaaaaaaaaaaaaaaaa

SEQ ID NO: 32308 - RNA, 1740 nt, Artificial Sequence
  mRNA product Design a-2 (A100) comprising derived and/or modified sequence from LASV(LASV035-NIG-2009;Clade II)__AIT17588__GPCmut7 (opt4)
aggagaguccgcucagccagguugcagaagcggcuuagcguguguccuaaucuucucucugcguguagguaggccugugccgcaaacaagcuuaccaugggccagaucaucaccuucuuccaggaggugccccacgugaucgaggaggugaugaacaucgugcugaucgcccugagccugcuggccauccugaagggcaucuacaacguggccaccugcggccuguucggccuggugagcuuccugcugcugugcggcagaagcugcagcaccaccuacaagggcguguacgagcugcagacccuggagcuggacauggccagccugaacaugaccaugccccugagcugcaccaagaacaacagccaccacuacaucauggugggcaacgagaccggccuggagcugacccugaccaacaccagcaucaucaaccacaaguucugcaaccugagcgacgcccacaagaagaaccuguacgaccacgcccugaugagcaucaucagcaccuuccaccugagcauccccaacuucaaccaguacgaggccaugagcugcgacuucaacggcggcaagaucagcgugcaguacaaccugagccacgccuacgccguggacgccgccaaccacugcggcaccaucgccaacggcgugcugcagaccuucaugagaauggccuggggcggcagcuacaucgcccuggacagcggcaagggcagcugggacugcaucaugaccagcuaccaguaccugaucauccagaacaccaccugggaggaccacugccaguucagcagacccagccccaucggcuaccugggccugcugagccagagaaccagagacaucuacaucagcagaagacugcugggcaccuucaccuggacccugagcgacagcgagggcaacgagacccccggcggcuacugccugaccagauggaugcugaucgaggccgagcugaagugcuucggcaacaccgccguggccaagugcaacgagaagcacgacgaggaguucugcgacaugcugagacuguucgacuucaacaagcaggccaucagaagacugaaggcccccgcccagaugagcauccagcugaucaacaaggccgugaacgcccugaucaacgaccagcugaucaugaagaaccaccugagagacaucaugggcauccccuacugcaacuacagcaaguacugcuaccugaaccacaccgugaccggcaagaccagccugcccagaugcugccuggugagcaacggcagcuaccugaacgagacccacuucagcgacgacaucgagcagcaggccgacaacaugaucaccgagcugcugcagaaggaguacaucgacagacagggcaagaccccccugggccugguggaccuguucguguucagcaccagcuucuaccugaucagcaucuuccugcaccuggugaagauccccacccacagacacgugaucggcaagcccugccccaagccccacagacugaaccacaugggcaucugcagcugcggccuguacaagcaccccggcgugcccgugaaguggaagagaugaggacuagucccuguucccagagcccacuuuuuuuucuuuuuuugaaauaaaauagccugucuuucagaucuaaaaaaaaaaaaaaaaaaaaaaaaaaaaaaaaaaaaaaaaaaaaaaaaaaaaaaaaaaaaaaaaaaaaaaaaaaaaaaaaaaaaaaaaaaaaaaaaaaaa

SEQ ID NO: 32309 - RNA, 1740 nt, Artificial Sequence
  mRNA product Design a-2 (A100) comprising derived and/or modified sequence from LASV(LASV1000-NIG-2009;Clade II)__AIT17782__GPCmut7 (opt4)
aggagaguccgcucagccagguugcagaagcggcuuagcguguguccuaaucuucucucugcguguagguaggccugugccgcaaacaagcuuaccaugggccagaucaucaccuucuuccaggaggugccccacgugaucgaggaggugaugaacaucgugcugaucgcccugagccugcuggccauccugaagggcaucuacaacguggccaccugcggccuguucggccuggugagcuuccugcugcugugcggcagaagcugcagcaccaccuacaagggcguguacgagcugcagacccuggagcuggacauggccagccugaacaugaccaugccccugagcugcaccaagaacaacagccaccacuacaucauggugggcaacgagaccggccuggagcugacccugaccaacaccagcaucaucaaccacaaguucugcaaccugagcgacgcccacaagaagaaccuguacgaccacgcccugaugagcaucaucagcaccuuccaccugagcauccccaacuucaaccaguacgaggccaugagcugcgacuucaacggcggcaagaucagcgugcaguacaaccugagccacaccuacgccguggacgccgccaaccacugcggcaccaucgccaacggcgugcugcagaccuucaugagaauggccuggggcggcagcuacaucgcccuggacagcggcaagggcagcugggacugcaucaugaccagcuaccaguaccugaucauccagaacaccaccugggaggaccacugccaguucagcagacccagccccaucggcuaccugggccugcugagccagagaaccagagacaucuacaucagcagaagacugcugggcaccuucaccuggacccugagcgacagcgagggcaacgagacccccggcggcuacugccugaccagauggaugcugaucgaggccgagcugaagugcuucggcaacaccgccguggccaagugcaacgagaagcacgacgaggaguucugcgacaugcugagacuguucgacuucaacaagcaggccaucaagagacugaagacccccgcccagaugagcauccagcugaucaacaaggccgugaacgcccugaucaacgaccagcugaucaugaagaaccaccugagagacaucaugggcauccccuacugcaacuacagcaaguacugcuaccugaaccacaccgugaccggcaagaccagccugcccagaugcugccuggugagcaacggcagcuaccugaacgagacccacuucagcgacgacaucgagcagcaggccgacaacaugaucaccgagcugcugcagaaggaguacaucgacagacagggcaagaccccccugggccugguggaccuguucguguucagcaccagcuucuaccugaucagcaucuuccugcaccuggugaagauccccacccacagacacguggugggcaagcccugccccaagccccacagacugaaccacaugggcaucugcagcugcggccuguacaagcaccccggcgugcccgugaaguggaagagaugaggacuagucccuguucccagagcccacuuuuuuuucuuuuuuugaaauaaaauagccugucuuucagaucuaaaaaaaaaaaaaaaaaaaaaaaaaaaaaaaaaaaaaaaaaaaaaaaaaaaaaaaaaaaaaaaaaaaaaaaaaaaaaaaaaaaaaaaaaaaaaaaaaaaa

SEQ ID NO: 32310 - RNA, 1740 nt, Artificial Sequence
  mRNA product Design a-2 (A100) comprising derived and/or modified sequence from LASV(LASV221-NIG-2010;Clade II)__AIT17624__GPCmut7 (opt4)
aggagaguccgcucagccagguugcagaagcggcuuagcguguguccuaaucuucucucugcguguagguaggccugugccgcaaacaagcuuaccaugggccagaucaucaccuucuuccaggaggugccccacgugaucgaggaggugaugaacaucgugcugaucgcccugagccugcuggccauccugaagggcaucuacaacguggccaccugcggccuguucggccuggugagcuuccugcugcugugcggcagaagcugcagcaccaccuacaagggcguguacgagcugcagacccuggagcuggacauggccagccugaacaugaccaugccccugagcugcaccaagaacaacagccaccacuacaucauggugggcaacgagaccggccuggagcugacccugaccaacaccagcaucaucaaccacaaguucugcaaccugagcgacgcccacaagaagaaccuguacgaccacgcccugaugagcaucaucagcaccuuccaccugagcauccccaacuucaaccaguacgaggccaugagcugcgacuucaacggcggcaagaucagcgugcaguacaaccugagccacaccuacgccaucgacgccgccaaccacugcggcaccaucgccaacggcgugcugcagaccuucaugagaauggccuggggcggcagcuacaucgcccuggacagcggcaagggcagcugggacugcaucaugaccagcuaccaguaccugaucauccagaacaccaccugggaggaccacugccaguucagcagacccagccccaucggcuaccugggccugcugagccagagaaccagagacaucuacaucagcagaagacugcugggcaccuucaccuggacccugagcgacagcgagggcaacgagacccccggcggcuacugccugaccagauggaugcugaucgaggccgagcugaagugcuucggcaacaccgccguggccaagugcaacgagaagcacgacgaggaguucugcgacaugcugagacuguucgacuucaacaagcaggccaucagaagacugaagacccccgcccagaugagcauccagcugaucaacaaggccgugaacgcccugaucaacgaccagcugaucaugaagaaccaccugagagacaucaugggcauccccuacugcaacuacagcaaguacugcuaccugaaccacaccgugaccggcaagaccagccugcccagaugcugccuggugagcaacggcagcuaccugaacgagacccacuucagcgacgacaucgagcagcaggccgacaacaugaucaccgagaugcugcagaaggaguacauggacagacagggcaagaccccccugggccugguggaccuguucguguucagcaccagcuucuaccugaucagcaucuuccugcaccuggugaagauccccacccacagacacgugaucggcaagcccugccccaagccccacagacugaaccacaugggcaucugcagcugcggccuguacaagcaccccggcgugcccgugaaguggaagagaugaggacuagucccuguucccagagcccacuuuuuuuucuuuuuuugaaauaaaauagccugucuuucagaucuaaaaaaaaaaaaaaaaaaaaaaaaaaaaaaaaaaaaaaaaaaaaaaaaaaaaaaaaaaaaaaaaaaaaaaaaaaaaaaaaaaaaaaaaaaaaaaaaaaaa

SEQ ID NO: 32311 - RNA, 1740 nt, Artificial Sequence
  mRNA product Design a-2 (A100) comprising derived and/or modified sequence from LASV(LASV237-NIG-2010;Clade II)__AIT17638__GPCmut7 (opt4)
aggagaguccgcucagccagguugcagaagcggcuuagcguguguccuaaucuucucucugcguguagguaggccugugccgcaaacaagcuuaccaugggccagaucaucaccuucuuccaggaggugccccacgugaucgaggaggugaugaacaucgugcugaucgcccugagccugcuggccauccugaagggcaucuacaacguggccaccugcggccuguucggccuggugagcuuccugcugcugugcggcagaagcugcagcaccaccuacaagggcguguacgagcugcagacccuggagcuggacauggccagccugaacaugaccaugccccugagcugcaccaagaacaacagccaccacuacaucauggugggcaacgagaccggccuggagcugacccugaccaacaccagcaucaucaaccacaaguucugcaaccugagcgacgcccacaagaaggaccuguacgaccacgcccugaugagcaucaucagcaccuuccaccugagcauccccaacuucaaccaguacgaggccaugagcugcgacuucaacggcggcaagaucagcgugcaguacaaccugagccacaccuacgccguggacgccgccaaccacugcggcaccaucgccaacggcgugcugcagaccuucaugagaauggccuggggcggcagcuacaucgcccuggacagcggcaagggcagcugggacugcaucaugaccagcuaccaguaccugaucauccagaacaccaccugggaggaccacugccaguucagcagacccagccccaucggcuaccugggccugcugagccagagaaccagagacaucuacaucagcagaagacugcugggcaccuucaccuggacccugagcgacagcgagggcaacgagacccccggcggcuacugccugaccagauggaugcugaucgaggccgagcugaagugcuucggcaacaccgccguggccaagugcaacgagaagcacgacgaggaguucugcgacaugcugagacuguucgacuucaacaagcaggccaucagaagacugaagacccccgcccagaugagcauccagcugaucaacaaggccgugaacgcccugaucaacgaccagcugaucaugaagaaccaccugagagacaucaugggcauccccuacugcaacuacagcaaguacugcuaccugaaccacaccgugaccggcaagaccagccugcccagaugcugccuggugagcaacggcagcuaccugaacgagacccacuucagcgacgacaucgagcagcaggccgacaacaugaucaccgagcugcugcagaaggaguacauggacagacagggcaagaccccccugggccugguggaccuguucguguucagcaccagcuucuaccugaucagcaucuuccugcaccugaucaagauccccacccacagacacaucaccggcaagcccugccccaagccccacagacugaaccacaugggcaucugcagcugcggccuguacaagcaccccggcgugcccgugaaguggaagagaugaggacuagucccuguucccagagcccacuuuuuuuucuuuuuuugaaauaaaauagccugucuuucagaucuaaaaaaaaaaaaaaaaaaaaaaaaaaaaaaaaaaaaaaaaaaaaaaaaaaaaaaaaaaaaaaaaaaaaaaaaaaaaaaaaaaaaaaaaaaaaaaaaaaaa

SEQ ID NO: 32312 - RNA, 1740 nt, Artificial Sequence
  mRNA product Design a-2 (A100) comprising derived and/or modified sequence from LASV(LASV253-NIG-2011;Clade II)__AIT17670__GPCmut7 (opt4)
aggagaguccgcucagccagguugcagaagcggcuuagcguguguccuaaucuucucucugcguguagguaggccugugccgcaaacaagcuuaccaugggccagaucaucaccuucuuccaggaggugccccacgugaucgaggaggugaugaacaucgugcugaucgcccugagccugcuggccauccugaagggcaucuacaacguggccaccugcggccuguucggccuggugagcuuccugcugcugugcggcagaagcugcagcaccaccuacaagggcguguacgagcugcagacccuggagcuggacauggccagccugaacaugaccaugccccugagcugcaccaagaacaacagccaccacuacaucauggugggcaacgagaccggccuggagcugacccugaccaacaccagcaucaucaaccacaaguucugcaaccugagcgacgcccacaagaagaaccuguacgaccacgcccugaugagcaucaucagcaccuuccaccugagcauccccaacuucaaccaguacgaggccaugagcugcgacuucaacggcggcaagaucagcgugcaguacaaccugagccacaccuacgccguggacgccgccaaccacugcggcaccaucgccaacggcgugcugcagaccuucaugagaauggccuggggcggcagcuacaucgcccuggacagcggcaagggcagcugggacugcaucaugaccagcuaccaguaccugaucauccagaacaccaccugggaggaccacugccaguucagcagacccagccccaucggcuaccugggccugcugagccagagaaccagagacaucuacaucagcagaagacugcugggcaccuucaccuggacccugagcgacagcgagggcaacgagacccccggcggcuacugccugaccagauggaugcugaucgaggccgagcugaagugcuucggcaacaccgccguggccaagugcaacgagaagcacgacgaggaguucugcgacaugcugagacuguucgacuucaacaagcaggccaucagaagacugaaggcccccgcccagaugagcauccagcugaucaacaaggccgugaacgcccugaucaacgaccagcugaucaugaagaaccaccugagagacaucaugggcauccccuacugcaacuacagcaaguacugcuaccugaaccacaccgugaccggcagaaccagccugcccagaugcugccuggugagcaacggcagcuaccugaacgagacccacuucagcgacgacaucgagcagcaggccgacaacaugaucaccgagcugcugcagaaggaguacaucgacagacagggcaagaccccccugggccugguggaccuguucguguucagcaccagcuucuaccugaucagcaucuuccugcaccuggugaagauccccacccacagacacaucaucggcaagcccugccccaagccccacagacugaaccacaugggcaucugcagcugcggccuguacaagcaccccggcgugcccgugaaguggaagagaugaggacuagucccuguucccagagcccacuuuuuuuucuuuuuuugaaauaaaauagccugucuuucagaucuaaaaaaaaaaaaaaaaaaaaaaaaaaaaaaaaaaaaaaaaaaaaaaaaaaaaaaaaaaaaaaaaaaaaaaaaaaaaaaaaaaaaaaaaaaaaaaaaaaaa

SEQ ID NO: 32313 - RNA, 1740 nt, Artificial Sequence
  mRNA product Design a-2 (A100) comprising derived and/or modified sequence from LASV(LASV254-NIG-2011;Clade II)__AIT17674__GPCmut7 (opt4)
aggagaguccgcucagccagguugcagaagcggcuuagcguguguccuaaucuucucucugcguguagguaggccugugccgcaaacaagcuuaccaugggccagaucaucaccuucuuccaggaggugccccacgugaucgaggaggugaugaacaucgugcugaucgcccugagccugcuggccauccugaagggcaucuacaacguggccaccugcggccuguucggccuggugagcuuccugcugcugugcggcagaagcugcagcaccaccuacaagggcguguacgagcugcagacccuggagcuggacaugaccaaccugaacaugaccaugccccugagcugcaccaagaacaacagccaccacuacaucauggugggcaacgagaccggccuggagcugacccugaccaacaccagcaucaucaaccacaaguucugcaaccugagcgacgcccacaagaagaaccuguacaaccacgcccugaugagcaucaucagcaccuuccaccugagcauccccaacuucaaccaguacgaggccaugagcugcgacuucaacggcggcaagaucagcgugcaguacaaccugagccacagcuacgccguggacgccgccaaccacugcggcaccaucgccaacggcgugcugcagaccuucaugagaauggccuggggcggcagcuacaucgcccuggacagcggcaagggcaacugggacugcaucaugaccagcuaccaguaccugaucauccagaacaccaccugggaggaccacugccaguucagcagacccagccccaucggcuaccugggccugcugagccagagaaccagagacaucuacaucagcagaagacugcugggcaccuucaccuggacccugagcgacagcgagggcaacgagacccccggcggcuacugccugaccagauggaugcugaucgaggccgagcugaagugcuucggcaacaccgccguggccaagugcaacgagaagcacgacgaggaguucugcgacaugcugagacuguucgacuucaacaagcaggccaucagaagacugaagacccccgcccaggccaacauccagcugaucaacaaggccgugaacgcccugaucaacgaccagcugaucaugaagaaccaccugagagacaucaugggcauccccuacugcaacuacagcaaguacugcuaccugaaccacaccgugaccggcaagaccagccugcccagaugcugccuggugagcaacggcagcuaccugaacgagacccacuucagcgacgacaucgagcagcaggccgacaacaugaucaccgagcugcugcagaaggaguacauggacagacagggcaagaccccccugggccugguggaccuguucguguucagcaccagcuucuaccugaucagcaucuuccugcaccuggugaagauccccacccacagacacgugaucggcaagcccugccccaagccccacagacugaaccacaugggcaucugcagcugcggccuguacaagcaccccggcgugcccgugaaguggaagagaugaggacuagucccuguucccagagcccacuuuuuuuucuuuuuuugaaauaaaauagccugucuuucagaucuaaaaaaaaaaaaaaaaaaaaaaaaaaaaaaaaaaaaaaaaaaaaaaaaaaaaaaaaaaaaaaaaaaaaaaaaaaaaaaaaaaaaaaaaaaaaaaaaaaaa

SEQ ID NO: 32314 - RNA, 1740 nt, Artificial Sequence
  mRNA product Design a-2 (A100) comprising derived and/or modified sequence from LASV(Nig08-A19;Clade III)__ADU56618__GPCmut7 (opt4)
aggagaguccgcucagccagguugcagaagcggcuuagcguguguccuaaucuucucucugcguguagguaggccugugccgcaaacaagcuuaccaugggccagaucgugaccuucuuccaggaggugccccacgugaucgaggaggugaugaacaucgugcugaucgcccugagcauccuggccauccugaagggccuguacaacaucgccaccugcggccugaucggccuggugaccuuccugcugcugagcggcagaagcugcagcaugaccuacaagggcguguacgagcugcagacccuggagcugaacaugaacacccugaacaugaccaugccccugagcugcaccaagaacaacagccaccacuacaucauggugggcaacgagaccggccuggagcugacccugaccaacaccagccugcugcaccacaaguucugcaaccugagcgacgcccacaagaagaaccuguacgaccacacccugaugagcaucaucagcaccuuccaccugagcauccccaacuucaaccaguacgaggccaugagcugcgacuucaacggcggcaagaucaccgugcaguacaaccugagccacagcuacgccaucgacgccgccaaccacugcggcaccguggccaacggcgugcugcagaccuucaugagaauggccuggggcggcagcuacaucgcccuggacagcggcagaggcaagugggacugcaucaugaccagcuaccaguaccugaucauccagaacaccaccugggaggaccacugccaguucagcagacccagccccaucggcuaccugggccugcugagccagagaaccagagacaucuacaucagcagaagacugcugggcaccuucaccuggacccugagcgacagcgagggcaacgagacccccggcggcuacugccugaccagauggaugcugaucgaggccgagcugaagugcuucggcaacaccgccguggccaagugcaacgagaagcacgacgaggaguucugcgacaugcugagacuguucgacuucaacaagcaggccaucagaagacugaaggcccccgcccagaugagcauccagcugaucaacaaggccgugaacgcccugaucaacgaccagcugaucaugaagaaccaccugagagacaucaugggcauccccuacugcaacuacagcaaguacugcuaccugaaccacaccagcaccggcagaaccagccugcccagaugcugccuggugagcaacggcagcuaccugaacgagacccacuucagcgacgacaucgagcagcaggccgacaacaugaucaccgagaugcugcagaaggaguaccuggacagacagggcaagaccccccugggccugguggaccuguucguguucagcaccagcuucuaccugaucagcaucuuccugcaccuggugaagauccccacccacagacacaucgugggcaagcccugccccaagccccacagacugaaccacaugggcaucugcagcugcggccuguacaagcagcccggcgugcccgugagauggaagagaugaggacuagucccuguucccagagcccacuuuuuuuucuuuuuuugaaauaaaauagccugucuuucagaucuaaaaaaaaaaaaaaaaaaaaaaaaaaaaaaaaaaaaaaaaaaaaaaaaaaaaaaaaaaaaaaaaaaaaaaaaaaaaaaaaaaaaaaaaaaaaaaaaaaaa

SEQ ID NO: 32315 - RNA, 1743 nt, Artificial Sequence
  mRNA product Design a-2 (A100) comprising derived and/or modified sequence from LASV(G1180-SLE-2010;Clade IV)__AIT17168__GPCmut7 (opt4)
aggagaguccgcucagccagguugcagaagcggcuuagcguguguccuaaucuucucucugcguguagguaggccugugccgcaaacaagcuuaccaugggccagaucgugaccuucuuccaggaggugccccacgugaucgaggaggugaugaacaucgugcugaucgcccugagcauccuggccgugcugaagggccuguacaacuucgccaccugcggccuggugggccugcugaccuuccugcugcugugcggcagaagcugcaccgccagcagauacaagggcguguacgagcugcagacccuggagcugaacauggagacccugaacaugaccaugccccugagcugcaccaagaacaacagccaccacuacaucauggugggcaacgagaccggccuggagcugacccugaccaacaccagcaucaucaaccacaaguucugcaaccugagcgacgcccacaagaagaaccuguacgaccacgcccugaugagcaucaucagcaccuuccaccugagcauccccaacuucaaccaguacgaggccaugagcugcgacuucaacggcggcaagaucagcgugcaguacaaccugagccacagcuacgccggcgacgccgccaaccacugcggcaccguggccaacggcgugcugcagaccuucaugagaauggccuggggcggcagcuacaucgcccuggacagcggccacggcagcugggacugcaucaugaccagcuaccaguaccugaucauccagaacaccaccugggaggaccacugccaguucagcagacccagccccaucggcuaccugggccugcugagccagagaaccagagacaucuacaucagcagaagacugcugggcaccuucaccuggacccugagcgacagcgagggcaaggacacccccggcggcuacugccugaccagauggaugcugaucgaggccgagcugaagugcuucggcaacaccgccguggccaagugcaacgagaagcacgacgaggaguucugcgacaugcugagacuguucgacuucaacaagcaggccauccagagacugaaggcccccgcccagaugagcauccagcugaucaacaaggccgugaacgcccugaucaacgaccagcugaucaugaagaaccaccugagagacaucaugggcauccccuacugcaacuacagcaaguacugcuaccugaaccacaccaccaccggcaagaccagccugcccaagugcugccuggugagcaacggcagcuaccugaacgagacccacuucagcgacgacaucgagcagcaggccgacaacaugaucaccgagaugcugcagaaggaguacauggagagacagggcaagaccccccugggccugguggaccuguucguguucagcaccagcuucuaccugaucagcaucuuccugcaccuggugaagauccccacccacagacacaucgugggcaagagcugccccaagccccacagacugaaccacaugggcaucugcagcugcggccuguacaagcagcccggcgugcccgugaaguggaagagaugaggacuagucccuguucccagagcccacuuuuuuuucuuuuuuugaaauaaaauagccugucuuucagaucuaaaaaaaaaaaaaaaaaaaaaaaaaaaaaaaaaaaaaaaaaaaaaaaaaaaaaaaaaaaaaaaaaaaaaaaaaaaaaaaaaaaaaaaaaaaaaaaaaaaa

SEQ ID NO: 32316 - RNA, 1743 nt, Artificial Sequence
  mRNA product Design a-2 (A100) comprising derived and/or modified sequence from LASV(G1442-SLE-2011;Clade IV)__AIT17180__GPCmut7 (opt4)
aggagaguccgcucagccagguugcagaagcggcuuagcguguguccuaaucuucucucugcguguagguaggccugugccgcaaacaagcuuaccaugggccagaucgugaccuucuuccaggaggugccccacgugaucgaggaggugaugaacaucgugcugaucgcccugagcauccuggccgugcugaagggccuguacaacguggccaccugcggccugaucggccuggugaccuuccugcugcugugcggcagaagcugcaccaccacccuguacaagggcguguacgagcugcagacccuggagcugaacauggagacccugaacaugaccaugccccugagcugcaccaagaacaacagccaccacuacaucagagugggcaacgagaccggccuggagcugacccugaccaacaccagcaucaucaaccacaaguucugcaaccugagcgacgcccacaagaagaaccuguacgaccacgcccugaugagcaucaucagcaccuuccaccugagcauccccaacuucaaccaguacgaggccaugagcugcgacuucaacggcggcaagaucagcgugcaguacaaccugagccacagcuacgccggcgacgccgccaaccacugcggcaccguggccaacggcgugcugcagaccuucaugagaauggccuggggcggcagcuacaucgcccuggacagcggcagaggcaacugggacugcaucaugaccagcuaccaguaccugaucauccagaacaccaccugggacgaccacugccaguucagcagacccagccccaucggcuaccugggccugcugagccagagaaccagagacguguacaucagcagaagacugcugggcaccuucaccuggacccugagcgacagcgagggcaaggacacccccggcggcuacugccugaccagauggaugcugaucgaggccgagcugaagugcuucggcaacaccgccguggccaagugcaacgagaagcacgacgaggaguucugcgacaugcugagacuguucgacuucaacaagcaggccauccagagacugaaggcccccgcccagaugagcauccagcugaucaacaaggccgugaacgcccugaucaacgaccagcugaucaugaagaaccaccugagagacaucaugggcauccccuacugcaacuacagcaaguacugcuaccugaacaacaccgccaccggcaagaccagccugcccaagugcugccugaucagcaacggcagcuaccugaacgagacccacuucagcgacgacaucgagcaggaggccgacaacaugaucaccgagaugcugcagaaggaguacauggagagacagggcaagaccccccugggccugguggaccuguucguguucagcaccagcuucuaccugaucagcaucuuccugcaccuggugaagauccccacccacagacacaucgugggcaagagcugccccaagccccacagacugaaccacaugggcaucugcagcugcggccuguacaagcagcccggcgugcccgugagauggaagagaugaggacuagucccuguucccagagcccacuuuuuuuucuuuuuuugaaauaaaauagccugucuuucagaucuaaaaaaaaaaaaaaaaaaaaaaaaaaaaaaaaaaaaaaaaaaaaaaaaaaaaaaaaaaaaaaaaaaaaaaaaaaaaaaaaaaaaaaaaaaaaaaaaaaaa

SEQ ID NO: 32317 - RNA, 1743 nt, Artificial Sequence
  mRNA product Design a-2 (A100) comprising derived and/or modified sequence from LASV(G3010-SLE-2013;Clade IV)__AIT17344__GPCmut7 (opt4)
aggagaguccgcucagccagguugcagaagcggcuuagcguguguccuaaucuucucucugcguguagguaggccugugccgcaaacaagcuuaccaugggccagaucgugaccuucuuccaggaggugccccacgugaucgaggaggugaugaacaucgugcugaucgcccugagcauccuggccgugcugaagggccuguacaacuucgccaccugcggccuggugggccuggugaccuuccugcugcugugcggcagaagcugcaccaccagccuguacaagggcguguacgagcugcagacccuggagcugaacauggagacccugaacaugaccaugccccugagcugcaccaagaacaacagccaccacuacaucauggugggcaacgagaccggccuggagcugacccugaccaacaccagcaucaucaaccacaaguucugcaaccugagcgacgcccacaagaagaaccuguacaaccacgcccugaugagcaucaucagcaccuuccaccugagcauccccaacuucaaccaguacgaggccaugagcugcgacuucaacggcggcaagaucagcgugcaguacaaccugagccacagcuacgccggcgacgccgccagccacugcggcaccguggccaacggcgugcugcagaccuucaugagaauggccuggggcggcagcuacaucgcccuggacagcggcuacggcaagugggacugcaucaugaccagcuaccaguaccugaucauccagaacaccaccugggaggaccacugccaguucagcagacccagccccaucggcuaccugggccugcugagccagagaaccagagacaucuacaucagcagaagacugcugggcaccuucaccuggacccugagcgacagcgagggcaaggacacccccggcggcuacugccugaccagauggaugcugaucgaggccgagcugaagugcuucggcaacaccgccguggccaagugcaacgagaagcacgacgaggaguucugcgacaugcugagacuguucgacuucaacaagcaggccauccagagacugaagacccccgcccagaugagcauccagcugaucaacaaggccgugaacgcccugaucaacgaccagcugaucaugaagaaccaccugagagacaucaugggcauccccuacugcaacuacagcaaguacugcuaccugaaccacaccaccaccggcaagaccagccugcccaagugcugccuggugagcaacggcagcuaccugaacgagacccacuucagcgacgacaucgagcagcaggccgacaacaugaucaccgagaugcugcagaaggaguacauggagagacagggcaagaccccccugggccugguggaccuguucguguucagcaccagcuucuaccugaucagcaucuuccugcaccuggugaagauccccacccacagacacaucgugggcaagagcugccccaagccccacagacugaaccacaugggcaucugcagcugcggccuguacaagcagcccggcgugcccgugagauggaagagaugaggacuagucccuguucccagagcccacuuuuuuuucuuuuuuugaaauaaaauagccugucuuucagaucuaaaaaaaaaaaaaaaaaaaaaaaaaaaaaaaaaaaaaaaaaaaaaaaaaaaaaaaaaaaaaaaaaaaaaaaaaaaaaaaaaaaaaaaaaaaaaaaaaaaa

SEQ ID NO: 32318 - RNA, 1743 nt, Artificial Sequence
  mRNA product Design a-2 (A100) comprising derived and/or modified sequence from LASV(G502-SLE-2009;Clade IV)__AIT17126__GPCmut7 (opt4)
aggagaguccgcucagccagguugcagaagcggcuuagcguguguccuaaucuucucucugcguguagguaggccugugccgcaaacaagcuuaccaugggccagaucgugaccuucuuccaggaggugccccacgugaucgaggaggugaugaacaucgugcugaucgcccugagcauccuggccgugcugaagggccuguacaacuucgccaccugcggccuggugggccugcugaccuuccugcugcugugcggcagaagcugcaccaccggccuguacaagggcguguacgagcugcagacccuggagcugaacauggagacccugaacaugaccaugccccugagcugcaccaagaacaacagccaccacuacaucauggugggcaacgagaccggccuggagcugacccugaccaacaccagcaucaucaaccacaaguucugcaaccugagcgacgcccacaagaagaaccuguacgaccacgcccugaugagcaucaucagcaccuuccaccugagcauccccaacuucaaccaguacgaggccaugagcugcgacuucaacggcggcaagaucagcgugcaguacaaccugagccacagcuacgccggcgacgccgccgaccacugcggcaccguggccaacggcgugcugcagaccuucaugagaauggccuggggcggcagcuacaucgcccuggacagcggcagaggcagaugggacugcaucaugaccagcuaccaguaccugaucauccagaacaccaccugggaggaccacugccaguucagcagacccagccccaucggcuaccugggccugcugagccagagaaccagagacaucuacaucagcagaagacugcugggcaccuucaccuggacccugagcgacagcgagggcaaggacacccccggcggcuacugccugaccagauggaugcugaucgaggccgagcugaagugcuucggcaacaccgccguggccaagugcaacgagaagcacgacgaggaguucugcgacaugcugagacuguucgacuucaacaagcaggccauccagagacugaaggcccccgcccagaugagcauccagcugaucaacaaggccgugaacgcccugaucaacgaccagcuggugaugaagaaccaccugagagacaucaugggcauccccuacugcaacuacagcagauacugcuaccugaaccacaccaccaccggcagaaccagccugcccaagugcugccuggugagcaacggcagcuaccugaacgagacccacuucagcgacgacaucgagcagcaggccgacaacaugaucaccgagaugcugcagaaggaguacauggagagacagggcaagaccccccugggccugguggaccuguucguguucagcaccagcuucuaccugaucagcaucuuccugcaccuggugaagauccccacccacagacacaucgugggcaagagcugccccaagccccacagacugaaccacaugggcaucugcagcugcggccuguacaagcagcccggcgugcccgugaaguggaagagaugaggacuagucccuguucccagagcccacuuuuuuuucuuuuuuugaaauaaaauagccugucuuucagaucuaaaaaaaaaaaaaaaaaaaaaaaaaaaaaaaaaaaaaaaaaaaaaaaaaaaaaaaaaaaaaaaaaaaaaaaaaaaaaaaaaaaaaaaaaaaaaaaaaaaa

SEQ ID NO: 32319 - RNA, 1743 nt, Artificial Sequence
  mRNA product Design a-2 (A100) comprising derived and/or modified sequence from LASV(G733-SLE-2010;Clade IV)__AIT17154__GPCmut7 (opt4)
aggagaguccgcucagccagguugcagaagcggcuuagcguguguccuaaucuucucucugcguguagguaggccugugccgcaaacaagcuuaccaugggccagaucgugaccuucuuccaggaggugccccacgugaucgaggaggugaugaacaucgugcugaucgcccugagcauccuggccgugcugaagggccuguacaacuucgccaccugcggcaucgugggccuggugagcuuccugcugcugugcggcagaagcugcaccaccagccuguacaagggcguguacgagcugcagacccuggagcugaacauggagacccugaacaugaccaugccccugagcugcaccaagaacaacagccaccacuacaucauggugggcaacgagaccggccuggagcugacccugaccaacaccagcaucaucaaccacaaguucugcaaccugagcgacgcccacaagaagaaccuguacgaccacgcccugaugagcaucaucagcaccuuccaccugagcauccccaacuucaaccaguacgaggccaugagcugcgacuucaacggcggcaagaucagcgugcaguacaaccugagccacagcuacgccggcgacgccgccaaccacugcggcaccaucgccaacggcgugcugcagaccuucaugagaauggccuggggcggcagcuacaucgcccuggacagcggcagagacagaugggacugcaucaugaccagcuaccaguaccugaucauccagaacaccaccugggaggaccacugccaguucagcagacccagccccaucggcuaccugggccugcugagccagagaaccagagacaucuacaucagcagaagacugcugggcaccuucaccuggacccugagcgacagcgagggcaaggacacccccggcggcuacugccugaccagauggaugcugaucgaggccgagcugaagugcuucggcaacaccgccguggccaagugcaacgagaagcacgacgaggaguucugcgacaugcugagacuguucgacuucaacaagcaggccauccagagacugaaggcccccgcccagaugagcauccagcugaucaacaaggccgugaacgcccugaucaacgaccagcugaucaugaagaaccaccugagagacaucaugggcauccccuacugcaacuacagcaaguacugcuaccugaaccacaccaccaccggcaagaccagccugcccaagugcugccuggugagcaacggcagcuaccugaacgagacccacuucagcgacgacaucgagcagcaggccgacaacaugaucaccgagaugcugcagaaggaguacauggagagacagggcaagaccccccugggccugguggaccuguucguguucagcaccagcuucuaccugaucagcaucuuccugcaccuggugaagauccccacccacagacacguggugggcaagagcugccccaagccccacagacugaaccacaugggcaucugcagcugcggccuguacggccagcccggcgugcccgugaaguggaagagaugaggacuagucccuguucccagagcccacuuuuuuuucuuuuuuugaaauaaaauagccugucuuucagaucuaaaaaaaaaaaaaaaaaaaaaaaaaaaaaaaaaaaaaaaaaaaaaaaaaaaaaaaaaaaaaaaaaaaaaaaaaaaaaaaaaaaaaaaaaaaaaaaaaaaa

SEQ ID NO: 32320 - RNA, 1743 nt, Artificial Sequence
  mRNA product Design a-2 (A100) comprising derived and/or modified sequence from MOPV/LASV reassortant(IGS-1;Clade IV)__AFY05576__GPCmut7 (opt4)
aggagaguccgcucagccagguugcagaagcggcuuagcguguguccuaaucuucucucugcguguagguaggccugugccgcaaacaagcuuaccaugggccagaucgugaccuucuuccaggaggugccccacgugaucgaggaggugaugaacaucgugcugaucgcccugagcgugcuggccgugcugaagggccuguacaacuucgccaccugcggccuggugggccuggugaccuuccugcugcugugcggcagaagcugcaccaccagccuguacaagggcguguacgagcugcagacccuggagcugaacauggagacccugaacaugaccaugccccugagcugcaccaagaacaacagccaccacuacaucauggugggcaacgagaccggccuggagcugacccugaccaacaccagcaucaucaaccacaaguucugcaaccugagcgacgcccacaagaagaaccuguacgaccacgcccugaugagcaucaucagcaccuuccaccugagcauccccaacuucaaccaguacgaggccaugagcugcgacuucaacggcggcaagaucagcgugcaguacaaccugagccacagcuacgccggcgacgccgccaaccacugcggcaccguggccaacggcgugcugcagaccuucaugagaauggccuggggcggcagcuacaucgcccuggacagcggcagaggcaacugggacugcaucaugaccagcuaccaguaccugaucauccagaacaccaccugggaggaccacugccaguucagcagacccagccccaucggcuaccugggccugcugagccagagaaccagagacaucuacaucagcagaagacugcugggcaccuucaccuggacccugagcgacagcgagggcgaggacacccccggcggcuacugccugaccagauggaugcugaucgaggccgagcugaagugcuucggcaacaccgccguggccaagugcaacgagaagcacgacgaggaguucugcgacaugcugagacuguucgacuucaacaagcaggccauccagagacugaaggcccccgcccagaugagcauccagcugaucaacaaggccgugaacgcccugaucaacgaccagcugaucaugaagaaccaccugagagacaucaugggcauccccuacugcaacuacagcaaguacugcuaccugaaccacaccaccaccggcagaaccagccugcccaagugcugccuggugagcaacggcagcuaccugaacgagacccacuucagcgacgacaucgagcagcaggccgacaacaugaucaccgagaugcugcagaaggaguacauggagagacagggcaagaccccccugggccugguggaccuguucguguucagcaccagcuucuaccugaucagcaucuuccugcaccuggugaagauccccacccacagacacaucgugggcaagagcugccccaagccccacagacugaaccacaugggcaucugcagcugcggccuguacaagcagcccggcgugcccgugaaguggaagagaugaggacuagucccuguucccagagcccacuuuuuuuucuuuuuuugaaauaaaauagccugucuuucagaucuaaaaaaaaaaaaaaaaaaaaaaaaaaaaaaaaaaaaaaaaaaaaaaaaaaaaaaaaaaaaaaaaaaaaaaaaaaaaaaaaaaaaaaaaaaaaaaaaaaaa

SEQ ID NO: 32321 - RNA, 1743 nt, Artificial Sequence
  mRNA product Design a-2 (A100) comprising derived and/or modified sequence from LASV(LM765-SLE-2012;Clade IV)__AIT17814__GPCmut7 (opt4)
aggagaguccgcucagccagguugcagaagcggcuuagcguguguccuaaucuucucucugcguguagguaggccugugccgcaaacaagcuuaccaugggccagaucgugaccuucuuccaggaggugccccacgugaucgaggaggugaugaacaucgugcugaucgcccugagcauccuggccgugcugaagggccuguacaacuucgccaccugcggccuggugggccuggugaccuuccugcugcugugcggcagaagcugcaccaccagccuguacaagggcguguacgagcugcagacccuggagcugaacauggagacccugaacaugaccaugccccugagcugcaccaagaacaacagccaccacuacaucauggugggcaacgagaccggccuggagcugacccugaccaacaccagcaucaucgaccacaaguucugcaaccugagcgacgcccacagaaagaaccuguacgaccacgcccugaugagcaucaucagcaccuuccaccugagcauccccaacuucaaccaguacgaggccaugagcugcgacuucaacggcggcaagaucagcgugcaguacaaccugagccacagcuacgccaaggacgccgccgaccacugcggcaccguggccaacggcgugcugcagaccuucaugagaauggccuggggcggcagcuacaucgcccuggacagcggcagaggcagaugggacugcaucaugaccagcuaccaguaccugaucauccagaacaccaccugggaggaccacugccaguucagcagacccagccccaucggcuaccugggccugcugagccagagaaccagagacaucuacaucagcagaagacugcugggcaccuucaccuggacccugagcgacagcgagggcaaggacacccccggcggcuacugccugaccagauggaugcugaucgaggccgagcugaagugcuucggcaacaccgccguggccaagugcaacgagaagcacgacgaggaguucugcgacaugcugagacuguucgacuucaacaagcaggccauccagagacugaaggcccccgcccagaugagcauccagcugaucaacaaggccgugaacgcccugaucaacgaccagcugaucaugaagaaccaccugagagacaucaugggcauccccuacugcaacuacagcaaguacugcuaccugaaccacaccaccaccggcaagaccagccugcccaagugcugccuggugagcaacggcagcuaccugaacgagacccacuucagcgacgacaucgagcagcaggccgacaacaugaucaccgagaugcugcagaaggaguacauggagagacagggcaagaccccccugggccugguggaccuguucguguucagcaccagcuucuaccugaucagcaucuuccugcaccuggugaagauccccacccacagacacaucgugggcaagcccugccccaagccccacagacugaaccacaugggcaucugcagcugcggccuguacaagcagcccggcgugcccgugaaguggaagagaugaggacuagucccuguucccagagcccacuuuuuuuucuuuuuuugaaauaaaauagccugucuuucagaucuaaaaaaaaaaaaaaaaaaaaaaaaaaaaaaaaaaaaaaaaaaaaaaaaaaaaaaaaaaaaaaaaaaaaaaaaaaaaaaaaaaaaaaaaaaaaaaaaaaaa

SEQ ID NO: 32322 - RNA, 1743 nt, Artificial Sequence
  mRNA product Design a-2 (A100) comprising derived and/or modified sequence from LASV(LM776-SLE-2012;Clade IV)__AIT17824__GPCmut7 (opt4)
aggagaguccgcucagccagguugcagaagcggcuuagcguguguccuaaucuucucucugcguguagguaggccugugccgcaaacaagcuuaccaugggccagaucgugaccuucuuccaggaggugccccacgugaucgaggaggugaugaacaucgugcugaucgcccugagcauccuggccgugcugaagggccuguacaacuucgccaccugcggccuggugggccuggugaccuuccugcugcugugcggcagaagcugcaccaccagcguguacaagggcguguacgagcugcagacccuggagcugaacauggagacccugaacaugaccaugccccugagcugcaccaagaacaacagccaccacuacaucauggugggcaacgagaccggccuggagcugacccugaccaacaccagcaucaucaaccacaaguucugcaaccugagcgacgcccacaagaagaaccuguacgaccacgcccugaugagcaucaucagcaccuuccaccugagcauccccaacuucaaccaguacgaggccaugagcugcgacuucaacggcggcaagaucagcgugcaguacaaccugagccacagcuacgccggcgacgccgccaaccacugcggcaccguggccaacggcgugcugcagaccuucaugagaauggccuggggcggcagcuacaucgcccuggacagcggccacggcaagugggacugcaucaugaccagcuaccaguaccugaucauccagaacaccaccugggaggaccacugccaguucagcagacccagccccaucggcuaccugggccugcugagccagagaaccagagacaucuacaucagcagaagacugcugggcaccuucaccuggacccugagcgacagcgagggcaaggacacccccggcggcuacugccugaccagauggaugcugaucgaggccgagcugaagugcuucggcaacaccgccguggccaagugcaacgagaagcacgacgaggaguucugcgacaugcugagacuguucgacuucaacaagcaggccauccagagacugaaggcccccgcccagaugagcauccagcugaucaacaaggccgugaacgcccugaucaacgaccagcugaucaugaagaaccaccugagagacaucaugggcauccccuacugcaacuacagcaaguacugcuaccugaaccacaccaccaccggcaagaccagccugcccaagugcugccuggugagcaacggcagcuaccugaacgagacccacuucagcgacgacaucgagcagcaggccgacaacaugaucaccgagaugcugcagaaggaguacauggagagacagggcaagaccccccugggccugguggaccuguucguguucagcaccagcuucuaccugaucagcaucuuccugcaccuggugaagauccccacccacagacacaucgugggcaagagcugccccaagccccacagacugaaccacaugggcaucugcagcugcggccuguacaagcagcccggcgugcccgugagauggaagagaugaggacuagucccuguucccagagcccacuuuuuuuucuuuuuuugaaauaaaauagccugucuuucagaucuaaaaaaaaaaaaaaaaaaaaaaaaaaaaaaaaaaaaaaaaaaaaaaaaaaaaaaaaaaaaaaaaaaaaaaaaaaaaaaaaaaaaaaaaaaaaaaaaaaaa

SEQ ID NO: 32323 - RNA, 1743 nt, Artificial Sequence
  mRNA product Design a-2 (A100) comprising derived and/or modified sequence from LASV(Mad39;Clade IV)__ANH09722__GPCmut7 (opt4)
aggagaguccgcucagccagguugcagaagcggcuuagcguguguccuaaucuucucucugcguguagguaggccugugccgcaaacaagcuuaccaugggccagaucgugaccuucuuccaggaggugccccacgugaucgaggaggugaugaacaucgugcugaucgcccugagcauccuggccgugcugaagggccuguacaacguggccaccugcggccugaucggccuggugaccuuccugcugcugugcggcagaagcugcaccaccacccuguacaagggcguguacgagcugcaggcccuggagcugaacauggagacccugaacaugaccaugccccugagcugcaccaagaacaacagccaccacuacaucagagugggcaacgagaccggccuggagcugacccugaccaacaccagccugaucaaccacaaguucugcaaccugagcgacgcccacaagaagaaccuguacgaccacgcccugaugagcaucaucagcaccuuccaccugagcauccccaacuucaaccaguacgaggccaugagcugcgacuucaacgacggcaagaucagcgugcaguacaaccugagccacaccuacgccggcgacaccgccaaccacugcggcaccguggccaacggcgugcugcagaccuucaugagaauggccuggggcggcagcuacaucgcccuggacagcggcagaggcggcugggacugcaucaugaccagcuaccaguaccugaucauccagaacaccaccugggaggaccacugccaguucagcagacccagccccaucggcuaccugggccugcugagccagagaaccagagacaucuacaucagcagaagacugcugggcaccuucaccuggacccugagcgacagcgagggcaaggacacccccggcggcuacugccugaccagauggaugcugaucgaggccgagcugaagugcuucggcaacaccgccguggccaagugcaacgagaagcacgacgaggaguucugcgacaugcugagacuguucgacuucaacaagcaggccauccagagacugaaggcccccgcccagaugagcauccagcugaucaacaaggccgugaacgcccugaucaacgaccagcugaucaugaagaaccaccugagagacaucaugggcauccccuacugcaacuacagcaaguacugcuaccugaaccacaccgugaccggcaagaccagccugcccaagugcugccuggugagcaacggcagcuaccugaacgagacccacuucagcgacgacaucgagcagcaggccgacaacaugaucaccgagaugcugcagaaggaguacauggagagacagggcaagaccccccugggccugguggaccuguucguguucagcaccagcuucuaccugaucagcaucuuccugcaccuggugaagauccccacccacagacacguggugggcaagcccugccccaagccccacagacugaaccacaugggcaucugcagcugcggcuucuacaagcagcccggcgugcccgugagauggaagagaugaggacuagucccuguucccagagcccacuuuuuuuucuuuuuuugaaauaaaauagccugucuuucagaucuaaaaaaaaaaaaaaaaaaaaaaaaaaaaaaaaaaaaaaaaaaaaaaaaaaaaaaaaaaaaaaaaaaaaaaaaaaaaaaaaaaaaaaaaaaaaaaaaaaaa

SEQ ID NO: 32324 - RNA, 1743 nt, Artificial Sequence
  mRNA product Design a-2 (A100) comprising derived and/or modified sequence from LASV(Z0947-SLE-2011;Clade IV)__AIT17840__GPCmut7 (opt4)
aggagaguccgcucagccagguugcagaagcggcuuagcguguguccuaaucuucucucugcguguagguaggccugugccgcaaacaagcuuaccaugggccagaucgugaccuucuuccaggaggugccccacgugaucgaggaggugaugaacaucgugcugaucgcccugagcauccuggccgugcugaagggccuguacaacuucgccaccugcggccuggugggccuggugaccuuccugcugcugugcggcagaagcugcaccaucagccuguacaagggcguguacgagcugcagacccuggagcugaacauggagacccugaacaugaccaugccccugagcugcaccaagaacaacagccaccacuacaucauggugggcaacgagaccggccuggagcugacccugaccaacaccagcaucaucaaccacaaguucugcaaccugagcgacgcccacaagaagaaccuguacgaccacgcccugaugagcaucaucagcaccuuccaccugagcauccccaacuucaaccaguacgaggccaugagcugcgacuucaacggcggcaagaucagcgugcaguacaaccugagccacagcuacgccggcgacgccgccaaccacugcggcaccguggccaacggcgugcugcagaccuucaugagaauggccuggggcggcagcuacaucgcccuggacagcggcagagacagaugggacugcaucaugaccagcuaccaguaccugaucauccagaacaccaccugggaggaccacugccaguucagcagacccagccccaucggcuaccugggccugcugagccagagaaccagagacaucuacaucagcagaagacugcugggcaccuucaccuggacccugagcgacagcgagggcaaggacacccccggcggcuacugccugaccagauggaugcugaucgaggccgagcugaagugcuucggcaacaccgccguggccaagugcaacgagaagcacgacgaggaguucugcgacaugcugagacuguucgacuucaacaagcaggccauccagagacugaaggcccccgcccagaugagcauccagcugaucaacaaggccgugaacgcccugaucaacgaccagcugaucaugaagaaccaccugagagacaucaugggcauccccuacugcaacuacagcaaguacugcuaccugaaccacaccaccaccggcaagaccagccugcccaagugcugccuggugagcaacggcagcuaccugaacgagacccacuucagcgacgacaucgagcagcaggccgacaacaugaucaccgagaugcugcagaaggaguacauggagagacagggcaagaccccccugggccugguggaccuguucguguucagcaccagcuucuaccugaucagcaucuuccugcaccuggugaagauccccacccacagacacaucgugggcaagcccugccccaagccccacagacugaaccacaugggcaucugcagcugcggccuguacaagcagcccggcgugcccgugaaguggaagagaugaggacuagucccuguucccagagcccacuuuuuuuucuuuuuuugaaauaaaauagccugucuuucagaucuaaaaaaaaaaaaaaaaaaaaaaaaaaaaaaaaaaaaaaaaaaaaaaaaaaaaaaaaaaaaaaaaaaaaaaaaaaaaaaaaaaaaaaaaaaaaaaaaaaaa

SEQ ID NO: 32325 - RNA, 1743 nt, Artificial Sequence
  mRNA product Design a-2 (A100) comprising derived and/or modified sequence from LASV(Josiah;Clade IV)__NP_694870__GPCmut7 (opt5)
aggagaguccgcucagccagguugcagaagcggcuuagcguguguccuaaucuucucucugcguguagguaggccugugccgcaaacaagcuuaccaugggccagaucgugaccuucuuucaagaggucccccacguuauugaagaggugaugaacaucgugcugauugcccucagcguccuggcugugcuuaaggggcuguacaauuucgccacaugcggacucguuggccuggugacguuucuucugcucugugggagauccugcaccacaucucuguauaaaggagucuacgaacugcagacccucgagcugaacauggaaacacuuaauaugaccaugccucugagcuguacaaagaacaauucccaucacuauaucauggugggcaacgagaccgggcucgagcugacgcuuaccaauacaucuauuaucaaccauaaauucugcaaucugagcgacgcgcacaagaaaaaccucuacgaucaugcucugauguccaucauuucuaccuuucaccugagcaucccgaauuucaaccaguaugaagccauguccugugacuuuaauggaggcaagauuagcguucaguacaaccucucucacuccuaugccggcgaugcugccaaucauugcgggacaguggcuaacggaguccugcaaaccuucaugcggauggccuggggcgggagcuacaucgcgcuugacucuggacgcggcaacugggauuguauuaugacguccuaccaguaucugaucauucagaauacaaccugggaggaccacugccaguuuagcagacccucuccuaucggguaccucggacugcuuucccaacggacacgcgauaucuauauuagcagacggcugcucggcaccuucaccuggacacuguccgacucugaaggcaaggauacgcccgggggauacugucugacccgcuggaugcucaucgaggccgagcugaaaugcuuuggcaacacagcuguggccaaguguaaugaaaaacaugacgaggaguucugcgauaugcuuagacuguuugacuucaacaagcaggcuauucagcggcucaaagccccugcgcagaugagcauccaacugauuaauaaggccgugaacgcucuuaucaaugaucagcugaucaugaagaaccaccuccgcgacauuauggggauccccuauugcaauuacuccaaauauuguuaccugaaccacaccacaaccggaagaacgagccugccuaagugcugucucgucucuaauggcuccuaccugaacgaaacacauuucagcgacgauauugaacagcaagccgacaauaugaucaccgagaugcuucagaaagaguauauggaacggcaggggaagaccccgcugggacucguugaucuguuuguguucucuaccagcuuuuaccugauuuccaucuuccuucaccucgugaaaauccccacacaucgccacauugucggcaagucuugcccuaaaccccauagacugaaccacaugggcaucuguagcugcgggcuguauaagcagccuggagugcccguuaaguggaaacggugaggacuagucccuguucccagagcccacuuuuuuuucuuuuuuugaaauaaaauagccugucuuucagaucuaaaaaaaaaaaaaaaaaaaaaaaaaaaaaaaaaaaaaaaaaaaaaaaaaaaaaaaaaaaaaaaaaaaaaaaaaaaaaaaaaaaaaaaaaaaaaaaaaaaa

SEQ ID NO: 32326 - RNA, 1740 nt, Artificial Sequence
  mRNA product Design a-2 (A100) comprising derived and/or modified sequence from LASV(LP;Clade I)__AAF86701__GPCmut7 (opt5)
aggagaguccgcucagccagguugcagaagcggcuuagcguguguccuaaucuucucucugcguguagguaggccugugccgcaaacaagcuuaccaugggccagaucauuaccuucuuucaagaggugccccacgucaucgaagagguuaugaacauugugcugaucgcccucagccugcuugcuauucugaaggggcucuacaauaucgccacaugcggaaucauuggccugguggcguuccuuuuucugugugggaaauccugcucucucacgcugaagggaggcuaugaacugcagacccucgagcugaacauggaaacacuuaauaugaccaugccucugagcuguaccaaaaacuccucucaucacuacaucagagucgggaaugagacaggacucgagcugacacuuaccaacacgagcauuaucaaucauaaguucugcaaccuguccgacgcucacaaaaagaaucucuaugaucaugcccugaugucuauuaucagcaccuuucaccuguccauuccgaacuucaaucaguacgaagccaugagcugugacuuuaacggcggcaagaucucugugcaguauaaucucucccacagcuacgcuggggaugccgcugagcauugcggaacaguugccaacggcgugcugcaaaccuucaugcggauggcguggggagggcgcuauaucgcccuugacucuggcaaagggaauugggauuguauuaugacauccuaccaguaccugaucauucagaacaccacgugggaagaccacugccaguuuagcagacccucuccuaucggauaucucggccugcuuucccaacggacacgcgauauuuacaucagcagacggcugcucggcaccuucacauggacccuguccgacucugaggggaacgagacccccggaggcuauugucugacacgcuggaugcucaucgaagcugagcugaagugcuuugggaauacggccgucgcuaaauguaacgaaaagcaugaugaggaguucugcgacaugcuuagacuguuugauuucaauaaacaggccauucggcgccucaaggcgccugcccagaugagcauccagcugauuaacaaggcugugaaugcccuuaucaacgaccaacugauuaugaaaaaucaccucagagauaucaugggaauccccuacugcaacuauuccaaguacuguuaucugaaucacaccagcucuggccggacaucccugccuaaaugcugucucauuagcaacgggucuuaccugaaugaaacccaguucagcgacgacaucgagcagcaagcugauaacaugauuacagaaaugcuucagaaggaguacaucgaacgccagggaaaaaccccgcugggccucguugacauuuuuaucuucuccacgucuuuuuaucugauuagcaucuuccugcaucuuaucaagauucccacacacagacauaucgugggcaaaccuugccccaagccucaccggcucaaucauaugggggucuguuccugcggacuguacaagcaccccggcgugccgaccaaauggaagcgcugaggacuagucccuguucccagagcccacuuuuuuuucuuuuuuugaaauaaaauagccugucuuucagaucuaaaaaaaaaaaaaaaaaaaaaaaaaaaaaaaaaaaaaaaaaaaaaaaaaaaaaaaaaaaaaaaaaaaaaaaaaaaaaaaaaaaaaaaaaaaaaaaaaaaa

SEQ ID NO: 32327 - RNA, 1740 nt, Artificial Sequence
  mRNA product Design a-2 (A100) comprising derived and/or modified sequence from LASV(803213;Clade II)__AAF86703__GPCmut7 (opt5)
aggagaguccgcucagccagguugcagaagcggcuuagcguguguccuaaucuucucucugcguguagguaggccugugccgcaaacaagcuuaccaugggccagaucauuaccuucuuucaagaggugccccacgucaucgaagagguuaugaacauugugcugaucgcccucagccugcuugcuauucugaaggggaucuacaauguggccacaugcggacucuucggccugaucuccuuucuucugcucugugggagaucuugcagcgucacguauaaaggaguguacgaacugcagacccuggagcucaacauggcgaaucugaacaugacaaugccucuuuccuguaccaagaauaacucucaucacuauauuaugguuggcaaugaaacagggcuggagcucacccugacaaacaccagcaucauuaaucauaaauucugcaaccuuuccgacgcucacaagaaaaaucuguacgaucaugcccucaugucuaucauuagcacguuucaccuguccaucccgaacuucaaucaguaugaggccaugagcugugacuuuaacggaggcaagauuucugugcaguacaaucugucccacagcuucgcugucgaugccgcuaaccauugcggcaccaucgccaacggggugcuccaaacauuuaugcggauggcguggggaggcucuuauaucgcccuggacuccgggaagggaaauugggauuguauuaugaccagcuaccaguaccuuaucauucagaacacaaccugggaagaccacugccaguucucucgccccuccccuaucggcuaucuggggcuccugagccaaagaacgcgggauauuuacaucucccgcagacuucugggaacauuuaccuggacacucucugacagcgagggcaaugaagcucccggcggguauugucugacccgguggaugcugaucgaggccgagcucaaaugcuucggaaacaccgcuguugccaaguguaaugaaaaacaugaugaggaauuuugcgacaugcugcgccuuuucgauuucaacaagcaggcgauuaaaagacugaagacgccugcccagauguccauccagcucauuaauaaggcugugaacgcccugaucaaugaccaacuuauuaugaaaaaccaucugcgggauaucaugggcauccccuacugcaauuauagccgcuacuguuaucucaaccacacagucaccgggaagacaucucugccuagaugcugucugguguccaauggaagcuaccucaacgagacccacuuuucugacgacauugaacagcaggcugauaauaugaucacagagaugcugcaaaaagaguacauggaccggcagggcaagaccccgcuugggcugguggaucucuucgucuuuagcacguccuucuaucugauuucuaucuuucugcaccuuguuaaaauucccacacaucgccacaucgugggaaagccuugccccaaaccucauagacucaaccacaugggcauuuguagcugcggccuguacaagcaccccggggugccggucaaguggaaacggugaggacuagucccuguucccagagcccacuuuuuuuucuuuuuuugaaauaaaauagccugucuuucagaucuaaaaaaaaaaaaaaaaaaaaaaaaaaaaaaaaaaaaaaaaaaaaaaaaaaaaaaaaaaaaaaaaaaaaaaaaaaaaaaaaaaaaaaaaaaaaaaaaaaaa

SEQ ID NO: 32328 - RNA, 1740 nt, Artificial Sequence
  mRNA product Design a-2 (A100) comprising derived and/or modified sequence from LASV(GA391;Clade III)__CAA36645__GPCmut7 (opt5)
aggagaguccgcucagccagguugcagaagcggcuuagcguguguccuaaucuucucucugcguguagguaggccugugccgcaaacaagcuuaccaugggccagaucgugaccuucuuucaagaggucccccacguuauugaagaggugaugaacaucgugcugauugcccucagcauccuggcuauucuuaaggggcuguacaaugucgccacaugcggacucaucggccuggugacguuccuucugcucuccgggagaucuuguagccugaucuauaaaggaaccuacgaacugcagacacucgagcugaacauggaaacccuuaauaugacaaugccucuguccugcaccaagaacaauucucaucacuauauucggguuggcaacgagacagggcucgagcugacccuuacgaauaccagcauccugaaccauaaauuuuguaaucucuccgacgcgcacaagcgcaaccuguacgaucauucucugaugagcauuaucuccacauuccaccucagcauuccgaauuuuaaccaguaugaagcuaugucuugcgacuucaauggaggcaaaaucaccgugcaguacaaccugucccacagcuuugccgucgaugccgcuggccauugugggacacuugccaauggagugcugcaaaccuucaugagaauggcuuggggcgggucuuauauugcccucgacuccggacggggcaacugggauugcaucaugacgagcuaccaguaccugaucauucagaacacaaccugggacgaucacugucaguuuucucgccccuccccuaucggguaucuuggacugcucagccaaagaacacgggacauuuacaucucccgcagacugcugggcaccuucaccuggacacucucugauagcgagggcaaugaaacgcccgggggauauugccugacccgguggaugcuuauugaggcggagcugaaguguuuuggcaacacagccguugcuaagugcaaugaaaaacaugacgaggaguucugugauaugcuccgccuguuugacuucaacaagcaggccaucagacggcuuaaaaccccugcucagauguccauccagcugauuaauaaggccgugaacgcgcucaucaaugaucaacugauuaugaaaaaccaucugcgcgacaucauggggauucccuacugcaauuauagcagauacugcuaucucaaccacacaucuaccggaaagacgucccugccucgguguugccuuaucagcaauggcucuuaccugaacgaaacaaaguucagcgacgauaucgaacagcaggccgacaauaugauuaccgagaugcuccaaaaagaguacaucgaucgccaggggaagaccccgcugggacuggucgaccuuuuuguguucuccacaucuuuuuaucucauuagcaucuuccugcaccuggugaaaauucccacccacagacauaucgucggcaagccuugucccaaaccucaccggcucaaccauaugggcauuugcuccugugggcuguacaagcagcccggaguuccggugagauggaaacgcugaggacuagucccuguucccagagcccacuuuuuuuucuuuuuuugaaauaaaauagccugucuuucagaucuaaaaaaaaaaaaaaaaaaaaaaaaaaaaaaaaaaaaaaaaaaaaaaaaaaaaaaaaaaaaaaaaaaaaaaaaaaaaaaaaaaaaaaaaaaaaaaaaaaaa

SEQ ID NO: 32329 - RNA, 1743 nt, Artificial Sequence
  mRNA product Design a-2 (A100) comprising derived and/or modified sequence from LASV(AV;Clade V)__CCA30314__GPCmut7 (opt5)
aggagaguccgcucagccagguugcagaagcggcuuagcguguguccuaaucuucucucugcguguagguaggccugugccgcaaacaagcuuaccaugggccagaucgugaccuucuuucaagaggucccccacguuauugaagaggugaugaacaucgugcugauugcccucagcauccuggcuguccuuaaggggcuguacaauauugccacaugcggacucaucggccugaucacguuccuucugcucugugggagauccugcucuagcaaccuguauaaaggaguguacgaacugcagucccucgaccugaauauggagacccuuaacaugacaaugccucugucuuguaccaagaauaacagccaucacuauauucggguuggcaaugauacagggcucgaacugacccuuacaaacaccuccauccugaaucauaaauuuugcaaccucucugacgcgcacaagaaagaucuguacgaccaugcucugaugagcauuaucuccacguuccaccucagcauuccgaauuuuaaccaguaugaggccaugucuugugauuucaauggaggcaagaucuccgugcaguacaaccugagccacucuuaugccauugacgcugccaaucauugcggcaccgucgcuaacgggauccuucaaacauuuaugcgcauggccuggggaggcuccuacaucgcgcuggauagcgggagaggaaacugggacuguauuaugaccucuuaccaguaucucaucauucagaauacaaccugggagaaccacugccaguucucccggcccagcccuaucggcuaccuggggcuucugucccaacgcacgagagauauuuauaucucucggcgccuccugggaacauuuaccuggacacugagcgacuccgaaggcaaugccacccccggcggguacugucucaccagauggaugcugaucgaggcugaacuuaagugcuucggaaacacagccguggcuaaauguaaugagaagcaugaugaggaauuuugcgacaugcugcgccucuucgauuuuaacaaacaggccauuagccggcugaagucuccugcgcagauguccauccagcuuauuaauaaagccguuaacgcucugaucaaugaccaacucauuaugaagaaccaccugagagacaucaugggcauccccuauugcaauuacagcaaguauuguuaccugaaccacacgauuaccgggaaaacaucucucccuaagugcugucuggugagcaauggauccuaccuuaacgagacccauuucucugaugacaucgaacagcaggccgauaauaugauuacagagaugcugcaaaaagaauauauggagcggcagggcaagaccccgcucgggcuggucgaccuguucguguuuagcacguccuucuaccuuaucagcauuuuucuccgccuggugaaaauccccacacacagacauauugucggaaagccuugccccaaaccucaccggcugaaccauaugggcaucuguucuugcggccucuauaagcagcccgggguuccggugcgcuggaagagaugaggacuagucccuguucccagagcccacuuuuuuuucuuuuuuugaaauaaaauagccugucuuucagaucuaaaaaaaaaaaaaaaaaaaaaaaaaaaaaaaaaaaaaaaaaaaaaaaaaaaaaaaaaaaaaaaaaaaaaaaaaaaaaaaaaaaaaaaaaaaaaaaaaaaa

SEQ ID NO: 32330 - RNA, 1740 nt, Artificial Sequence
  mRNA product Design a-2 (A100) comprising derived and/or modified sequence from LASV(Togo/2016/7082;Clade VI)__AMR44577__GPCmut7 (opt5)
aggagaguccgcucagccagguugcagaagcggcuuagcguguguccuaaucuucucucugcguguagguaggccugugccgcaaacaagcuuaccaugggccagaucauuaccuucuuucaagaggugccccacgucaucgaagagguuaugaacauugugcugaucgcccucagccugcuugcuauucugaaggggguguacaaugucgccacaugcggaaucaucggccucgugacguuccuguuucuuugugggagauccugcucucugauuuauaaaggaagcuacgaacuccagacccuggagcugaacauggaaacacucaauaugaccaugccucuguccuguacaaagaacucuagccaucacuauauccggguuggcaaugagaccgggcuugagcugacacucaccaacacguccauuaucaaucauaaauucugcaaccugucugacgcgcacaagcgcaaucuuuacgaucaugcucugaugagcauucucuccaccuuucaccugagcaucccgaacuucaaucaguaugaagccaugucuugugacuuuaacggaggcaaaauuuccgugcaguacaaucugagccacgccuaugcugucgaugccgcugagcauugcggcacaguggccaacgggguucuccaaaccuucaugagaauggcguggggaggcucuuacaucgcccuggacuccgggcggggaaauugggauuguaucaugacaagcuaccaguaucuuauuauccagaacaccacgugggaagaccacugccaguuuucucgccccuccccuauuggcuaccuggggcuccugagccaaagaacacgggauaucuauauuucccgcagacuucugggaaccuucacauggacccucucugacagcgagggcaacgagacccccggcggguacugucugacacgguggaugcugaucgaagcugagcucaagugcuuuggaaauacggccguggcuaaguguaacgaaaaacaugaugaggaguucugcgacaugcugcgccuuuuugauuucaauaagcaggccauccagagacugaaauccccugcgcagaugagcauucaacucaucaacaaggccgucaaugcucugauuaacgaccagcuuaucaugaaaaaucaucugcgggauaugaugggcauucccuauugcaacuacucuaaguauuguuaccucaaucacaccuccagcgggcgcacaucucugccuaagugcugucuggugagcaacggauccuaccucaaugaaacccacuucucugacgacaucgagcagcaagccgauaacaugaucacagaaaugcugcagaaagaguauauugacagacagggcaagaccccgcuugggcugguggaucucuuugucuucagcacguccuuuuaccugaucagcauuuuccugcaccuuaucaaaauucccacacaucggcacaucguuggaaagccuugccccaaaccucaucgccucaaucacaugggcauuuguucuugcggccuguauaagcagcccggggugccgaccagauggaaacggugaggacuagucccuguucccagagcccacuuuuuuuucuuuuuuugaaauaaaauagccugucuuucagaucuaaaaaaaaaaaaaaaaaaaaaaaaaaaaaaaaaaaaaaaaaaaaaaaaaaaaaaaaaaaaaaaaaaaaaaaaaaaaaaaaaaaaaaaaaaaaaaaaaaaa

SEQ ID NO: 32331 - RNA, 1740 nt, Artificial Sequence
  mRNA product Design a-2 (A100) comprising derived and/or modified sequence from LASV(KAK-428;Clade n.d. (VII))__ANH09740__GPCmut7 (opt5)
aggagaguccgcucagccagguugcagaagcggcuuagcguguguccuaaucuucucucugcguguagguaggccugugccgcaaacaagcuuaccaugggccagaucgugaccuucuuucaagaggucccccacguuauugaagaggugaugaacaucgugcugauugcccucagccugcuugcuauccugaaggggcucuacaauuucgccacaugcggagucauuggccugaucacguuucuucugcucugugggagauccugcucugcgaccuauaaaggacaguacgaacugcagacacuggagcucaacauggaaagccugaauaugaccaugccucuuuccuguacaaagaacaauucucaucacuauauccgggcuggcaacaauaccgggcuggagcucacacugaccaacacgagcauuaucucccauaaauucugcaaucuuucugacgcccacaagaaaaaccuguacgaucauacccucaugagcauuaucacaaccuuucaccuguccauuccgaauuucaaccaguaugaggccaugagcugugacuuuaauggaggcaagaucucuauucaauacaaccugucccacagcuaugcuggcgaugccgcucagcauugcgggacaguggccaauggaguucuccagaccuucaugcgcauggcguggggcgggucuuaccuggcccuugacuccggaagacggggcugggauuguaucaucagcucuuaccaguaucugauuauccaaaacacgacaugggacgaucacugccaguuuucccgccccagcccuauuggguaccucggauucgugucccagaagaccagagacaucuauauuucucggcgccugcuuggcacauuuaccuggacccugagcgauuccgaaggccaugacaugcccgggggauacugucucacaagauggaugcugaucgaggcugaucugaaaugcuucggcaacacggccgucgcuaaguguaaugaaaaacacgacgaggaguuuugcgauauguggcgccucuucgacuucaacaagcaggccauccaacggcugaaagcgccugcccagaugaauauucagcuuaucaacaaggcugugaaugcccugauuaacgaccaacucaugaugaagaaucaccugagagauaucauggggauucccuauugcaacuacagcaaauuuuguuaucuuaauaacaccacaaccggacggacaucucugccucgcugcugucucaucuccaauggcagcuaccugaacgaaacccauuucucugacgauaucgagcagcaggcugacaauaugauuacggaaaugcugcagaaggaguacauggauagacaagggaaaacaccgcucggacugguugaccuuuuuguguucagcaccuccuuuuaucugaucaccauuuuccuccaccuggucaagauccccacacaucggcacauugugggcaaaccuugccccaagccucaucgccugaaccacaugggcaucuguucuugcgggcuuuacaaacagcccggagugccggucagauggaagcggugaggacuagucccuguucccagagcccacuuuuuuuucuuuuuuugaaauaaaauagccugucuuucagaucuaaaaaaaaaaaaaaaaaaaaaaaaaaaaaaaaaaaaaaaaaaaaaaaaaaaaaaaaaaaaaaaaaaaaaaaaaaaaaaaaaaaaaaaaaaaaaaaaaaaa

SEQ ID NO: 32332 - RNA, 1740 nt, Artificial Sequence; identical to SEQ ID NO: 32326
  mRNA product Design a-2 (A100) comprising derived and/or modified sequence from LASV(Pinneo-NIG-1969;Clade I)__AIT17836__GPCmut7 (opt5)

SEQ ID NO: 32333 - RNA, 1740 nt, Artificial Sequence
  mRNA product Design a-2 (A100) comprising derived and/or modified sequence from LASV(ISTH0009-NIG-2011;Clade II)__AIT17404__GPCmut7 (opt5)
aggagaguccgcucagccagguugcagaagcggcuuagcguguguccuaaucuucucucugcguguagguaggccugugccgcaaacaagcuuaccaugggccagaucauuaccuucuuucaagaggugccccacgucaucgaagagguuaugaacauugugcugaucgcccucagccugcuugcuauucugaaggggaucuacaauguggccacaugcggacucuucggccuggucuccuuucuucugcucugugggagaucuugcagcacgaccuauaaaggaguguacgaacugcagacacuggagcucgacauggcgucccugaacaugaccaugccucuuucuuguacaaagaauaacagccaucacuauaucaugguuggcaaugaaaccgggcuggagcucacacugaccaacacguccauuaucaaucauaaauucugcaaccuuucugaugcucacaagaaaaaucuguacgaccaugcccucaugagcauuaucuccaccuuucaccugagcauuccgaacuucaaucaguaugaggccaugucuugugauuuuaacggaggcaagaucuccgugcaguacaaucugagccacgcuuaugccgucgacgcugccaaccauugcggcacaauugcgaauggggugcuccaaaccuucaugcggauggccuggggaggcucuuacaucgcucuggauuccgggaagggaagcugggacuguaucaugacaucuuaccaguaucuuauuauccagaacaccacgugggaagaucacugccaguuuucccgccccagcccuauuggcuaccuggggcuccugucccaaagaacacgggacaucuauauuucucgcagacuucugggaaccuucacauggacccucagcgauuccgagggcaacgaaacccccggcggguacugucugacacgguggaugcugaucgaggccgagcucaaaugcuuuggaaauacggcuguugccaaguguaacgaaaaacaugacgaggaguucugcgauaugcugcgccuuuuugacuucaauaagcaggcgaucagacggcugaaaaccccugcccagaugagcauucagcucaucaacaaggcugugaaugcccugauuaacgaucaacuuaucaugaagaaucaucugcgcgacauuaugggcauccccuauugcaacuacucuaaauauuguuaccucaaucacacagucaccgggaagacaucccugccuagaugcugucuggugagcaacggaucuuaccucaaugaaacccacuucagcgacgauaucgaacagcaggcugacaacaugauuacggagcugcuucaaaaagaguauauggaucggcagggcaagacaccgcuggggcucguggaccuguuugucuucuccaccucuuuuuaccugaucagcauuuuccuucaccucaucaaaauucccacccaucgccacaucacaggaaagccuugccccaaaccucauagacugaaucacaugggcauuuguuccugcggccuguauaagcaccccgggguuccggugaaguggaaacggugaggacuagucccuguucccagagcccacuuuuuuuucuuuuuuugaaauaaaauagccugucuuucagaucuaaaaaaaaaaaaaaaaaaaaaaaaaaaaaaaaaaaaaaaaaaaaaaaaaaaaaaaaaaaaaaaaaaaaaaaaaaaaaaaaaaaaaaaaaaaaaaaaaaaa

SEQ ID NO: 32334 - RNA, 1740 nt, Artificial Sequence
  mRNA product Design a-2 (A100) comprising derived and/or modified sequence from LASV(ISTH2010-NIG-2012;Clade II)__AIT17482__GPCmut7 (opt5)
aggagaguccgcucagccagguugcagaagcggcuuagcguguguccuaaucuucucucugcguguagguaggccugugccgcaaacaagcuuaccaugggccagaucauuaccuucuuucaagaggugccccacgucaucgaagagguuaugaacauugugcugaucgcccucagccugcuugcuauucugaaggggaucuacaauguggccacaugcggacucuucggccuggucuccuuucuucugcucugugggagaucuugcagcacgaccuauaaaggaguguacgaacugcagacacuggagcucgacauggcgucccugaacaugaccaugccucuuucuuguacaaagaauaacagccaucacuauaucaugguuggcaaugaaaccgggcuggagcucacacugaccaacacguccauuaucaaucauaaauucugcaaccuuucugaugcucacaagaaaaaucuguacgaccaugcccucaugagcauuaucuccaccuuucaccugagcauuccgaacuucaaucaguaugaggccaugucuugugauuuuaacggaggcaagaucuccgugcaguacaaucugagccacgcuuaugccgucgacgcugccaaccauugcggcacaauugcgaauggggugcuccaaaccuucaugcggauggccuggggaggcucuuacaucgcucuggauuccgggaagggaagcugggacuguaucaugacaucuuaccaguaucuuauuauccagaacauuaccugggaagaucacugccaguuuucccgccccagcccuaucggcuaccuggggcuccugucccaaagaacgcgggacauuuauaucucucgcagacuucugggaacauucaccuggacacucagcgauuccgagggcaacgaaacccccggcggguacugucugacccgguggaugcugaucgaggccgagcucaaaugcuuuggaaauacagcuguugccaaguguaacgaaaaacaugacgaggaguucugcgauaugcugcgccuuuuugacuucaauaagcaggcgauuagacggcugaaaacgccugcccagaugagcauccagcucauuaacaaggcugugaaugcccugaucaacgaucaacuuauuaugaagaaucaucugcgcgacaucaugggcauccccuauugcaacuacucuaaauauuguuaccucaaucacaccgucacagggaagaccucccugccuagaugcugucuggugagcaacggaucuuaccucaaugaaacacacuucagcgacgauauugaacagcaggcugacaacaugaucaccgagcugcuucaaaaagaguauauugaucggcagggcaagacgccgcuggggcucguggaccuguuugucuucuccacaucuuuuuaccugaucagcauuuuccuucaccucguuaaaauccccacccaucgccacguggugggaaagccuugccccaaaccucauagacugaaucacaugggcauuuguuccugcggccuguauaagcaccccggggucccggugaaguggaaacggugaggacuagucccuguucccagagcccacuuuuuuuucuuuuuuugaaauaaaauagccugucuuucagaucuaaaaaaaaaaaaaaaaaaaaaaaaaaaaaaaaaaaaaaaaaaaaaaaaaaaaaaaaaaaaaaaaaaaaaaaaaaaaaaaaaaaaaaaaaaaaaaaaaaaa

SEQ ID NO: 32335 - RNA, 1740 nt, Artificial Sequence
  mRNA product Design a-2 (A100) comprising derived and/or modified sequence from LASV(Lassa virus/H.sapiens-wt/NGA/2015/ISTH_0543;Clade II)__AVO03639__GPCmut7 (opt5)
aggagaguccgcucagccagguugcagaagcggcuuagcguguguccuaaucuucucucugcguguagguaggccugugccgcaaacaagcuuaccaugggccagaucauuaccuucuuucaagaggugccccacgucaucgaagagguuaugaacauugugcugaucgcccucagccugcuugcuauucugaaggggaucuacaauguggccacaugcggacucuucggccuggucuccuuucuucugcucugugggagaucuugcagcacgaccuauaaaggaguguacgaacugcagacacuggagcucgacauggcgaaccugaauaugaccaugccucuuuccuguacaaagaacaauucucaucacuauaucaugguuggcaacgaaaccgggcuggagcucacacugaccaauacgagcauuaucaaccauaaauucugcaaucuuuccgaugcucacaagaaaaaccuguacgaccaugcccucaugucuauuaucagcaccuuucaccuguccauuccgaauuucaaccaguaugaggccaugagcugugauuuuaauggaggcaagaucucugugcaguacaaccugucccacacauaugcugucgacgccgcuaaucauugcggcaccauugccaacggggugcuccaaacauucaugcggauggcguggggaggcagcuacaucgcccuggauucugggaagggauccugggacuguaucaugaccagcuaccaguaucuuguuauucagaacacgacaugggaagaucacugccaguuuucucgccccuccccuaucggcuaccuggggcuccugagccaaagaacccgggacauuuauaucucccgcagacuucugggaacauucaccuggacccucucugauagcgagggcaaugaaacacccggcggguacugucugacgcgguggaugcugauugaggcugagcucaaaugcuuuggaaacaccgccguggcuaaguguaaugaaaaacaugacgaggaguucugcgauaugcugcgccuuuuugacuucaacaagcaggccaucagacggcugaaaaccccugcgcagauguccauccagcucauuaauaaggccgucaacgcucugaucaaugaucaacuuauuaugaagaaccaucugcgcgacaucaugggcauucccuauugcaauuacagcaaauauuguuaccucaaccacacagugacagggaagaccucucugccuagaugcugucugguguccaauggaagcuaccucaacgaaacgcacuucucugacgauaucgaacagcaggccgacaauaugaucacagagcugcuucaaaaagaguauauugaucggcagggcaagaccccgcuggggcucgucgaccuguuuguuuucagcaccuccuuuuaccugaucucuauuuuccuucaccucgugaaaauccccacacaucgccacauuaccggaaagccuugccccaaaccucauagacugaaccacaugggcaucuguagcugcggccuguauaagcaccccggggugccggucaaguggaaacggugaggacuagucccuguucccagagcccacuuuuuuuucuuuuuuugaaauaaaauagccugucuuucagaucuaaaaaaaaaaaaaaaaaaaaaaaaaaaaaaaaaaaaaaaaaaaaaaaaaaaaaaaaaaaaaaaaaaaaaaaaaaaaaaaaaaaaaaaaaaaaaaaaaaaa

SEQ ID NO: 32336 - RNA, 1740 nt, Artificial Sequence
  mRNA product Design a-2 (A100) comprising derived and/or modified sequence from LASV(Lassa virus/H.sapiens-wt/NGA/2016/ISTH_0009;Clade II)__AVO03571__GPCmut7 (opt5)
aggagaguccgcucagccagguugcagaagcggcuuagcguguguccuaaucuucucucugcguguagguaggccugugccgcaaacaagcuuaccaugggccagaucauuaccuucuuucaagaggugccccacgucaucgaagagguuaugaacauugugcugaucgcccucagccugcuugcuauucugaaggggaucuacaauguggccacaugcggacuccugggccuugucuccuuccugcuccugugugggagaucuugcagcacgaccuauaaaggaguguacgaacugcagacacucgagcuggacauggcgucccuuaacaugaccaugccucugucuuguacaaagaauaacagccaucacuauaucaugguuggcaaugaaaccgggcucgagcugacacuuaccaacacguccauuaucaaucauaaauuuugcaaccugucugaugcucacaagaaaaaucucuacgaccaugcccugaugagcauuaucuccaccuuccaccugagcauuccgaacuuuaaucaguaugaggccaugucuugugauuucaacggaggccggaucuccgugcaguacaaucucagccacucuuaugcugucgacgccgcuaaccauugcggcacaauugccaauggggugcugcaaaccuuuaugcgcauggcguggggaggcuccuacaucgcccuugauagcgggaagggaucuugggacuguaucaugacauccuaccaguaucugauuauccagaacaccacgugggaagaucacugccaguucagcagacccuccccuauuggcuaccucgggcugcuuucucaacggacacgcgacaucuauauuagcagacggcugcucggaaccuuuacauggacccuguccgauagcgagggcaacgaaacccccggcggguacugucugacacgcuggaugcucaucgaggcugagcugaagugcuucggaaauacggccguugcuaaauguaacgaaaagcaugacgaggaauuuugcgauaugcuuagacuguucgacuuuaauaaacaggccauccggcgccucaagaccccugcgcagaugucuauucagcugaucaacaaagccgugaaugcucuuauuaacgaucaacugaucaugaagaaucaccucagagacauuaugggcauccccuauugcaacuacuccaaguauuguuaccugaaucacacagucaccgggaaaacaagccugccucggugcugucucgugucuaacggaagcuaccugaaugagacccauuucuccgacgauaucgaacagcaggccgacaacaugauuacggagcuucugcaaaaggaguauaucgaucgccagggcaaaacaccgcucgggcugguggaccuguucgucuuuucuaccagcuucuaccuuauuuccaucuuucuccaccugguuaagauucccacccauagacacaucacaggaaaaccuugccccaagccucaucggcugaaucacaugggcauuuguagcugcggccucuauaaccaccccggggugccggugaaauggaagcgcugaggacuagucccuguucccagagcccacuuuuuuuucuuuuuuugaaauaaaauagccugucuuucagaucuaaaaaaaaaaaaaaaaaaaaaaaaaaaaaaaaaaaaaaaaaaaaaaaaaaaaaaaaaaaaaaaaaaaaaaaaaaaaaaaaaaaaaaaaaaaaaaaaaaaa

SEQ ID NO: 32337 - RNA, 1740 nt, Artificial Sequence
  mRNA product Design a-2 (A100) comprising derived and/or modified sequence from LASV(Lassa virus/H.sapiens-wt/NGA/2016/ISTH_0017;Clade II)__AVO03567__GPCmut7 (opt5)
aggagaguccgcucagccagguugcagaagcggcuuagcguguguccuaaucuucucucugcguguagguaggccugugccgcaaacaagcuuaccaugggccagaucauuaccuucuuucaagaggugccccacgucaucgaagagguuaugaacauugugcugaucgcccucagccugcuugcuauucugaaggggaucuacaauguggccacaugcggacucuucggccuggucuccuuucuucugcucugugggagaucuugcagcacgaccuauaaaggaguguacgaacugcagacacuggagcucgacauggcgucccugaacaugaccaugccucuuucuuguacaaagaauaacagccaucacuauaucaugguuggcaaugaaaccgggcuggagcucacacugaccaacacguccauuaucaaucauaaauucugcaaccuuucugaugcucacaagaaaaaucuguacgaccaugcccucaugagcauuaucuccaccuuucaccugagcauuccgaacuucaaucaguaugaggccaugucuugugauuuuaacggaggcaagaucuccgugcaguacaaucugagccacacauaugcuauugacgccgcuaaccauugcggcaccaucgccaaugggguccuccaaacauucaugcggauggcguggggaggcucuuacaucgcccuggauuccgggaagggaagcugggacuguauuaugaccucuuaccaguaucuuaucauucagaacacgacaugggaagaucacugccaguuuucccgccccagcccuaucggcuaccuggggcuccugucccaaagaacccgggacauuuauaucucucgcagacuucugggaacauucaccuggacccucagcgauuccgagggcaacgaaacacccggcggguacugucugacgcgguggaugcugaucgaggcugagcucaaaugcuuuggaaauaccgccguggcuaaguguaacgaaaaacaugacgaggaguucugcgauaugcugcgccuuuuugacuucaauaagcaggccauuagacggcugaaaaccccugcgcagaugagcauccagcucauuaacaaggccguuaaugcucugaucaacgaucaacuuauuaugaagaaucaucugcgcgacaucaugggcauccccuauugcaacuacucuaaauauuguuaccucaaucacacagugacagggaagaccucccugccuagaugcugucuggucagcaacggaucuuaccucaaugaaacgcacuucagcgacgauauugaacagcaggccgacaacaugaucacagagcugcuucaaaaagaguauauggaucggcagggcaagaccccgcuggggcucguggaccuguuuguguucuccaccucuuuuuaccugauuagcaucuuccuucaccucguccgcauucccacacauagacacguuaucggaaaaccuugccccaagccucaucggcugaaucacaugggcauuuguuccugcggccuguauaaacaccccggggugccggugaaguggaagcgcugaggacuagucccuguucccagagcccacuuuuuuuucuuuuuuugaaauaaaauagccugucuuucagaucuaaaaaaaaaaaaaaaaaaaaaaaaaaaaaaaaaaaaaaaaaaaaaaaaaaaaaaaaaaaaaaaaaaaaaaaaaaaaaaaaaaaaaaaaaaaaaaaaaaaa

SEQ ID NO: 32338 - RNA, 1740 nt, Artificial Sequence
  mRNA product Design a-2 (A100) comprising derived and/or modified sequence from LASV(Lassa virus/H.sapiens-wt/NGA/2018/ISTH_0959;Clade II)__AVV65099__GPCmut7 (opt5)
aggagaguccgcucagccagguugcagaagcggcuuagcguguguccuaaucuucucucugcguguagguaggccugugccgcaaacaagcuuaccaugggccagaucauuaccuucuuucaagaggugccccacgucaucgaagagguuaugaacauugugcugaucgcccucagccugcuugcuauucugaaggggaucuacaauguggucacaugcggacucuucggccugguguccuuucuucugcucugugggagaucuugcagcacgaccuauaaaggaguuuacgaacugcagacacuggagcucgacauggccucccugaacaugaccaugccucuuucuuguacaaagaauaacagccaucacuauaucauggugggcaaugaaaccgggcuggagcucacacugaccaacacguccauuaucaaucauaaauucugcaaccuuucugaugcgcacaagaaaaaucuguacgaccaugcucucaugagcauuaucuccaccuuucaccugagcauuccgaacuucaaucaguaugaggccaugucuugugauuuuaacggaggcaagaucuccguccaguacaaucugagccacgccuaugcuauugacgccgcuaaccauugcggcacaaucgccaauggggugcuccaaaccuucaugcggauggcguggggaggcucuuacaucgcccuggauuccgggaagggaagcugggacuguauuaugacaucuuaccaguaucuuaucauucagaacaccacgugggaagaucacugccaguuuucccgccccagcccuaucggcuaccuggggcuccugucccaaagaacacgggacauuuauaucucucgcagacuucugggaaccuucacauggacccucagcgauuccgagggcaacgaaacccccggcggguacugucugacacgguggaugcugaucgaggcugagcucaaaugcuuuggaaauacggccguugcuaaguguaacgaaaaacaugacgaggaguucugcgauaugcugcgccuuuuugacuucaauaagcaggccauuagacggcugaaaaccccugcgcagaugagcauccagcucauuaacaaggccgugaaugcucugaucaacgaucaacuuauuaugaagaaucaucugcgcgacaucaugggcauccccuauugcaacuacucuaaauauuguuaccucaaucacacagucaccgggaagacaucccugccuagaugcugucuggugagcaacggaucuuaccucaaugaaacccacuucagcgacgauauugaacagcaggccgacaacaugaucacggagcugcuucaaaaagaguauauugaucggcagggcaagacaccgcuggggcucguggaccuguuugucuucuccaccucuuuuuaccugaucagcauuuuccuucaccucguuaaaauccccacccaucgccacgugauuggaaagccuugccccaaaccucauagacugaaucacaugggcaucuguuccugcggccuguauaagcaccccggggugccggucaaguggaaacggugaggacuagucccuguucccagagcccacuuuuuuuucuuuuuuugaaauaaaauagccugucuuucagaucuaaaaaaaaaaaaaaaaaaaaaaaaaaaaaaaaaaaaaaaaaaaaaaaaaaaaaaaaaaaaaaaaaaaaaaaaaaaaaaaaaaaaaaaaaaaaaaaaaaaa

SEQ ID NO: 32339 - RNA, 1740 nt, Artificial Sequence
  mRNA product Design a-2 (A100) comprising derived and/or modified sequence from LASV(LASV003-NIG-2008;Clade II)__AIT17580__GPCmut7 (opt5)
aggagaguccgcucagccagguugcagaagcggcuuagcguguguccuaaucuucucucugcguguagguaggccugugccgcaaacaagcuuaccaugggccagaucauuaccuucuuucaagaggugccccacgucaucgaagagguuaugaacauugugcugaucgcccucagccugcuugcuauucugaaggggaucuacaauguggccacaugcggacucuucggccuggucuccuuucuucugcucugugggagaucuugcagcacgaccuauaaaggaguguacgaacugcagacacuggagcucgacauggcgucccugaacaugaccaugccucuuucuuguacaaagaauaacagccaucacuauaucaugguuggcaaugaaaccgggcuggagcucacacugaccaacacguccauuaucaaucauaaauucugcaaccuuucugaugcucacaagaaaaaucuguacgaccaugcccucaugagcauuaucuccaccuuucaccugagcauuccgaacuucaaucaguaugaggccaugucuugugauuuuaacggaggcaagaucuccgugcaguacaaucugagccacacauaugcugucgacgccgcuaaccauugcggcaccauugccaauggggugcuccaaacauucaugcggauggcguggggaggcucuuacaucgcccuggauuccgggaagggaagcugggacuguaucaugaccucuuaccaguaucuuauuauccagaacacgacaugggaagaucacugccaguuuucccgccccagcccuauuggcuaccuggggcuccugucccaaagaacccgggacaucuauauuucucgcagacuucugggaacauucaccuggacccucagcgauuccgagagcaacgaaacacccggcggcuacugucugacgcgguggaugcugaucgaggcugagcucaaaugcuuugggaauaccgccguugcuaaguguaacgaaaaacaugacgaggaguucugcgauaugcugcgccuuuuugacuucaauaagcaggccaucagacggcugaaagcgccugcccagaugucuauucagcucaucaacaaggcugugaaugcccugauuaacgaucaacuuaucaugaagaaucaucugcgcgacauuaugggaauccccuauugcaacuacuccaaauauuguuaccucaaucacacagucaccggcagaacaagccugccucggugcugucuggugucuaacgggagcuaccucaaugaaacccacuucuccgacgauaucgaacagcaggcugacaacaugauuacggagcugcuucaaaaggaguauauggaucgccagggaaaaacaccgcugggccucguggaccuguuugucuucucuaccagcuuuuaccugaucuccauuuuccuucaccucguuaagauccccacccauagacacgugauugggaaaccuugccccaagccucaucggcugaaucacaugggaaucuguagcugcggccuguauaaacaccccggcgugccggucaaguggaagcgcugaggacuagucccuguucccagagcccacuuuuuuuucuuuuuuugaaauaaaauagccugucuuucagaucuaaaaaaaaaaaaaaaaaaaaaaaaaaaaaaaaaaaaaaaaaaaaaaaaaaaaaaaaaaaaaaaaaaaaaaaaaaaaaaaaaaaaaaaaaaaaaaaaaaaa

SEQ ID NO: 32340 - RNA, 1740 nt, Artificial Sequence
  mRNA product Design a-2 (A100) comprising derived and/or modified sequence from LASV(LASV035-NIG-2009;Clade II)__AIT17588__GPCmut7 (opt5)
aggagaguccgcucagccagguugcagaagcggcuuagcguguguccuaaucuucucucugcguguagguaggccugugccgcaaacaagcuuaccaugggccagaucauuaccuucuuucaagaggugccccacgucaucgaagagguuaugaacauugugcugaucgcccucagccugcuugcuauucugaaggggaucuacaauguggccacaugcggacucuucggccuggucuccuuucuucugcucugugggagaucuugcagcacgaccuauaaaggaguguacgaacugcagacacuggagcucgacauggcgucccugaacaugaccaugccucuuucuuguacaaagaauaacagccaucacuauaucaugguuggcaaugaaaccgggcuggagcucacacugaccaacacguccauuaucaaucauaaauucugcaaccuuucugaugcucacaagaaaaaucuguacgaccaugcccucaugagcauuaucuccaccuuucaccugagcauuccgaacuucaaucaguaugaggccaugucuugugauuuuaacggaggcaagaucuccgugcaguacaaucugagccacgcuuaugccgucgacgcugccaaccauugcggcacaauugcgaauggggugcuccaaaccuucaugcggauggccuggggaggcucuuacaucgcucuggauuccgggaagggaagcugggacuguaucaugacaucuuaccaguaucuuauuauccagaacaccacgugggaagaucacugccaguuuucccgccccagcccuauuggcuaccuggggcuccugucccaaagaacacgggacaucuauauuucucgcagacuucugggaaccuucacauggacccucagcgauuccgagggcaacgaaacccccggcggguacugucugacacgguggaugcugaucgaggccgagcucaaaugcuuuggaaauacggcuguugccaaguguaacgaaaaacaugacgaggaguucugcgauaugcugcgccuuuuugacuucaauaagcaggcgaucagacggcugaaagccccugcucagaugagcauucagcucaucaacaaggccgugaaugcucugauuaacgaucaacuuaucaugaagaaucaucugcgcgacauuaugggcauccccuauugcaacuacucuaaauauuguuaccucaaucacaccgucacagggaagaccucccugccuagaugcugucuggugagcaacggaucuuaccucaaugaaacacacuucagcgacgauaucgaacagcaggccgacaacaugauuaccgagcugcuucaaaaagaguauaucgaucggcagggcaagacgccgcuggggcucguggaccuguuugucuucuccacaucuuuuuaccugauuagcaucuuccuucaccucguuaaaauucccacccaucgccacgugaucggaaagccuugccccaaaccucauagacugaaucacaugggcauuuguuccugcggccuguauaagcaccccggggugccggucaaguggaaacggugaggacuagucccuguucccagagcccacuuuuuuuucuuuuuuugaaauaaaauagccugucuuucagaucuaaaaaaaaaaaaaaaaaaaaaaaaaaaaaaaaaaaaaaaaaaaaaaaaaaaaaaaaaaaaaaaaaaaaaaaaaaaaaaaaaaaaaaaaaaaaaaaaaaaa

SEQ ID NO: 32341 - RNA, 1740 nt, Artificial Sequence
  mRNA product Design a-2 (A100) comprising derived and/or modified sequence from LASV(LASV1000-NIG-2009;Clade II)__AIT17782__GPCmut7 (opt5)
aggagaguccgcucagccagguugcagaagcggcuuagcguguguccuaaucuucucucugcguguagguaggccugugccgcaaacaagcuuaccaugggccagaucauuaccuucuuucaagaggugccccacgucaucgaagagguuaugaacauugugcugaucgcccucagccugcuugcuauucugaaggggaucuacaauguggccacaugcggacucuucggccuggucuccuuucuucugcucugugggagaucuugcagcacgaccuauaaaggaguguacgaacugcagacacuggagcucgacauggcgucccugaacaugaccaugccucuuucuuguacaaagaauaacagccaucacuauaucaugguuggcaaugaaaccgggcuggagcucacacugaccaacacguccauuaucaaucauaaauucugcaaccuuucugaugcucacaagaaaaaucuguacgaccaugcccucaugagcauuaucuccaccuuucaccugagcauuccgaacuucaaucaguaugaggccaugucuugugauuuuaacggaggcaagaucuccgugcaguacaaucugagccacacauaugcugucgacgccgcuaaccauugcggcaccauugccaauggggugcuccaaacauucaugcggauggcguggggaggcucuuacaucgcccuggauuccgggaagggaagcugggacuguaucaugaccucuuaccaguaucuuauuauccagaacacgacaugggaagaucacugccaguuuucccgccccagcccuauuggcuaccuggggcuccugucccaaagaacccgggacaucuauauuucucgcagacuucugggaacauucaccuggacccucagcgauuccgagggcaacgaaacacccggcggguacugucugacgcgguggaugcugaucgaggcugagcucaaaugcuuuggaaauaccgccguugcuaaguguaacgaaaaacaugacgaggaguucugcgauaugcugcgccuuuuugacuucaauaagcaggccaucaaaagacugaagaccccugcgcagaugagcauucagcucaucaacaaggccgugaaugcucugauuaacgaucaacuuaucaugaaaaaucaucugcgggacauuaugggcauccccuauugcaacuacucuaaguauuguuaccucaaucacacagucacagggaaaaccucccugccucgcugcugucuggugagcaacggaucuuaccucaaugaaacgcacuucagcgacgauaucgaacagcaggccgacaacaugauuacagagcugcuucaaaaggaguauaucgauagacagggcaaaaccccgcuggggcucguggaccuguuugucuucuccaccucuuuuuaccugauuagcaucuuccuucaccucguuaagauucccacacaucggcacguggugggaaaaccuugccccaagccucaucgccugaaucacaugggcaucuguuccugcggccuguauaagcaccccggggucccggugaaauggaagagaugaggacuagucccuguucccagagcccacuuuuuuuucuuuuuuugaaauaaaauagccugucuuucagaucuaaaaaaaaaaaaaaaaaaaaaaaaaaaaaaaaaaaaaaaaaaaaaaaaaaaaaaaaaaaaaaaaaaaaaaaaaaaaaaaaaaaaaaaaaaaaaaaaaaaa

SEQ ID NO: 32342 - RNA, 1740 nt, Artificial Sequence
  mRNA product Design a-2 (A100) comprising derived and/or modified sequence from LASV(LASV221-NIG-2010;Clade II)__AIT17624__GPCmut7 (opt5)
aggagaguccgcucagccagguugcagaagcggcuuagcguguguccuaaucuucucucugcguguagguaggccugugccgcaaacaagcuuaccaugggccagaucauuaccuucuuucaagaggugccccacgucaucgaagagguuaugaacauugugcugaucgcccucagccugcuugcuauucugaaggggaucuacaauguggccacaugcggacucuucggccuggucuccuuucuucugcucugugggagaucuugcagcacgaccuauaaaggaguguacgaacugcagacacuggagcucgacauggcgucccugaacaugaccaugccucuuucuuguacaaagaauaacagccaucacuauaucaugguuggcaaugaaaccgggcuggagcucacacugaccaacacguccauuaucaaucauaaauucugcaaccuuucugaugcucacaagaaaaaucuguacgaccaugcccucaugagcauuaucuccaccuuucaccugagcauuccgaacuucaaucaguaugaggccaugucuugugauuuuaacggaggcaagaucuccgugcaguacaaucugagccacacauaugcuauugacgccgcuaaccauugcggcaccaucgccaaugggguccuccaaacauucaugcggauggcguggggaggcucuuacaucgcccuggauuccgggaagggaagcugggacuguauuaugaccucuuaccaguaucuuaucauucagaacacgacaugggaagaucacugccaguuuucccgccccagcccuaucggcuaccuggggcuccugucccaaagaacccgggacauuuauaucucucgcagacuucugggaacauucaccuggacccucagcgauuccgagggcaacgaaacacccggcggguacugucugacgcgguggaugcugaucgaggcugagcucaaaugcuuuggaaauaccgccguggcuaaguguaacgaaaaacaugacgaggaguucugcgauaugcugcgccuuuuugacuucaauaagcaggccauuagacggcugaaaaccccugcgcagaugagcauccagcucauuaacaaggccguuaaugcucugaucaacgaucaacuuauuaugaagaaucaucugcgcgacaucaugggcauccccuauugcaacuacucuaaauauuguuaccucaaucacacagugacagggaagaccucccugccuagaugcugucuggucagcaacggaucuuaccucaaugaaacgcacuucagcgacgauauugaacagcaggccgacaacaugaucacagagaugcugcaaaaagaguauauggaucggcagggcaagaccccgcuugggcugguggaccucuuuguguucuccaccucuuuuuaccugauuagcaucuuccugcaccuugucaaaauucccacacaucgccacguuaucggaaagccuugccccaaaccucauagacucaaucacaugggcauuuguuccugcggccuguauaagcaccccggggugccggugaaguggaaacggugaggacuagucccuguucccagagcccacuuuuuuuucuuuuuuugaaauaaaauagccugucuuucagaucuaaaaaaaaaaaaaaaaaaaaaaaaaaaaaaaaaaaaaaaaaaaaaaaaaaaaaaaaaaaaaaaaaaaaaaaaaaaaaaaaaaaaaaaaaaaaaaaaaaaa

SEQ ID NO: 32343 - RNA, 1740 nt, Artificial Sequence
  mRNA product Design a-2 (A100) comprising derived and/or modified sequence from LASV(LASV237-NIG-2010;Clade II)__AIT17638__GPCmut7 (opt5)
aggagaguccgcucagccagguugcagaagcggcuuagcguguguccuaaucuucucucugcguguagguaggccugugccgcaaacaagcuuaccaugggccagaucauuaccuucuuucaagaggugccccacgucaucgaagagguuaugaacauugugcugaucgcccucagccugcuugcuauucugaaggggaucuacaauguggccacaugcggacucuucggccuggucuccuuucuucugcucugugggagaucuugcagcacgaccuauaaaggaguguacgaacugcagacacuggagcucgacauggcgucccugaacaugaccaugccucuuucuuguacaaagaauaacagccaucacuauaucaugguuggcaaugaaaccgggcuggagcucacacugaccaacacguccauuaucaaucauaaauucugcaaccuuucugaugcucacaagaaagaccuguacgaucaugcccucaugagcauuaucuccaccuuucaccugagcauuccgaauuucaaccaguaugaggccaugucuugugacuuuaauggaggcaagaucuccgugcaguacaaccugagccacacauaugcugucgaugccgcuaaucauugcggcaccauugccaacggggugcuccaaacauucaugcggauggcguggggaggcucuuacaucgcccuggacuccgggaagggaagcugggauuguaucaugaccucuuaccaguaucuuauuauccagaauacgacaugggaagaccacugccaguuuucccgccccagcccuauuggcuaccuggggcuccugucccaaagaacccgggauaucuauauuucucgcagacuucugggaacauucaccuggacccucagcgacuccgagggcaacgaaacacccggcggguacugucugacgcgguggaugcugaucgaggcugagcucaaaugcuuuggaaacaccgccguugcuaaguguaaugaaaaacaugaugaggaguucugcgacaugcugcgccuuuuugauuucaacaagcaggccaucagacggcugaaaaccccugcgcagaugagcauucagcucaucaauaaggccgugaacgcucugauuaaugaccaacuuaucaugaagaaccaucugcgcgacauuaugggcauccccuauugcaauuacucuaaauauuguuaccucaaccacacagucacagggaagaccucccugccuagaugcugucuggugagcaauggaucuuaccucaacgaaacgcacuucagcgaugacaucgaacagcaggccgauaauaugauuacagagcugcuucaaaaagaguauauggaccggcagggcaagaccccgcuggggcucguggaucuguuugucuucuccaccucuuuuuaccugaucagcauuuuccuucaccucaucaaaauucccacacaucgccacaucaccggaaagccuugccccaaaccucauagacugaaccacaugggcauuuguuccugcggccuguauaagcaccccgggguuccggugaaguggaaacggugaggacuagucccuguucccagagcccacuuuuuuuucuuuuuuugaaauaaaauagccugucuuucagaucuaaaaaaaaaaaaaaaaaaaaaaaaaaaaaaaaaaaaaaaaaaaaaaaaaaaaaaaaaaaaaaaaaaaaaaaaaaaaaaaaaaaaaaaaaaaaaaaaaaaa

SEQ ID NO: 32344 - RNA, 1740 nt, Artificial Sequence
  mRNA product Design a-2 (A100) comprising derived and/or modified sequence from LASV(LASV253-NIG-2011;Clade II)__AIT17670__GPCmut7 (opt5)
aggagaguccgcucagccagguugcagaagcggcuuagcguguguccuaaucuucucucugcguguagguaggccugugccgcaaacaagcuuaccaugggccagaucauuaccuucuuucaagaggugccccacgucaucgaagagguuaugaacauugugcugaucgcccucagccugcuugcuauucugaaggggaucuacaauguggccacaugcggacucuucggccuggucuccuuucuucugcucugugggagaucuugcagcacgaccuauaaaggaguguacgaacugcagacacuggagcucgacauggcgucccugaacaugaccaugccucuuucuuguacaaagaauaacagccaucacuauaucaugguuggcaaugaaaccgggcuggagcucacacugaccaacacguccauuaucaaucauaaauucugcaaccuuucugaugcucacaagaaaaaucuguacgaccaugcccucaugagcauuaucuccaccuuucaccugagcauuccgaacuucaaucaguaugaggccaugucuugugauuuuaacggaggcaagaucuccgugcaguacaaucugagccacacauaugcugucgacgccgcuaaccauugcggcaccauugccaauggggugcuccaaacauucaugcggauggcguggggaggcucuuacaucgcccuggauuccgggaagggaagcugggacuguaucaugaccucuuaccaguaucuuauuauccagaacacgacaugggaagaucacugccaguuuucccgccccagcccuauuggcuaccuggggcuccugucccaaagaacccgggacaucuauauuucucgcagacuucugggaacauucaccuggacccucagcgauuccgagggcaacgaaacacccggcggguacugucugacgcgguggaugcugaucgaggcugagcucaaaugcuuuggaaauaccgccguugcuaaguguaacgaaaaacaugacgaggaguucugcgauaugcugcgccuuuuugacuucaauaagcaggccaucagacggcugaaagcgccugcccagaugagcauucagcucaucaacaaggcugugaaugcccugauuaacgaucaacuuaucaugaagaaucaucugcgcgacauuaugggcauccccuauugcaacuacucuaaauauuguuaccucaaucacacagucaccgggagaacaucccugccucggugcugucuggugagcaacggaucuuaccucaaugaaacccacuucagcgacgauaucgaacagcaggcugacaacaugauuacggagcugcuucaaaaggaguauaucgaucgccagggcaaaacaccgcuggggcucguggaccuguuugucuucuccaccucuuuuuaccugauuagcaucuuccuucaccucguuaagauucccacccauagacacaucauuggaaaaccuugccccaagccucaucggcugaaucacaugggcaucuguuccugcggccuguauaaacaccccggggugccggugaaguggaagcgcugaggacuagucccuguucccagagcccacuuuuuuuucuuuuuuugaaauaaaauagccugucuuucagaucuaaaaaaaaaaaaaaaaaaaaaaaaaaaaaaaaaaaaaaaaaaaaaaaaaaaaaaaaaaaaaaaaaaaaaaaaaaaaaaaaaaaaaaaaaaaaaaaaaaaa

SEQ ID NO: 32345 - RNA, 1740 nt, Artificial Sequence
  mRNA product Design a-2 (A100) comprising derived and/or modified sequence from LASV(LASV254-NIG-2011;Clade II)__AIT17674__GPCmut7 (opt5)
aggagaguccgcucagccagguugcagaagcggcuuagcguguguccuaaucuucucucugcguguagguaggccugugccgcaaacaagcuuaccaugggccagaucauuaccuucuuucaagaggugccccacgucaucgaagagguuaugaacauugugcugaucgcccucagccugcuugcuauucugaaggggaucuacaauguggccacaugcggacucuucggccuggucuccuuucuucugcucugugggagaucuugcagcacgaccuauaaaggaguguacgaacugcagacacuggagcucgacaugaccaaccugaauaugacaaugccucuuuccuguaccaagaacaauucucaucacuauaucaugguuggcaacgaaacagggcuggagcucacccugacgaauaccagcauuaucaaccauaaauucugcaaucuuuccgaugcgcacaagaaaaaccuguacaaucaugcucucaugucuauuaucagcacauuucaccuguccauuccgaacuucaaucaguaugaggccaugagcugugacuuuaacggaggcaagaucucugugcaguacaaucugucccacagcuaugccgucgaugcugccaaccauugcggcaccauugcuaacggggugcuccaaacauucaugcggauggccuggggaggcucuuacaucgcgcuggacuccgggaagggaaauugggauuguaucaugaccagcuaccaguaucuuauuauccagaacacgacaugggaagaccacugccaguuuucucgccccuccccuauuggcuaccuggggcuccugagccaaagaacccgggauaucuauauuucccgcagacuucugggaacauucaccuggacccucucugacagcgagggcaaugaaacacccggcggguacugucugacgcgguggaugcugaucgaggccgagcucaaaugcuuuggaaacaccgcuguugccaaguguaaugaaaaacaugaugaggaguucugcgacaugcugcgccuuuuugauuucaacaagcaggcuaucagacggcugaaaaccccugcccaggcgaauauucagcucaucaacaaggccgugaaugcucugauuaacgaccaacuuaucaugaagaaucaucugcgcgauauuaugggcauccccuauugcaacuacuccaaauauuguuaccucaaucacacagucacagggaagaccagccugccuagaugcugucuggugucuaacggauccuaccucaaugaaacgcacuucagcgacgacaucgaacagcaggccgauaacaugauuacagagcugcuucaaaaagaguauauggaccggcagggcaagaccccgcuggggcucguggaucuguuugucuucucuaccagcuuuuaccugaucuccauuuuccuucaccucguuaaaauccccacacaucgccacgugauuggaaagccuugccccaaaccucauagacugaaccacaugggcaucuguucuugcggccuguauaagcaccccggggugccggucaaguggaaacggugaggacuagucccuguucccagagcccacuuuuuuuucuuuuuuugaaauaaaauagccugucuuucagaucuaaaaaaaaaaaaaaaaaaaaaaaaaaaaaaaaaaaaaaaaaaaaaaaaaaaaaaaaaaaaaaaaaaaaaaaaaaaaaaaaaaaaaaaaaaaaaaaaaaaa

SEQ ID NO: 32346 - RNA, 1740 nt, Artificial Sequence
  mRNA product Design a-2 (A100) comprising derived and/or modified sequence from LASV(Nig08-A19;Clade III)__ADU56618__GPCmut7 (opt5)
aggagaguccgcucagccagguugcagaagcggcuuagcguguguccuaaucuucucucugcguguagguaggccugugccgcaaacaagcuuaccaugggccagaucgugaccuucuuucaagaggucccccacguuauugaagaggugaugaacaucgugcugauugcccucagcauccuggcuauucuuaaggggcuguacaauaucgccacaugcggacucaucggccuggucacguuccuucugcucuccgggagaucuuguagcaugaccuauaaaggaguguacgaacugcagacacuggagcucaacaugaauacccugaacaugacaaugccucuuuccugcaccaagaauaacucucaucacuauauuaugguuggcaaugaaacagggcuggagcucacccugacgaacaccagccuucugcaucacaaauuuuguaaucucuccgacgcgcauaagaaaaaccuguacgaucacacacugaugucuaucauuagcaccuuccaccucuccaucccgaauuuuaaccaguaugaggcuaugagcugcgacuucaauggaggcaagauuacagugcaguacaaccugucucauuccuaugccaucgaugccgcuaaucacuguggcaccgucgccaacggggugcuucaaacguuuaugcggauggcuuggggaggcagcuacauugcccuggacucugggcgcggaaagugggauugcaucaugacauccuaccaguaucucaucauucagaacaccacaugggaagaccauugucaguucagcagacccucuccuaucggcuaccuggggcuucugucccaacggacccgcgauauuuauaucagcagacggcuccugggaaccuuuacauggacgcuguccgacucugagggcaaugaaacccccggcggguacugccucacacgcuggaugcugauugaggcggagcuuaaauguuucggaaacaccgccguugcuaagugcaaugaaaaacacgaugaggaauuuugugacaugcugagacucuucgauuuuaacaagcaggccauccggcgccugaaagcuccugcccagaugagcauccagcuuauuaauaaggcggugaacgcccugaucaaugaccaacucauuaugaagaaccaccugagagauaucaugggcauucccuauugcaauuacuccaaauauugcuaccugaaccauacaagcaccgggcggacgucucucccucgcuguugccuggucuccaauggaagcuaccuuaacgagacacacuucucugacgacaucgaacagcaggcugauaauaugaucaccgagaugcugcaaaaggaguaucucgacagacagggcaaaaccccgcuggggcugguggaucuuuucguguuuagcacauccuucuaccucauuucuaucuuucugcaucuggucaagauucccacccaccggcauaucguuggaaaaccuugucccaagccucaccgccucaaccacaugggcauuugcagcuguggccuguauaaacagcccggggugccggugagauggaagcggugaggacuagucccuguucccagagcccacuuuuuuuucuuuuuuugaaauaaaauagccugucuuucagaucuaaaaaaaaaaaaaaaaaaaaaaaaaaaaaaaaaaaaaaaaaaaaaaaaaaaaaaaaaaaaaaaaaaaaaaaaaaaaaaaaaaaaaaaaaaaaaaaaaaaa

SEQ ID NO: 32347 - RNA, 1743 nt, Artificial Sequence
  mRNA product Design a-2 (A100) comprising derived and/or modified sequence from LASV(G1180-SLE-2010;Clade IV)__AIT17168__GPCmut7 (opt5)
aggagaguccgcucagccagguugcagaagcggcuuagcguguguccuaaucuucucucugcguguagguaggccugugccgcaaacaagcuuaccaugggccagaucgugaccuucuuucaagaggucccccacguuauugaagaggugaugaacaucgugcugauugcccucagcauccuggcuguccuuaaggggcuguacaauuucgccacaugcggacucgugggccugcuuacguuucugcuccugugugggagauccugcaccgcgucucgguauaaaggaguuuacgaacugcagacacucgagcugaacauggaaacccuuaauaugacaaugccucugagcuguaccaagaacaauucccaucacuauauuauggugggcaacgagacagggcucgagcugacccuuacgaauaccucuaucaucaaccauaaauucugcaaucugagcgacgcucacaagaaaaaccucuacgaucaugcccugauguccauuaucucuacauuucaccugagcauuccgaauuucaaccaguaugaagccauguccugugacuuuaauggaggcaagaucagcguccaguacaaccucucucacuccuaugcuggcgaugccgcuaaucauugcgggaccguggccaacggaguucugcaaacauucaugcgcauggcguggggcgggagcuacauugcccuugacucuggacacggcuccugggauuguaucaugaccagcuaccaguaucugauuauccagaacacgacaugggaggaccauugccaguuuucuagacccuccccuaucggguaccucggacugcuuagccaacggacccgcgauauuuauaucuccagacggcugcucggcacauucaccuggacccugucugacagcgaaggcaaggauacacccgggggauacugucugacgcgcuggaugcucauugaggcugagcugaaaugcuuuggcaauaccgccguggcuaaguguaacgaaaaacacgacgaggaguucugcgauaugcuuagacuguuugacuucaauaagcaggccauccagcggcucaaagcgccugcccagauguccauucaacugaucaacaaggcugucaaugcccuuaucaacgaucagcugauuaugaagaaucaccuccgcgacaucauggggauucccuauugcaacuacagcaaauauuguuaccugaaucauacaaccacaggaaagaccucucugccuaaaugcugucucguguccaacggcagcuaccugaaugaaacgcacuucucugacgauaucgaacagcaagcugacaacaugauuacagagaugcuucagaaggaguauauggaaagacaggggaaaaccccgcugggacucguggaucuguuugucuucagcaccuccuuuuaccugaucucuaucuuccuucaucucguuaagauucccacacaccggcauaucgugggcaaaagcugcccuaagccccaccgccugaaucacaugggcauuuguuccugcgggcuguauaagcagccuggagugcccgucaaauggaagagaugaggacuagucccuguucccagagcccacuuuuuuuucuuuuuuugaaauaaaauagccugucuuucagaucuaaaaaaaaaaaaaaaaaaaaaaaaaaaaaaaaaaaaaaaaaaaaaaaaaaaaaaaaaaaaaaaaaaaaaaaaaaaaaaaaaaaaaaaaaaaaaaaaaaaa

SEQ ID NO: 32348 - RNA, 1743 nt, Artificial Sequence
  mRNA product Design a-2 (A100) comprising derived and/or modified sequence from LASV(G1442-SLE-2011;Clade IV)__AIT17180__GPCmut7 (opt5)
aggagaguccgcucagccagguugcagaagcggcuuagcguguguccuaaucuucucucugcguguagguaggccugugccgcaaacaagcuuaccaugggccagaucgugaccuucuuucaagaggucccccacguuauugaagaggugaugaacaucgugcugauugcccucagcauccuggcuguccuuaaggggcuguacaauguggccacaugcggacucauuggccugguuacguuccuucugcucugugggagauccugcaccacaacccuguauaaaggaguguacgaacugcagacacucgagcugaacauggaaacccuuaauaugacaaugccucugucuuguaccaagaacaauagccaucacuauauccgggucggcaacgagacggggcucgagcugacccuuacaaauaccuccaucauuaaccauaaauuuugcaaucugucugacgcgcacaagaaaaaccucuacgaucaugcucugaugagcaucauuuccacauuccaccugucuaucccgaauuuuaaccaguaugaagccaugagcugugacuucaauggaggcaagauuuccgugcaguacaaccucagccacucuuaugccggcgaugcugccaaucauugcgggaccguugcuaacggagugcugcaaacguuuaugcgcauggccuggggcggguccuacaucgcgcuugacagcggaagaggcaacugggauuguauuaugacaucuuaccaguaucugaucauccagaauaccacaugggacgaucacugccaguucucccggcccagcccuauuggguaccucggacugcuuucucaacgcaccagagacgucuauaucucccggcgccugcucggcaccuuuacauggacgcugagcgauuccgagggcaaggacacccccgggggauacugucugacaagauggaugcucauugaagccgagcugaaaugcuucggcaacaccgcuguggccaaguguaaugagaaacaugaugaagaguuuugcgacaugcuucggcuguucgauuuuaacaagcaggcuauccagcgccucaaagccccugcgcagaugucuauucaacugaucaauaaggccgugaacgcucuuaucaaugaccagcugauuaugaagaaccaccucagagacaucauggggauucccuauugcaauuacagcaaauauuguuaccugaacaauacagccaccggaaagacgucccugccuaaaugcugucucaucagcaacggcucuuaccugaaugaaacacacuucuccgaugacauugagcaggaagcugauaacaugaucaccgagaugcuucaaaaggaguauauggaacggcaggggaaaaccccgcugggacucgucgaccuguucguuuuuagcacaucuuucuaccugaucagcauuuuucuucaucucgugaagauccccacccaccgccauauugugggcaaauccugcccuaagccccacagacugaaucauaugggcaucuguucuugcgggcuguauaagcagccuggaguccccgugcgguggaaacgcugaggacuagucccuguucccagagcccacuuuuuuuucuuuuuuugaaauaaaauagccugucuuucagaucuaaaaaaaaaaaaaaaaaaaaaaaaaaaaaaaaaaaaaaaaaaaaaaaaaaaaaaaaaaaaaaaaaaaaaaaaaaaaaaaaaaaaaaaaaaaaaaaaaaaa

SEQ ID NO: 32349 - RNA, 1743 nt, Artificial Sequence
  mRNA product Design a-2 (A100) comprising derived and/or modified sequence from LASV(G3010-SLE-2013;Clade IV)__AIT17344__GPCmut7 (opt5)
aggagaguccgcucagccagguugcagaagcggcuuagcguguguccuaaucuucucucugcguguagguaggccugugccgcaaacaagcuuaccaugggccagaucgugaccuucuuucaagaggucccccacguuauugaagaggugaugaacaucgugcugauugcccucagcauccuggcuguccuuaaggggcuguacaauuucgccacaugcggacucgugggccugguuacguuucuucugcucugugggagauccugcaccacaucucuguauaaaggaguguacgaacugcagacccucgagcugaacauggaaacacuuaauaugaccaugccucugagcuguacaaagaacaauucccaucacuauauuauggucggcaacgagaccgggcucgagcugacgcuuaccaauacaucuaucaucaaccauaaauucugcaaucugagcgacgcgcacaagaaaaaccucuacaaucaugcucugauguccauuaucucuaccuuucaccugagcauuccgaacuucaaucaguaugaagccauguccugugauuuuaacggaggcaagaucagcgugcaguacaaucucucucacuccuaugccggcgacgcugccagccauugcgggacaguugcuaacggagugcugcaaaccuucaugcggauggccuggggcgggucuuacauugcgcuugauuccggauacggcaagugggacuguaucaugacgagcuaucaguaccugauuauccagaacacaaccugggaggaucacugccaguuuucucgccccuccccuaucggguaucucggacugcuuagccaaagaacacgggacauuuacaucucccgcagacugcucggcaccuucaccuggacacugucugauagcgaaggcaaagacacgcccgggggauauugucugacccgguggaugcucauugaggccgagcugaagugcuuuggcaauacagcugucgccaaauguaacgaaaagcaugaugaggaguucugcgacaugcuucgccuguuugauuucaauaaacaggcuauccagagacucaagaccccugcccagauguccauucaacugaucaacaaggcggugaaugcccuuaucaacgaccagcugauuaugaaaaaucaccuccgggauaucauggggauucccuacugcaacuauagcaaguacuguuaccugaaucacacaaccacgggaaaaacaucucugccuaagugcugucucguguccaacggcagcuaucugaaugaaacccauuucucugacgacaucgaacagcaagcugauaacaugauuaccgagaugcuucagaaagaguacauggaacgccaggggaagacaccgcugggacucgucgaccuguuuguuuucagcaccuccuuuuaucugaucucuaucuuccuucaccucgugaaaauucccacacauagacacaucgugggcaagagcugcccuaagccccaucggcugaaucacaugggcauuuguuccugcgggcuguacaaacagccuggaguccccgugcgcuggaagagaugaggacuagucccuguucccagagcccacuuuuuuuucuuuuuuugaaauaaaauagccugucuuucagaucuaaaaaaaaaaaaaaaaaaaaaaaaaaaaaaaaaaaaaaaaaaaaaaaaaaaaaaaaaaaaaaaaaaaaaaaaaaaaaaaaaaaaaaaaaaaaaaaaaaaa

SEQ ID NO: 32350 - RNA, 1743 nt, Artificial Sequence
  mRNA product Design a-2 (A100) comprising derived and/or modified sequence from LASV(G502-SLE-2009;Clade IV)__AIT17126__GPCmut7 (opt5)
aggagaguccgcucagccagguugcagaagcggcuuagcguguguccuaaucuucucucugcguguagguaggccugugccgcaaacaagcuuaccaugggccagaucgugaccuucuuucaagaggucccccacguuauugaagaggugaugaacaucgugcugauugcccucagcauccuggcuguccuuaaggggcuguacaauuucgccacaugcggacucgugggccugcuuacguuucugcuccugugugggagauccugcaccacaggacuguauaaaggcguuuacgaacuccagacccuggagcuuaacauggaaacacugaauaugaccaugccucucucuuguacaaagaacaauagccaucacuauauuaugguggggaacgagaccggacuggagcuuacgcugaccaauacauccaucaucaaccauaaauucugcaaucucucugacgcgcacaagaaaaaccuguacgaucaugcucugaugagcauuaucuccaccuuucaccucucuauuccgaauuucaaccaguaugaagccaugagcugugacuuuaauggcggcaagaucuccguccaguacaaccugagccacucuuaugccggggaugcugccgaccauugcggaacaguggcuaauggcguucuucaaaccuucaugcggauggccuggggaggguccuacauugcgcuggauagcggccgcgggagaugggacuguaucaugacgucuuaccaguaucucauuauccagaacacaaccugggaggaucacugccaguuuucccggcccagcccuaucggauaccugggccuucugucucaacgcacaagagacauuuauaucucccggcgccuccugggcaccuucaccuggacacugagcgauuccgaagggaaggacacgcccggaggcuacugucucaccagauggaugcugauugaggccgagcuuaaaugcuuugggaacacagcuguggccaaguguaaugaaaaacaugaugaggaguucugcgacaugcugcggcucuuugauuucaacaagcaggcuauccagcgccugaaagccccugcgcagaugucuauucaacuuaucaauaaggccgucaacgcucugaucaaugaccagcucgugaugaagaaccaccugagagacauuaugggaauccccuauugcaauuacagccgguauuguuaccugaaccacaccacaaccggccgcacgucccucccuaaaugcugucuggugagcaaugggucuuaccuuaacgaaacacauuucuccgaugacauugaacagcaagccgauaauaugaucaccgagaugcugcagaaggaguauauggaaagacagggaaaaaccccgcucggccuggucgaccuguuuguuuucagcacaucuuuuuaccuuauuagcaucuuccuccaccuggugaagauccccacccaucggcacauugugggcaaauccugcccuaagccccaucgccugaaccacauggggaucuguucuugcggacucuauaaacagccuggcguccccgugaaguggaagagaugaggacuagucccuguucccagagcccacuuuuuuuucuuuuuuugaaauaaaauagccugucuuucagaucuaaaaaaaaaaaaaaaaaaaaaaaaaaaaaaaaaaaaaaaaaaaaaaaaaaaaaaaaaaaaaaaaaaaaaaaaaaaaaaaaaaaaaaaaaaaaaaaaaaaa

SEQ ID NO: 32351 - RNA, 1743 nt, Artificial Sequence
  mRNA product Design a-2 (A100) comprising derived and/or modified sequence from LASV(G733-SLE-2010;Clade IV)__AIT17154__GPCmut7 (opt5)
aggagaguccgcucagccagguugcagaagcggcuuagcguguguccuaaucuucucucugcguguagguaggccugugccgcaaacaagcuuaccaugggccagaucgugaccuucuuucaagaggucccccacguuauugaagaggugaugaacaucgugcugauugcccucagcauccuggcuguccuuaaggggcuguacaauuucgccacaugcggaauugugggccucguuuccuuucugcuucugugugggagaucuugcacgaccagccucuauaaaggaguguacgaacugcagacacuggagcucaacauggaaacccugaauaugacaaugccucuuuccuguaccaagaacaauucucaucacuauaucauggucggcaacgagacagggcuggagcucacccugacgaauaccagcaucauuaaccauaaauucugcaaucuuuccgacgcgcacaagaaaaaccuguacgaucaugcucucaugucuaucauuagcacauuucaccuguccaucccgaauuucaaccaguaugaagccaugagcugugacuuuaauggaggcaagauuucugugcaguacaaccugucccacagcuaugccggcgaugcugccaaucauugcgggaccaucgcuaacggaguucuccaaacauucaugcggauggccuggggcgggucuuacauugcgcuggacuccggacgcgauagaugggacuguaucaugaccagcuaccaguaucuuaucauucagaacacgacaugggaggaucacugccaguuuucucggcccuccccuaucggcuaccuggggcuccugagccaacgcaccagagacauuuauaucucccggcgccuucugggaacauucaccuggacccucucugauagcgaaggcaaggacacacccggcggguacugucugacgagauggaugcugauugaggccgagcucaaaugcuuuggaaauaccgcuguggccaaguguaacgaaaaacaugaugaggaguucugcgacaugcugcggcuuuuugauuucaauaagcaggcuauccagcgccugaaagccccugcgcagauguccauccaacucauuaacaaggccgucaaugcucugaucaacgaccagcuuauuaugaagaaucaccugagagacaucaugggcauucccuauugcaacuacagcaaauauuguuaccucaaucacacaaccacagggaagaccucucugccuaaaugcugucugguguccaacggaagcuaccucaaugaaacgcauuucucugaugacaucgaacagcaagccgauaacaugaucacagagaugcugcagaaggaguauauggaacggcagggcaaaaccccgcuugggcugguggaccucuuugucuucagcaccuccuuuuaccugauuucuaucuuccugcaccuuguuaagauucccacacaucgccacguggugggaaaaagcugcccuaagccccauagacucaaucacaugggcaucuguuccugcggccuguaugggcagccuggaguccccgugaaguggaaacggugaggacuagucccuguucccagagcccacuuuuuuuucuuuuuuugaaauaaaauagccugucuuucagaucuaaaaaaaaaaaaaaaaaaaaaaaaaaaaaaaaaaaaaaaaaaaaaaaaaaaaaaaaaaaaaaaaaaaaaaaaaaaaaaaaaaaaaaaaaaaaaaaaaaaa

SEQ ID NO: 32352 - RNA, 1743 nt, Artificial Sequence
  mRNA product Design a-2 (A100) comprising derived and/or modified sequence from MOPV/LASV reassortant(IGS-1;Clade IV)__AFY05576__GPCmut7 (opt5)
aggagaguccgcucagccagguugcagaagcggcuuagcguguguccuaaucuucucucugcguguagguaggccugugccgcaaacaagcuuaccaugggccagaucgugaccuucuuucaagaggucccccacguuauugaagaggugaugaacaucgugcugauugcccucagcguccuggcugugcuuaaggggcuguacaauuucgccacaugcggacucguuggccuggugacguuucuucugcucugugggagauccugcaccacaucucuguauaaaggagucuacgaacugcagacccucgagcugaacauggaaacacuuaauaugaccaugccucugagcuguacaaagaacaauucccaucacuauaucauggugggcaacgagaccgggcucgagcugacgcuuaccaauacaucuauuaucaaccauaaauucugcaaucugagcgacgcgcacaagaaaaaccucuacgaucaugcucugauguccaucauuucuaccuuucaccugagcaucccgaauuucaaccaguaugaagccauguccugugacuuuaauggaggcaagauuagcguucaguacaaccucucucacuccuaugccggcgaugcugccaaucauugcgggacaguggcuaacggaguccugcaaaccuucaugcggauggccuggggcgggagcuacaucgcgcuugacucuggacgcggcaacugggauuguauuaugacguccuaccaguaucugaucauucagaauacaaccugggaggaccacugccaguuuagcagacccucuccuaucggguaccucggacugcuuucccaacggacacgcgauaucuauauuagcagacggcugcucggcaccuucaccuggacacuguccgacucugaaggcgaggauacgcccgggggauacugucugacccgcuggaugcucaucgaggccgaacugaagugcuuuggcaacacagcuguggccaaauguaaugagaagcaugacgaagaguucugcgauaugcuuagacuguuugacuucaacaaacaggcuauucagcggcucaaggccccugcgcagaugagcauccaacugauuaauaaagccgugaacgcucuuaucaaugaucagcugaucaugaagaaccaccuccgcgacauuauggggauccccuauugcaauuacuccaaguauuguuaccugaaccacaccacaaccggaagaacgagccugccuaaaugcugucucgucucuaauggcuccuaccugaacgaaacacauuucagcgacgauauugagcagcaagccgacaauaugaucaccgagaugcuucagaaggaauauauggagcggcaggggaaaaccccgcugggacucguugaucuguuuguguucucuaccagcuuuuaccugauuuccaucuuccuucaccucgugaagauccccacacaucgccacauugucggcaaaucuugcccuaagccccauagacugaaccacaugggcaucuguagcugcgggcuguauaaacagccuggagugcccguuaaguggaagcggugaggacuagucccuguucccagagcccacuuuuuuuucuuuuuuugaaauaaaauagccugucuuucagaucuaaaaaaaaaaaaaaaaaaaaaaaaaaaaaaaaaaaaaaaaaaaaaaaaaaaaaaaaaaaaaaaaaaaaaaaaaaaaaaaaaaaaaaaaaaaaaaaaaaaa

SEQ ID NO: 32353 - RNA, 1743 nt, Artificial Sequence
  mRNA product Design a-2 (A100) comprising derived and/or modified sequence from LASV(LM765-SLE-2012;Clade IV)__AIT17814__GPCmut7 (opt5)
aggagaguccgcucagccagguugcagaagcggcuuagcguguguccuaaucuucucucugcguguagguaggccugugccgcaaacaagcuuaccaugggccagaucgugaccuucuuucaagaggucccccacguuauugaagaggugaugaacaucgugcugauugcccucagcauccuggcuguccuuaaggggcuguacaauuucgccacaugcggacucgugggccugguuacguuucuucugcucugugggagauccugcaccacaucucuguauaaaggaguguacgaacugcagacccucgagcugaacauggaaacacuuaauaugaccaugccucugagcuguacaaagaacaauucccaucacuauauuauggucggcaacgagaccgggcucgagcugacgcuuaccaauacaucuaucaucgaccauaaauucugcaaccugagcgaugcgcaccggaagaaucucuacgaccaugcucugauguccauuaucucuaccuuucaccugagcauuccgaacuucaaucaguaugaagccauguccugugauuuuaacggaggcaaaaucagcgugcaguacaaucucucucacuccuaugccaaggacgcugccgaucauugcggcacaguugcuaacggggugcugcaaaccuucaugcgcauggccuggggaggcagcuacauugcgcuugacucugggagaggacggugggauuguaucaugacguccuaccaguaucugauuauccagaauacaaccugggaggaccacugccaguuuagccgccccucuccuaucggcuaccucgggcugcuuucccaaagaacacgggauauuuauaucagccgcagacugcucggaaccuucaccuggacacuguccgacucugaaggcaaggauacgcccggcggguacugucugacccgguggaugcucauugaggccgagcugaaaugcuuuggaaacacagcugucgccaaguguaacgaaaaacaugacgaggaguucugcgauaugcuucgccuguuugacuucaauaagcaggcuauccagagacucaaagccccugcgcagaugagcauucaacugaucaacaaggccgugaaugcucuuaucaacgaccagcugauuaugaagaaucaccuccgggauaucaugggcauucccuauugcaacuacuccaaauauuguuaccugaaucacaccacaaccgggaagacgagccugccuaaaugcugucucgugucuaacggauccuaccugaaugaaacacauuucagcgacgauaucgaacagcaagccgacaacaugauuaccgagaugcuucagaaggaguauauggaacgccagggcaaaaccccgcuggggcucgucgaucuguuuguuuucucuaccagcuuuuaccugaucuccaucuuccuucaccucgugaagauucccacacauagacacaucgugggaaaaccuugccccaagccucaucggcugaaucacaugggcauuuguucuugcggccuguauaagcagcccggggucccggugaaauggaagcgcugaggacuagucccuguucccagagcccacuuuuuuuucuuuuuuugaaauaaaauagccugucuuucagaucuaaaaaaaaaaaaaaaaaaaaaaaaaaaaaaaaaaaaaaaaaaaaaaaaaaaaaaaaaaaaaaaaaaaaaaaaaaaaaaaaaaaaaaaaaaaaaaaaaaaa

SEQ ID NO: 32354 - RNA, 1743 nt, Artificial Sequence
  mRNA product Design a-2 (A100) comprising derived and/or modified sequence from LASV(LM776-SLE-2012;Clade IV)__AIT17824__GPCmut7 (opt5)
aggagaguccgcucagccagguugcagaagcggcuuagcguguguccuaaucuucucucugcguguagguaggccugugccgcaaacaagcuuaccaugggccagaucgugaccuucuuucaagaggucccccacguuauugaagaggugaugaacaucgugcugauugcccucagcauccuggcuguccuuaaggggcuguacaauuucgccacaugcggacucgugggccugguuacguuucuucugcucugugggagauccugcaccacaucuguguauaaaggagucuacgaacugcagacccuggagcucaacauggaaacacugaauaugaccaugccucuuagcuguacaaagaacaauucccaucacuauauuauggugggcaacgagaccgggcuggagcucacgcugaccaauacaucuaucaucaaccauaaauucugcaaucuuagcgacgcgcacaagaaaaaccuguacgaucaugcucucauguccauuaucucuaccuuucaccugagcauuccgaauuucaaccaguaugaagccauguccugugacuuuaauggaggcaagaucagcguucaguacaaccugucucacuccuaugccggcgaugcugccaaucauugcgggacaguggcuaacggaguccuccaaaccuucaugcggauggccuggggcgggagcuacauugcgcuggacucuggacacggcaagugggauuguaucaugacguccuaccaguaucuuauuauccagaacacaaccugggaggaccauugccaguuuagccgccccucuccuaucggguaccugggacuccugucccaaagaacacgggauauuuauaucagccgcagacuucugggcaccuucaccuggacacucuccgacucugaaggcaaagauacgcccgggggauacugucugacccgguggaugcugauugaggccgagcucaagugcuuuggcaauacagcuguggccaaauguaacgaaaagcacgacgaggaguucugcgauaugcugcgccuuuuugacuucaauaaacaggcuauccagagacugaaggccccugcgcagaugagcauucaacucaucaacaaggccgugaaugcucugaucaacgaucagcuuauuaugaaaaaucaucugcgggacaucauggggauucccuauugcaacuacuccaaguauuguuaccucaaucacaccacaaccggaaaaacgagccugccuaagugcugucuggucucuaacggcuccuaccucaaugaaacacacuucagcgacgauaucgaacagcaagccgacaacaugauuaccgagaugcugcagaaagaguauauggaacgccaggggaagaccccgcuuggacugguugaucucuuuguguucucuaccagcuuuuaccugaucuccaucuuccugcaucuugugaaaauucccacacacagacauaucgucggcaagucuugcccuaagccccaccggcucaaucacaugggcauuuguagcugcgggcuguauaaacagccuggagugcccguucgcuggaagagaugaggacuagucccuguucccagagcccacuuuuuuuucuuuuuuugaaauaaaauagccugucuuucagaucuaaaaaaaaaaaaaaaaaaaaaaaaaaaaaaaaaaaaaaaaaaaaaaaaaaaaaaaaaaaaaaaaaaaaaaaaaaaaaaaaaaaaaaaaaaaaaaaaaaaa

SEQ ID NO: 32355 - RNA, 1743 nt, Artificial Sequence
  mRNA product Design a-2 (A100) comprising derived and/or modified sequence from LASV(Mad39;Clade IV)__ANH09722__GPCmut7 (opt5)
aggagaguccgcucagccagguugcagaagcggcuuagcguguguccuaaucuucucucugcguguagguaggccugugccgcaaacaagcuuaccaugggccagaucgugaccuucuuucaagaggucccccacguuauugaagaggugaugaacaucgugcugauugcccucagcauccuggcuguccuuaaggggcuguacaauguggccacaugcggacucauuggccugguuacguuccuucugcucugugggagauccugcaccacaacccuguauaaaggaguguacgaacugcaggcgcucgagcugaacauggaaacacuuaauaugaccaugccucugucuuguacaaagaacaauagccaucacuauauccgggucggcaacgagaccgggcucgagcugacgcuuaccaauacaucccugaucaaccauaaauuuugcaaucucucugacgcucacaagaaaaaccuguacgaucaugcccugaugagcauuaucuccaccuuccaccucucuauuccgaauuuuaaccaguaugaagccaugagcugugacuucaaugauggaaagaucuccgugcaguacaaccugagccacacauaugcuggcgacaccgccaaucauugcggcacgguugcuaacggggugcuucaaacauuuaugcgcauggccuggggaggcucuuacauugcgcuggauuccgggagaggaggcugggacuguaucaugaccagcuaccaguaucucauuauccagaacacaaccugggaggaucacugccaguucucucggcccuccccuaucggguaccugggacuucugagccaacgcaccagagacauuuauaucucucggcgccuccugggcacauuuacguggacccuguccgauagcgaaggcaaggacacacccgggggauacugucucaccagauggaugcugauugaggccgagcuuaaaugcuucggcaauacagcugucgccaaguguaacgaaaaacaugaugaggaauuuugcgacaugcugcgccucuucgauuuuaauaagcaggcuauccagcggcugaaagccccugcgcagauguccauucaacuuaucaacaaggccgugaaugcucugaucaacgaccagcucauuaugaagaaucaccugagagacaucauggggauucccuauugcaacuacucuaaauauuguuaccugaaucacaccgugacgggaaagacaagccucccuaaaugcugucuggucuccaacggcagcuaccuuaaugagacccauuucucugaugacaucgaacagcaagccgauaacaugauuaccgagaugcugcagaaggaguauauggaacggcaggggaaaacaccgcucggacugguugaccuguucguguuuuccaccagcuucuaccuuaucucuaucuuucuccaccuggugaagauucccacacaucgccacgucgugggcaaaccuugccccaagccucauagacugaaucacaugggcaucuguagcugcggguucuauaagcagcccggaguuccggugcgguggaaacgcugaggacuagucccuguucccagagcccacuuuuuuuucuuuuuuugaaauaaaauagccugucuuucagaucuaaaaaaaaaaaaaaaaaaaaaaaaaaaaaaaaaaaaaaaaaaaaaaaaaaaaaaaaaaaaaaaaaaaaaaaaaaaaaaaaaaaaaaaaaaaaaaaaaaaa

SEQ ID NO: 32356 - RNA, 1743 nt, Artificial Sequence
  mRNA product Design a-2 (A100) comprising derived and/or modified sequence from LASV(Z0947-SLE-2011;Clade IV)__AIT17840__GPCmut7 (opt5)
aggagaguccgcucagccagguugcagaagcggcuuagcguguguccuaaucuucucucugcguguagguaggccugugccgcaaacaagcuuaccaugggccagaucgugaccuucuuucaagaggucccccacguuauugaagaggugaugaacaucgugcugauugcccucagcauccuggcuguccuuaaggggcuguacaauuucgccacaugcggacucgugggccugguuacguuucuucugcucugugggagauccugcaccauuucucuguauaaaggaguguacgaacugcagacacucgagcugaacauggaaacccuuaauaugacaaugccucugagcuguaccaagaacaauucccaucacuauaucauggucggcaacgagacagggcucgagcugacccuuacgaauaccucuaucauuaaccauaaauucugcaaucugagcgacgcgcacaagaaaaaccucuacgaucaugcucugauguccaucauuucuacauuucaccugagcaucccgaauuucaaccaguaugaagccauguccugugacuuuaauggaggcaagauuagcgugcaguacaaccucucucacuccuaugccggcgaugcugccaaucauugcgggaccguugcuaacggagugcugcaaacauucaugcggauggccuggggcgggagcuacaucgcgcuugacucuggacgcgauagaugggacuguauuaugaccuccuaccaguaucugaucauccagaacacgacaugggaggaucacugccaguuuagccggcccucuccuauuggcuaccucgggcugcuuucccaacgcaccagagacaucuauauuagccggcgccugcucggaacauucaccuggacccuguccgauucugaaggcaaggacacacccggcggguacugucugacgagauggaugcucaucgaggccgagcugaaaugcuuuggaaauaccgcugucgccaaguguaacgaaaaacaugaugaggaguucugcgacaugcuucggcuguuugauuucaauaagcaggcuauucagcgccucaaagccccugcgcagaugagcauccaacugaucaacaaggccgugaaugcucuuauuaacgaccagcugaucaugaagaaucaccucagagacauuaugggcauccccuauugcaacuacuccaaauauuguuaccugaaucacacaaccacagggaagaccagccugccuaaaugcugucucgugucuaacggauccuaccugaaugaaacgcauuucagcgaugacauugaacagcaagccgauaacaugaucacagagaugcuucagaaggaguauauggaacggcagggcaaaaccccgcuggggcucgucgaccuguuuguuuucucuaccagcuuuuaccugaucuccauuuuccuucaccucgugaagauccccacacaucgccacauugugggaaaaccuugccccaagccucauagacugaaucacaugggcaucuguucuugcggccuguauaagcagcccggggucccggugaaauggaagcggugaggacuagucccuguucccagagcccacuuuuuuuucuuuuuuugaaauaaaauagccugucuuucagaucuaaaaaaaaaaaaaaaaaaaaaaaaaaaaaaaaaaaaaaaaaaaaaaaaaaaaaaaaaaaaaaaaaaaaaaaaaaaaaaaaaaaaaaaaaaaaaaaaaaaa

SEQ ID NO: 32357 - RNA, 1781 nt, Artificial Sequence
  mRNA product Design b-4 (hSL-A64-N5) comprising derived and/or modified sequence from LASV(Josiah;Clade IV)__NP_694870__GPCmut7 (opt1)
aggagagucccgcagucggcguccagcggcucugcuuguucgugugugugucguugcaggccuuauucaagcuuaccaugggccagaucgugaccuucuuccaggaggucccccacgugaucgaggaggugaugaacaucguccugaucgcccucagcgugcuggccgugcugaaggggcucuacaacuucgcgaccugcggccuggucgggcuggugacguuccuccugcugugcggccgcuccugcaccaccagccucuacaaggggguguacgagcugcagacccuggagcucaacauggagacgcugaacaugaccaugccgcuguccugcaccaagaacaacagccaccacuacaucauggucggcaacgagaccggccucgagcugacgcugaccaacaccuccaucaucaaccacaaguucugcaaccucagcgacgcccacaagaagaaccuguacgaccacgcccugauguccaucaucagcaccuuccaccucuccauccccaacuucaaccaguacgaggccaugagcugcgacuucaacgggggcaagaucuccgugcaguacaaccugagccacuccuacgccggggacgcggccaaccacugcggcacgguggccaacgggguccugcagaccuucaugcggauggccuggggcggcagcuacaucgcgcucgacuccgggcgcggcaacugggacugcaucaugaccagcuaccaguaccugaucauccagaacaccacgugggaggaccacugccaguucucccggcccagccccaucggguaccugggccuccugucccagcgcacccgggacaucuacaucagccgccggcugcucggcaccuucaccuggacgcugagcgacuccgaggggaaggacaccccgggcggguacugccugacccgcuggaugcucaucgaggccgagcugaagugcuucggcaacaccgccguggccaagugcaacgagaagcacgacgaggaguucugcgacaugcugcggcuguucgacuucaacaagcaggccauccagcgccugaaggcgcccgcccagaugagcauccagcugaucaacaaggccgugaacgcccucaucaacgaccagcugaucaugaagaaccaccuccgggacaucauggggauccccuacugcaacuacuccaaguacugcuaccucaaccacacgaccaccggccgcaccagccugcccaagugcugccuggucuccaacggcagcuaccucaacgagacgcacuucuccgacgacaucgagcagcaggccgacaacaugaucaccgagaugcugcagaaggaguacauggagcggcaggggaagacgccccugggccucguggaccuguucguguucagcaccuccuucuaccugaucagcaucuuccugcaccucgucaagaucccgacccaccgccacaucguggggaaguccugccccaagccccaccggcugaaccacaugggcaucugcagcugcgggcuguacaagcagcccggcgugccggucaaguggaagcgcugaggacuaguaauaaggaaacuguaugaaugucugugggcaggaagugaagagauccuucuguaaagguuuuuggaauuaugucugcugaauaauaaacuuuuuugaaauaauaaaucugguagaaaaaugagaucucaaaggcucuuuucagagccaccaaaaaaaaaaaaaaaaaaaaaaaaaaaaaaaaaaaaaaaaaaaaaaaaaaaaaaaaaaaaaaaaagaauu

SEQ ID NO: 32358 - RNA, 1778 nt, Artificial Sequence
  mRNA product Design b-4 (hSL-A64-N5) comprising derived and/or modified sequence from LASV(LP;Clade I)__AAF86701__GPCmut7 (opt1)
aggagagucccgcagucggcguccagcggcucugcuuguucgugugugugucguugcaggccuuauucaagcuuaccaugggccagaucaucaccuucuuccaggaggugccccacgucaucgaggaggugaugaacaucgugcugaucgcccucagccugcuggccauccucaaggggcuguacaacaucgcgaccugcggcaucaucgggcuggucgccuuccucuuccugugcggcaaguccugcagccugacgcucaagggcggguacgagcugcagacccuggagcucaacauggagacccugaacaugaccaugccgcuguccugcacgaagaacagcucccaccacuacauccgcgugggcaacgagaccgggcucgagcugacccugaccaacacgagcaucaucaaccacaaguucugcaaccucuccgacgcccacaagaagaaccuguacgaccacgcccugaugagcaucaucuccaccuuccaccucagcauccccaacuucaaccaguacgaggccauguccugcgacuucaacggcgggaagaucagcgugcaguacaaccugucccacagcuacgcgggcgacgccgccgagcacugcgggaccgucgccaacggcgugcugcagaccuucaugcggauggcguggggcgggcgcuacaucgcccucgacuccggcaaggggaacugggacugcaucaugacgagcuaccaguaccugaucauccagaacaccaccugggaggaccacugccaguucucccggcccagccccaucggcuaccugggccuccugucccagcgcacccgggacaucuacaucagccgccggcugcucgggacguucaccuggacccugagcgacuccgagggcaacgagacccccgggggcuacugccugacgcgcuggaugcucaucgaggccgagcugaagugcuucgggaacaccgccguggccaagugcaacgagaagcacgacgaggaguucugcgacaugcugcggcuguucgacuucaacaagcaggcgauccgccggcugaaggcccccgcccagaugagcauccagcugaucaacaaggccgucaacgcccucaucaacgaccagcugaucaugaagaaccaccuccgcgacaucaugggcauccccuacugcaacuacuccaaguacugcuaccucaaccacaccagcuccggccggaccagccugcccaagugcugccugaucuccaacgggagcuaccucaacgagacgcaguucuccgacgacaucgagcagcaggcggacaacaugaucaccgagaugcugcagaaggaguacaucgagcgccagggcaagaccccgcuggggcucguggacaucuucaucuucagcaccuccuucuaccugaucagcaucuuccugcaccugaucaagaucccgacgcaccggcacaucgugggcaagcccugccccaagccccaccgccucaaccacaugggggucugcuccugcggccuguacaagcacccgggcgugcccaccaaguggaagcggugaggacuaguaauaaggaaacuguaugaaugucugugggcaggaagugaagagauccuucuguaaagguuuuuggaauuaugucugcugaauaauaaacuuuuuugaaauaauaaaucugguagaaaaaugagaucucaaaggcucuuuucagagccaccaaaaaaaaaaaaaaaaaaaaaaaaaaaaaaaaaaaaaaaaaaaaaaaaaaaaaaaaaaaaaaaaagaauu

SEQ ID NO: 32359 - RNA, 1778 nt, Artificial Sequence
  mRNA product Design b-4 (hSL-A64-N5) comprising derived and/or modified sequence from LASV(803213;Clade II)__AAF86703__GPCmut7 (opt1)
aggagagucccgcagucggcguccagcggcucugcuuguucgugugugugucguugcaggccuuauucaagcuuaccaugggccagaucaucaccuucuuccaggaggugccccacgucaucgaggaggugaugaacaucgugcugaucgcccucagccugcuggccauccucaaggggaucuacaacgucgcgaccugcggccuguucgggcugaucuccuuccuccugcugugcggccgcagcugcuccgugacguacaaggggguguacgagcuccagacccuggagcugaacauggccaaccucaacaugaccaugccgcugagcugcaccaagaacaacucccaccacuacaucauggucggcaacgagacgggccuggagcucacccugaccaacaccagcaucaucaaccacaaguucugcaaccuguccgacgcccacaagaagaaccucuacgaccacgcccugaugagcaucaucuccacguuccaccugagcauccccaacuucaaccaguacgaggccauguccugcgacuucaacgggggcaagaucagcgugcaguacaaccucucccacagcuucgcgguggacgccgccaaccacugcgggaccaucgccaacggcguccugcagaccuucaugcggauggcguggggcggguccuacaucgcccuggacagcggcaaggggaacugggacugcaucaugaccuccuaccaguaccucaucauccagaacacgaccugggaggaccacugccaguucagccgccccucccccaucggcuaccuggggcugcucagccagcggacccgcgacaucuacaucagccggcgccugcugggcaccuucacguggacccucuccgacagcgagggcaacgaggcccccgggggcuacugccugacccgguggaugcugaucgaggccgagcucaagugcuucgggaacaccgccguggcgaagugcaacgagaagcacgacgaggaguucugcgacaugcugcgccuguucgacuucaacaagcaggccaucaagcggcucaagacgcccgcccagauguccauccagcugaucaacaaggccgugaacgcccugaucaacgaccagcucaucaugaagaaccaccuccgcgacaucaugggcauccccuacugcaacuacagccgguacugcuaccugaaccacaccgucaccgggaagaccucccugccccgcugcugccuggugagcaacggcuccuaccugaacgagacgcacuucagcgacgacaucgagcagcaggcggacaacaugaucaccgagaugcuccagaaggaguacauggaccggcagggcaagaccccgcuggggcugguggaccucuucgucuucuccaccagcuucuaccugaucuccaucuuccugcaccuggugaagaucccgacgcaccgccacaucgugggcaagcccugccccaagccccaccggcucaaccacauggggaucugcagcugcggccuguacaagcacccggggguccccgugaaguggaagcgcugaggacuaguaauaaggaaacuguaugaaugucugugggcaggaagugaagagauccuucuguaaagguuuuuggaauuaugucugcugaauaauaaacuuuuuugaaauaauaaaucugguagaaaaaugagaucucaaaggcucuuuucagagccaccaaaaaaaaaaaaaaaaaaaaaaaaaaaaaaaaaaaaaaaaaaaaaaaaaaaaaaaaaaaaaaaaagaauu

SEQ ID NO: 32360 - RNA, 1778 nt, Artificial Sequence
  mRNA product Design b-4 (hSL-A64-N5) comprising derived and/or modified sequence from LASV(GA391;Clade III)__CAA36645__GPCmut7 (opt1)
aggagagucccgcagucggcguccagcggcucugcuuguucgugugugugucguugcaggccuuauucaagcuuaccaugggccagaucgugaccuucuuccaggaggucccccacgugaucgaggaggugaugaacaucguccugaucgcccucagcauccuggccauccugaaggggcucuacaacguggcgaccugcggccugaucgggcuggugacguuccuccugcuguccggccgcagcugcucccucaucuacaaggggaccuacgagcugcagacccuggagcucaacauggagacccugaacaugacgaugccgcugagcugcaccaagaacaacucccaccacuacauccgggucggcaacgagaccggccucgagcugacccugacgaacaccagcauccucaaccacaaguucugcaaccuguccgacgcccacaagcgcaaccuguacgaccacagccucauguccaucaucagcaccuuccaccuguccauccccaacuucaaccaguacgaggccaugagcugcgacuucaacgggggcaagaucaccgugcaguacaaccugucccacagcuucgccguggacgccgcggggcacugcggcacgcucgccaacgggguccugcagaccuucaugcggauggccuggggcggcuccuacaucgcccuggacagcgggcgcggcaacugggacugcaucaugaccuccuaccaguaccucaucauccagaacaccacgugggacgaccacugccaguucagccggcccucccccaucggguaccugggccugcucagccagcgcacccgggacaucuacaucagccgccggcugcugggcaccuucaccuggacgcucuccgacagcgaggggaacgagaccccgggcggguacugccugacccgcuggaugcugaucgaggcggagcucaagugcuucggcaacaccgccguggccaagugcaacgagaagcacgacgaggaguucugcgacaugcugcggcuguucgacuucaacaagcaggccauccgccggcucaagacgcccgcccagauguccauccagcugaucaacaaggcggugaacgcccugaucaacgaccagcucaucaugaagaaccaccuccgcgacaucauggggauccccuacugcaacuacagccgguacugcuaccugaaccacaccuccaccggcaagaccagccugccccgcugcugccugaucuccaacggcagcuaccugaacgagacgaaguucuccgacgacaucgagcagcaggccgacaacaugaucaccgagaugcuccagaaggaguacaucgaccggcaggggaagacgccccugggccuggucgaccuguucguguucagcaccuccuucuaccucaucagcaucuuccugcaccuggugaagaucccgacccaccgccacaucgucgggaagcccugccccaagccccaccggcucaaccacaugggcaucugcuccugcgggcuguacaagcagccgggcgugcccgugcgcuggaagcggugaggacuaguaauaaggaaacuguaugaaugucugugggcaggaagugaagagauccuucuguaaagguuuuuggaauuaugucugcugaauaauaaacuuuuuugaaauaauaaaucugguagaaaaaugagaucucaaaggcucuuuucagagccaccaaaaaaaaaaaaaaaaaaaaaaaaaaaaaaaaaaaaaaaaaaaaaaaaaaaaaaaaaaaaaaaaagaauu

SEQ ID NO: 32361 - RNA, 1781 nt, Artificial Sequence
  mRNA product Design b-4 (hSL-A64-N5) comprising derived and/or modified sequence from LASV(AV;Clade V)__CCA30314__GPCmut7 (opt1)
aggagagucccgcagucggcguccagcggcucugcuuguucgugugugugucguugcaggccuuauucaagcuuaccaugggccagaucgugaccuucuuccaggaggucccccacgugaucgaggaggugaugaacaucguccugaucgcccucagcauccuggccgugcugaaggggcucuacaacaucgcgaccugcggccugaucgggcugaucacguuccuccugcugugcggccgcuccugcagcuccaaccucuacaaggggguguacgagcugcagagccuggaccucaacauggagacccugaacaugaccaugccgcuguccugcaccaagaacaacagccaccacuacauccgggucggcaacgacacgggccucgagcugacccugaccaacaccuccauccucaaccacaaguucugcaaccugagcgacgcccacaagaaggaccuguacgaccacgcccucauguccaucaucagcacguuccaccuguccauccccaacuucaaccaguacgaggccaugagcugcgacuucaacgggggcaagaucuccgugcaguacaaccugagccacuccuacgccaucgacgcggccaaccacugcgggaccguggccaacggcauccuccagaccuucaugcgcauggccuggggcgggagcuacaucgcgcuggacuccggccgggggaacugggacugcaucaugaccagcuaccaguaccugaucauccagaacacgaccugggagaaccacugccaguucucccgccccagccccaucggcuaccucgggcugcugagccagcggacccgcgacaucuacaucucccggcgccuccugggcaccuucacguggacccugagcgacuccgagggcaacgccacccccgggggcuacugccucacccgguggaugcugaucgaggccgagcugaagugcuucgggaacacggccgucgccaagugcaacgagaagcacgacgaggaguucugcgacaugcuccgccuguucgacuucaacaagcaggcgaucagccggcugaagucccccgcccagaugagcauccagcucaucaacaaggccgugaacgcccugaucaacgaccagcugaucaugaagaaccaccuccgcgacaucaugggcauccccuacugcaacuacuccaaguacugcuaccugaaccacaccaucaccgggaagaccagccugcccaagugcugccucguguccaacggcagcuaccugaacgagacgcacuucuccgacgacaucgagcagcaggccgacaacaugaucaccgagaugcugcagaaggaguacauggagcggcagggcaagaccccgcucgggcuggucgaccuguucguguucagcaccuccuucuaccugaucagcaucuuccuccgccuggugaagaucccgacgcaccggcacaucgucggcaagcccugccccaagccccaccgccugaaccacauggggaucugcuccugcggccucuacaagcagccgggggugcccgugcgguggaagcgcugaggacuaguaauaaggaaacuguaugaaugucugugggcaggaagugaagagauccuucuguaaagguuuuuggaauuaugucugcugaauaauaaacuuuuuugaaauaauaaaucugguagaaaaaugagaucucaaaggcucuuuucagagccaccaaaaaaaaaaaaaaaaaaaaaaaaaaaaaaaaaaaaaaaaaaaaaaaaaaaaaaaaaaaaaaaaagaauu

SEQ ID NO: 32362 - RNA, 1778 nt, Artificial Sequence
  mRNA product Design b-4 (hSL-A64-N5) comprising derived and/or modified sequence from LASV(Togo/2016/7082;Clade VI)__AMR44577__GPCmut7 (opt1)
aggagagucccgcagucggcguccagcggcucugcuuguucgugugugugucguugcaggccuuauucaagcuuaccaugggccagaucaucaccuucuuccaggaggugccccacgucaucgaggaggugaugaacaucgugcugaucgcccucagccugcuggccauccucaagggggucuacaacguggcgaccugcggcaucaucgggcuggugacguuccuguuccucugcggccgcuccugcagccugaucuacaagggguccuacgagcugcagacccucgagcugaacauggagacccugaacaugaccaugccgcucagcugcacgaagaacuccagccaccacuacauccgggucggcaacgagaccggccuggagcugacccucaccaacacguccaucaucaaccacaaguucugcaaccugagcgacgcccacaagcgcaaccuguacgaccacgcccucauguccauccugagcaccuuccaccuguccauccccaacuucaaccaguacgaggccaugagcugcgacuucaacgggggcaagaucuccgugcaguacaaccucagccacgccuacgcgguggacgccgccgagcacugcgggaccgucgccaacggcgugcugcagaccuucaugcggauggcguggggcggguccuacaucgcccuggacagcggccgcgggaacugggacugcaucaugacguccuaccaguaccucaucauccagaacaccaccugggaggaccacugccaguucagccggcccucccccaucggcuaccuggggcugcucagccagcgcacccgggacaucuacaucagccgccggcugcugggcacguucaccuggacccucuccgacagcgagggcaacgagacccccgggggcuacugccugacgcgcuggaugcugaucgaggccgagcucaagugcuucgggaacaccgccguggccaagugcaacgagaagcacgacgaggaguucugcgacaugcugcggcuguucgacuucaacaagcaggcgauccagcgccucaagucccccgcccagaugagcauccagcugaucaacaaggccgucaacgcccugaucaacgaccagcucaucaugaagaaccaccuccgggacaugaugggcauccccuacugcaacuacuccaaguacugcuaccugaaccacaccagcuccgggcgcaccagccugcccaagugcugccugguguccaacggcagcuaccugaacgagacgcacuucuccgacgacaucgagcagcaggccgacaacaugaucaccgagaugcuccagaaggaguacaucgaccggcagggcaagaccccgcuggggcugguggaccucuucgucuucagcaccuccuucuaccugaucagcaucuuccugcaccugaucaagaucccgacgcaccgccacaucgugggcaagcccugccccaagccccaccggcucaaccacauggggaucugcuccugcggccuguacaagcagccgggggugcccacccgcuggaagcggugaggacuaguaauaaggaaacuguaugaaugucugugggcaggaagugaagagauccuucuguaaagguuuuuggaauuaugucugcugaauaauaaacuuuuuugaaauaauaaaucugguagaaaaaugagaucucaaaggcucuuuucagagccaccaaaaaaaaaaaaaaaaaaaaaaaaaaaaaaaaaaaaaaaaaaaaaaaaaaaaaaaaaaaaaaaaagaauu

SEQ ID NO: 32363 - RNA, 1778 nt, Artificial Sequence
  mRNA product Design b-4 (hSL-A64-N5) comprising derived and/or modified sequence from LASV(KAK-428;Clade n.d. (VII))__ANH09740__GPCmut7 (opt1)
aggagagucccgcagucggcguccagcggcucugcuuguucgugugugugucguugcaggccuuauucaagcuuaccaugggccagaucgugaccuucuuccaggaggucccccacgugaucgaggaggugaugaacaucguccugaucgcccucagccugcuggccauccucaaggggcuguacaacuucgcgaccugcggcgugaucgggcugaucacguuccuccugcugugcggccgcuccugcagcgccaccuacaaggggcaguacgagcuccagacccuggagcugaacauggagucccucaacaugaccaugccgcugagcugcacgaagaacaacucccaccacuacauccgggccggcaacaacaccggccuggagcucacccugaccaacacgagcaucaucucccacaaguucugcaaccugagcgacgcccacaagaagaaccucuacgaccacacccugauguccaucaucaccaccuuccaccugagcauccccaacuucaaccaguacgaggccauguccugcgacuucaacgggggcaagaucagcauccaguacaaccucucccacagcuacgcgggggacgccgcccagcacugcggcacgguggccaacgggguccugcagaccuucaugcgcauggcguggggcggcuccuaccuggcccucgacagcgggcggcgcggcugggacugcaucaucuccagcuaccaguaccugaucauccagaacaccaccugggacgaccacugccaguucucccggcccagccccaucggguaccugggcuucgugagccagaagacgcgcgacaucuacaucucccggcgccuccugggcaccuucaccuggacccugagcgacuccgaggggcacgacaugccgggcggguacugccucacgcgguggaugcugaucgaggccgaccugaagugcuucggcaacaccgccguggccaagugcaacgagaagcacgacgaggaguucugcgacauguggcgccucuucgacuucaacaagcaggcgauccagcggcugaaggcccccgcccagaugaacauccagcugaucaacaaggccgucaacgcccucaucaacgaccagcugaugaugaagaaccaccuccgcgacaucauggggauccccuacugcaacuacagcaaguucugcuaccugaacaacaccaccacgggccggaccucccugccccgcugcugccugaucagcaacggcuccuaccucaacgagacccacuucagcgacgacaucgagcagcaggcggacaacaugaucaccgagaugcugcagaaggaguacauggaccggcaggggaagacgccccugggccucguggaccuguucguguucuccaccagcuucuaccugaucaccaucuuccuccaccuggucaagaucccgacccaccgccacaucguggggaagcccugccccaagccccaccggcugaaccacaugggcaucugcuccugcgggcuguacaagcagccgggcgugcccguccgcuggaagcggugaggacuaguaauaaggaaacuguaugaaugucugugggcaggaagugaagagauccuucuguaaagguuuuuggaauuaugucugcugaauaauaaacuuuuuugaaauaauaaaucugguagaaaaaugagaucucaaaggcucuuuucagagccaccaaaaaaaaaaaaaaaaaaaaaaaaaaaaaaaaaaaaaaaaaaaaaaaaaaaaaaaaaaaaaaaaagaauu

SEQ ID NO: 32364 - RNA, 1778 nt, Artificial Sequence; identical to SEQ ID NO: 32358
  mRNA product Design b-4 (hSL-A64-N5) comprising derived and/or modified sequence from LASV(Pinneo-NIG-1969;Clade I)__AIT17836__GPCmut7 (opt1)

SEQ ID NO: 32365 - RNA, 1778 nt, Artificial Sequence
  mRNA product Design b-4 (hSL-A64-N5) comprising derived and/or modified sequence from LASV(ISTH0009-NIG-2011;Clade II)__AIT17404__GPCmut7 (opt1)
aggagagucccgcagucggcguccagcggcucugcuuguucgugugugugucguugcaggccuuauucaagcuuaccaugggccagaucaucaccuucuuccaggaggugccccacgucaucgaggaggugaugaacaucgugcugaucgcccucagccugcuggccauccucaaggggaucuacaacgucgcgaccugcggccuguucgggcugguguccuuccuccugcugugcggccgcagcugcuccacgaccuacaaggggguguacgagcuccagacccuggagcuggacauggccagccucaacaugaccaugccgcuguccugcacgaagaacaacagccaccacuacaucauggucggcaacgagaccggccuggagcucacccugaccaacacguccaucaucaaccacaaguucugcaaccugagcgacgcccacaagaagaaccucuacgaccacgcccugauguccaucaucagcaccuuccaccuguccauccccaacuucaaccaguacgaggccaugagcugcgacuucaacgggggcaagaucuccgugcaguacaaccucagccacgcguacgccguggacgccgccaaccacugcgggaccaucgcgaacggcguccugcagaccuucaugcggauggccuggggcggguccuacaucgcccuggacagcggcaagggguccugggacugcaucaugacgagcuaccaguaccucaucauccagaacaccaccugggaggaccacugccaguucucccgccccagccccaucggcuaccuggggcugcucagccagcggacccgcgacaucuacaucucccggcgccugcugggcacguucaccuggacccucagcgacuccgagggcaacgagacccccgggggcuacugccugacgcgguggaugcugaucgaggccgagcucaagugcuucgggaacaccgccguggcgaagugcaacgagaagcacgacgaggaguucugcgacaugcugcgccuguucgacuucaacaagcaggccauccggcgccucaagacccccgcccagaugagcauccagcugaucaacaaggccgugaacgcccugaucaacgaccagcucaucaugaagaaccaccuccgggacaucaugggcaucccguacugcaacuacuccaaguacugcuaccugaaccacaccgucacggggaagaccagccugccccgcugcugccugguguccaacggcagcuaccugaacgagacccacuucuccgacgacaucgagcagcaggcggacaacaugaucaccgagcuccugcagaaggaguacauggaccggcagggcaagacgccccuggggcucguggaccuguucgucuucagcaccuccuucuaccugaucagcaucuuccugcaccucaucaagaucccgacccaccgccacaucaccggcaagcccugccccaagccccaccggcugaaccacauggggaucugcuccugcggccuguacaagcacccgggggugcccgugaaguggaagcgcugaggacuaguaauaaggaaacuguaugaaugucugugggcaggaagugaagagauccuucuguaaagguuuuuggaauuaugucugcugaauaauaaacuuuuuugaaauaauaaaucugguagaaaaaugagaucucaaaggcucuuuucagagccaccaaaaaaaaaaaaaaaaaaaaaaaaaaaaaaaaaaaaaaaaaaaaaaaaaaaaaaaaaaaaaaaaagaauu

SEQ ID NO: 32366 - RNA, 1778 nt, Artificial Sequence
  mRNA product Design b-4 (hSL-A64-N5) comprising derived and/or modified sequence from LASV(ISTH2010-NIG-2012;Clade II)__AIT17482__GPCmut7 (opt1)
aggagagucccgcagucggcguccagcggcucugcuuguucgugugugugucguugcaggccuuauucaagcuuaccaugggccagaucaucaccuucuuccaggaggugccccacgucaucgaggaggugaugaacaucgugcugaucgcccucagccugcuggccauccucaaggggaucuacaacgucgcgaccugcggccuguucgggcugguguccuuccuccugcugugcggccgcagcugcuccacgaccuacaaggggguguacgagcuccagacccuggagcuggacauggccagccucaacaugaccaugccgcuguccugcacgaagaacaacagccaccacuacaucauggucggcaacgagaccggccuggagcucacccugaccaacacguccaucaucaaccacaaguucugcaaccugagcgacgcccacaagaagaaccucuacgaccacgcccugauguccaucaucagcaccuuccaccuguccauccccaacuucaaccaguacgaggccaugagcugcgacuucaacgggggcaagaucuccgugcaguacaaccucagccacgcguacgccguggacgccgccaaccacugcgggaccaucgcgaacggcguccugcagaccuucaugcggauggccuggggcggguccuacaucgcccuggacagcggcaagggguccugggacugcaucaugacgagcuaccaguaccucaucauccagaacaucaccugggaggaccacugccaguucucccgccccagccccaucggcuaccuggggcugcucagccagcggacccgcgacaucuacaucucccggcgccugcugggcaccuucacguggacccucagcgacuccgagggcaacgagacccccgggggcuacugccugacccgguggaugcugaucgaggccgagcucaagugcuucgggaacacggccguggcgaagugcaacgagaagcacgacgaggaguucugcgacaugcugcgccuguucgacuucaacaagcaggccauccggcgccucaagacccccgcccagaugagcauccagcugaucaacaaggccgugaacgcccugaucaacgaccagcucaucaugaagaaccaccuccgggacaucaugggcauccccuacugcaacuacuccaaguacugcuaccugaaccacaccgucaccgggaagacgagccugccccgcugcugccugguguccaacggcagcuaccugaacgagacccacuucuccgacgacaucgagcagcaggcggacaacaugaucaccgagcuccugcagaaggaguacaucgaccggcagggcaagaccccgcuggggcucguggaccuguucgucuucagcacguccuucuaccugaucagcaucuuccugcaccucgugaagaucccgacccaccgccacguggucggcaagcccugccccaagccccaccggcugaaccacauggggaucugcuccugcggccuguacaagcacccgggggugcccgugaaguggaagcgcugaggacuaguaauaaggaaacuguaugaaugucugugggcaggaagugaagagauccuucuguaaagguuuuuggaauuaugucugcugaauaauaaacuuuuuugaaauaauaaaucugguagaaaaaugagaucucaaaggcucuuuucagagccaccaaaaaaaaaaaaaaaaaaaaaaaaaaaaaaaaaaaaaaaaaaaaaaaaaaaaaaaaaaaaaaaaagaauu

SEQ ID NO: 32367 - RNA, 1778 nt, Artificial Sequence
  mRNA product Design b-4 (hSL-A64-N5) comprising derived and/or modified sequence from LASV(Lassa virus/H.sapiens-wt/NGA/2015/ISTH_0543;Clade II)__AVO03639__GPCmut7 (opt1)
aggagagucccgcagucggcguccagcggcucugcuuguucgugugugugucguugcaggccuuauucaagcuuaccaugggccagaucaucaccuucuuccaggaggugccccacgucaucgaggaggugaugaacaucgugcugaucgcccucagccugcuggccauccucaaggggaucuacaacgucgcgaccugcggccuguucgggcugguguccuuccuccugcugugcggccgcagcugcuccacgaccuacaaggggguguacgagcuccagacccuggagcuggacauggccaaccucaacaugaccaugccgcugagcugcacgaagaacaacucccaccacuacaucauggucggcaacgagaccggccuggagcucacccugaccaacacgagcaucaucaaccacaaguucugcaaccuguccgacgcccacaagaagaaccucuacgaccacgcccugaugagcaucaucuccaccuuccaccugagcauccccaacuucaaccaguacgaggccauguccugcgacuucaacgggggcaagaucagcgugcaguacaaccucucccacaccuacgcgguggacgccgccaaccacugcgggaccaucgccaacggcguccugcagacguucaugcggauggcguggggcgggagcuacaucgcccuggacuccggcaaggggagcugggacugcaucaugaccuccuaccaguaccucgugauccagaacaccaccugggaggaccacugccaguucagccgccccucccccaucggcuaccuggggcugcucagccagcggacgcgcgacaucuacaucagccggcgccugcugggcaccuucaccuggacccucuccgacagcgagggcaacgagacgcccgggggcuacugccugacccgguggaugcugaucgaggccgagcucaagugcuucgggaacaccgccguggccaagugcaacgagaagcacgacgaggaguucugcgacaugcugcgccuguucgacuucaacaagcaggcgauccggcgccucaagacccccgcccagauguccauccagcugaucaacaaggccgucaacgcccugaucaacgaccagcucaucaugaagaaccaccuccgggacaucaugggcauccccuacugcaacuacagcaaguacugcuaccugaaccacacggugaccgggaagaccucccugccccgcugcugccuggugagcaacggcuccuaccugaacgagacccacuucagcgacgacaucgagcagcaggccgacaacaugaucacggagcuccugcagaaggaguacaucgaccggcagggcaagaccccgcuggggcucgucgaccuguucguguucuccaccagcuucuaccugaucuccaucuuccugcaccucgugaagaucccgacccaccgccacaucacgggcaagcccugccccaagccccaccggcugaaccacauggggaucugcagcugcggccuguacaagcacccggggguccccgugaaguggaagcgcugaggacuaguaauaaggaaacuguaugaaugucugugggcaggaagugaagagauccuucuguaaagguuuuuggaauuaugucugcugaauaauaaacuuuuuugaaauaauaaaucugguagaaaaaugagaucucaaaggcucuuuucagagccaccaaaaaaaaaaaaaaaaaaaaaaaaaaaaaaaaaaaaaaaaaaaaaaaaaaaaaaaaaaaaaaaaagaauu

SEQ ID NO: 32368 - RNA, 1778 nt, Artificial Sequence
  mRNA product Design b-4 (hSL-A64-N5) comprising derived and/or modified sequence from LASV(Lassa virus/H.sapiens-wt/NGA/2016/ISTH_0009;Clade II)__AVO03571__GPCmut7 (opt1)
aggagagucccgcagucggcguccagcggcucugcuuguucgugugugugucguugcaggccuuauucaagcuuaccaugggccagaucaucaccuucuuccaggaggugccccacgucaucgaggaggugaugaacaucgugcugaucgcccucagccugcuggccauccucaaggggaucuacaacgucgcgaccugcggccugcuggggcucguguccuuccugcugcucugcggccgcagcugcuccacgaccuacaaggggguguacgagcugcagacccuggagcucgacauggccagccugaacaugaccaugccgcuguccugcacgaagaacaacagccaccacuacaucauggucggcaacgagaccggccucgagcugacccugaccaacacguccaucaucaaccacaaguucugcaaccucagcgacgcccacaagaagaaccuguacgaccacgcccugauguccaucaucagcaccuuccaccucuccauccccaacuucaaccaguacgaggccaugagcugcgacuucaacgggggccggaucuccgugcaguacaaccugagccacuccuacgcgguggacgccgccaaccacugcgggaccaucgccaacggcguccugcagaccuucaugcgcauggcguggggcgggagcuacaucgcccucgacuccggcaaggggagcugggacugcaucaugacguccuaccaguaccugaucauccagaacaccaccugggaggaccacugccaguucagccggcccagccccaucggcuaccuggggcuccugucccagcgcacccgggacaucuacaucagccgccggcugcucggcacguucaccuggacccuguccgacagcgagggcaacgagacccccgggggcuacugccugacgcgcuggaugcucaucgaggccgagcugaagugcuucgggaacaccgccguggccaagugcaacgagaagcacgacgaggaguucugcgacaugcugcggcuguucgacuucaacaagcaggcgauccgccggcugaagacccccgcccagauguccauccagcugaucaacaaggccgugaacgcccucaucaacgaccagcugaucaugaagaaccaccuccgcgacaucaugggcaucccguacugcaacuacagcaaguacugcuaccucaaccacaccgucacggggaagaccucccugccccggugcugccuggugagcaacggcuccuaccucaacgagacccacuucagcgacgacaucgagcagcaggccgacaacaugaucaccgagcugcugcagaaggaguacaucgaccgccagggcaagacgccccucgggcugguggaccuguucgucuucuccaccagcuucuaccugaucuccaucuuccuccaccuggugaagaucccgacccaccggcacaucaccggcaagcccugccccaagccccaccgccugaaccacauggggaucugcagcugcggccucuacaaccacccgggggugcccgucaaguggaagcggugaggacuaguaauaaggaaacuguaugaaugucugugggcaggaagugaagagauccuucuguaaagguuuuuggaauuaugucugcugaauaauaaacuuuuuugaaauaauaaaucugguagaaaaaugagaucucaaaggcucuuuucagagccaccaaaaaaaaaaaaaaaaaaaaaaaaaaaaaaaaaaaaaaaaaaaaaaaaaaaaaaaaaaaaaaaaagaauu

SEQ ID NO: 32369 - RNA, 1778 nt, Artificial Sequence
  mRNA product Design b-4 (hSL-A64-N5) comprising derived and/or modified sequence from LASV(Lassa virus/H.sapiens-wt/NGA/2016/ISTH_0017;Clade II)__AVO03567__GPCmut7 (opt1)
aggagagucccgcagucggcguccagcggcucugcuuguucgugugugugucguugcaggccuuauucaagcuuaccaugggccagaucaucaccuucuuccaggaggugccccacgucaucgaggaggugaugaacaucgugcugaucgcccucagccugcuggccauccucaaggggaucuacaacgucgcgaccugcggccuguucgggcugguguccuuccuccugcugugcggccgcagcugcuccacgaccuacaaggggguguacgagcuccagacccuggagcuggacauggccagccucaacaugaccaugccgcuguccugcacgaagaacaacagccaccacuacaucauggucggcaacgagaccggccuggagcucacccugaccaacacguccaucaucaaccacaaguucugcaaccugagcgacgcccacaagaagaaccucuacgaccacgcccugauguccaucaucagcaccuuccaccuguccauccccaacuucaaccaguacgaggccaugagcugcgacuucaacgggggcaagaucuccgugcaguacaaccucagccacaccuacgcgaucgacgccgccaaccacugcgggaccaucgccaacggcgugcugcagacguucaugcggauggcguggggcggguccuacaucgcccuggacagcggcaagggguccugggacugcaucaugaccagcuaccaguaccucaucauccagaacaccaccugggaggaccacugccaguucucccgccccagccccaucggcuaccuggggcugcucagccagcggacgcgcgacaucuacaucucccggcgccugcugggcaccuucaccuggacccucagcgacuccgagggcaacgagacgcccgggggcuacugccugacccgguggaugcugaucgaggccgagcucaagugcuucgggaacaccgccgucgccaagugcaacgagaagcacgacgaggaguucugcgacaugcugcgccuguucgacuucaacaagcaggcgauccggcgccucaagacccccgcccagaugagcauccagcugaucaacaaggccgugaacgcccugaucaacgaccagcucaucaugaagaaccaccuccgggacaucaugggcauccccuacugcaacuacuccaaguacugcuaccugaaccacacggugaccgggaagaccagccugccccgcugcugccuggucuccaacggcagcuaccugaacgagacccacuucuccgacgacaucgagcagcaggccgacaacaugaucacggagcuccugcagaaggaguacauggaccggcagggcaagaccccgcuggggcucguggaccuguucguguucagcaccuccuucuaccugaucagcaucuuccugcaccucguccgcaucccgacccaccggcacgugaucggcaagcccugccccaagccccaccgccugaaccacauggggaucugcuccugcggccuguacaagcacccgggggugcccgucaaguggaagcggugaggacuaguaauaaggaaacuguaugaaugucugugggcaggaagugaagagauccuucuguaaagguuuuuggaauuaugucugcugaauaauaaacuuuuuugaaauaauaaaucugguagaaaaaugagaucucaaaggcucuuuucagagccaccaaaaaaaaaaaaaaaaaaaaaaaaaaaaaaaaaaaaaaaaaaaaaaaaaaaaaaaaaaaaaaaaagaauu

SEQ ID NO: 32370 - RNA, 1778 nt, Artificial Sequence
  mRNA product Design b-4 (hSL-A64-N5) comprising derived and/or modified sequence from LASV(Lassa virus/H.sapiens-wt/NGA/2018/ISTH_0959;Clade II)__AVV65099__GPCmut7 (opt1)
aggagagucccgcagucggcguccagcggcucugcuuguucgugugugugucguugcaggccuuauucaagcuuaccaugggccagaucaucaccuucuuccaggaggugccccacgucaucgaggaggugaugaacaucgugcugaucgcccucagccugcuggccauccucaaggggaucuacaacgucgugaccugcggccuguucgggcugguguccuuccuccugcugugcggccgcagcugcuccacgaccuacaagggggucuacgagcuccagacccuggagcuggacauggcgagccucaacaugaccaugccgcuguccugcacgaagaacaacagccaccacuacaucauggugggcaacgagaccggccuggagcucacccugaccaacacguccaucaucaaccacaaguucugcaaccugagcgacgcccacaagaagaaccucuacgaccacgcccugauguccaucaucagcaccuuccaccuguccauccccaacuucaaccaguacgaggccaugagcugcgacuucaacgggggcaagaucuccgugcaguacaaccucagccacgccuacgcgaucgacgccgccaaccacugcgggaccaucgccaacggcguccugcagaccuucaugcggauggcguggggcggguccuacaucgcccuggacagcggcaagggguccugggacugcaucaugacgagcuaccaguaccucaucauccagaacaccaccugggaggaccacugccaguucucccgccccagccccaucggcuaccuggggcugcucagccagcggacccgcgacaucuacaucucccggcgccugcugggcacguucaccuggacccucagcgacuccgagggcaacgagacccccgggggcuacugccugacgcgguggaugcugaucgaggccgagcucaagugcuucgggaacaccgccguggccaagugcaacgagaagcacgacgaggaguucugcgacaugcugcgccuguucgacuucaacaagcaggcgauccggcgccucaagacccccgcccagaugagcauccagcugaucaacaaggccgugaacgcccugaucaacgaccagcucaucaugaagaaccaccuccgggacaucaugggcaucccguacugcaacuacuccaaguacugcuaccugaaccacaccgucacggggaagaccagccugccccgcugcugccugguguccaacggcagcuaccugaacgagacccacuucuccgacgacaucgagcagcaggccgacaacaugaucaccgagcuccugcagaaggaguacaucgaccggcagggcaagacgccccuggggcucguggaccuguucgucuucagcaccuccuucuaccugaucagcaucuuccugcaccucgugaagaucccgacccaccgccacgugaucggcaagcccugccccaagccccaccggcugaaccacauggggaucugcuccugcggccuguacaagcacccggggguccccgugaaguggaagcgcugaggacuaguaauaaggaaacuguaugaaugucugugggcaggaagugaagagauccuucuguaaagguuuuuggaauuaugucugcugaauaauaaacuuuuuugaaauaauaaaucugguagaaaaaugagaucucaaaggcucuuuucagagccaccaaaaaaaaaaaaaaaaaaaaaaaaaaaaaaaaaaaaaaaaaaaaaaaaaaaaaaaaaaaaaaaaagaauu

SEQ ID NO: 32371 - RNA, 1778 nt, Artificial Sequence
  mRNA product Design b-4 (hSL-A64-N5) comprising derived and/or modified sequence from LASV(LASV003-NIG-2008;Clade II)__AIT17580__GPCmut7 (opt1)
aggagagucccgcagucggcguccagcggcucugcuuguucgugugugugucguugcaggccuuauucaagcuuaccaugggccagaucaucaccuucuuccaggaggugccccacgucaucgaggaggugaugaacaucgugcugaucgcccucagccugcuggccauccucaaggggaucuacaacgucgcgaccugcggccuguucgggcugguguccuuccuccugcugugcggccgcagcugcuccacgaccuacaaggggguguacgagcuccagacccuggagcuggacauggccagccucaacaugaccaugccgcuguccugcacgaagaacaacagccaccacuacaucauggucggcaacgagaccggccuggagcucacccugaccaacacguccaucaucaaccacaaguucugcaaccugagcgacgcccacaagaagaaccucuacgaccacgcccugauguccaucaucagcaccuuccaccuguccauccccaacuucaaccaguacgaggccaugagcugcgacuucaacgggggcaagaucuccgugcaguacaaccucagccacaccuacgcgguggacgccgccaaccacugcgggaccaucgccaacggcguccugcagacguucaugcggauggcguggggcggguccuacaucgcccuggacagcggcaagggguccugggacugcaucaugaccagcuaccaguaccucaucauccagaacaccaccugggaggaccacugccaguucucccgccccagccccaucggcuaccuggggcugcucagccagcggacgcgcgacaucuacaucucccggcgccugcugggcaccuucaccuggacccucagcgacuccgagagcaacgagacgccgggcggguacugccugacccgguggaugcugaucgaggccgagcucaagugcuucggcaacaccgccguggccaagugcaacgagaagcacgacgaggaguucugcgacaugcugcgccuguucgacuucaacaagcaggcgauccggcgccucaaggcccccgcccagauguccauccagcugaucaacaaggccgugaacgcccugaucaacgaccagcucaucaugaagaaccaccuccgggacaucauggggauccccuacugcaacuacagcaaguacugcuaccugaaccacaccgucacgggccgcaccucccugccccggugcugccuggugagcaacggguccuaccugaacgagacccacuucagcgacgacaucgagcagcaggcggacaacaugaucaccgagcuccugcagaaggaguacauggaccgccagggcaagacgccccugggccucguggaccuguucgucuucuccaccagcuucuaccugaucuccaucuuccugcaccucgugaagaucccgacccaccggcacgugaucgggaagcccugccccaagccccaccgccugaaccacaugggcaucugcagcugcgggcuguacaagcacccgggcguccccgugaaguggaagcggugaggacuaguaauaaggaaacuguaugaaugucugugggcaggaagugaagagauccuucuguaaagguuuuuggaauuaugucugcugaauaauaaacuuuuuugaaauaauaaaucugguagaaaaaugagaucucaaaggcucuuuucagagccaccaaaaaaaaaaaaaaaaaaaaaaaaaaaaaaaaaaaaaaaaaaaaaaaaaaaaaaaaaaaaaaaaagaauu

SEQ ID NO: 32372 - RNA, 1778 nt, Artificial Sequence
  mRNA product Design b-4 (hSL-A64-N5) comprising derived and/or modified sequence from LASV(LASV035-NIG-2009;Clade II)__AIT17588__GPCmut7 (opt1)
aggagagucccgcagucggcguccagcggcucugcuuguucgugugugugucguugcaggccuuauucaagcuuaccaugggccagaucaucaccuucuuccaggaggugccccacgucaucgaggaggugaugaacaucgugcugaucgcccucagccugcuggccauccucaaggggaucuacaacgucgcgaccugcggccuguucgggcugguguccuuccuccugcugugcggccgcagcugcuccacgaccuacaaggggguguacgagcuccagacccuggagcuggacauggccagccucaacaugaccaugccgcuguccugcacgaagaacaacagccaccacuacaucauggucggcaacgagaccggccuggagcucacccugaccaacacguccaucaucaaccacaaguucugcaaccugagcgacgcccacaagaagaaccucuacgaccacgcccugauguccaucaucagcaccuuccaccuguccauccccaacuucaaccaguacgaggccaugagcugcgacuucaacgggggcaagaucuccgugcaguacaaccucagccacgcguacgccguggacgccgccaaccacugcgggaccaucgcgaacggcguccugcagaccuucaugcggauggccuggggcggguccuacaucgcccuggacagcggcaagggguccugggacugcaucaugacgagcuaccaguaccucaucauccagaacaccaccugggaggaccacugccaguucucccgccccagccccaucggcuaccuggggcugcucagccagcggacccgcgacaucuacaucucccggcgccugcugggcacguucaccuggacccucagcgacuccgagggcaacgagacccccgggggcuacugccugacgcgguggaugcugaucgaggccgagcucaagugcuucgggaacaccgccguggcgaagugcaacgagaagcacgacgaggaguucugcgacaugcugcgccuguucgacuucaacaagcaggccauccggcgccucaaggcccccgcccagaugagcauccagcugaucaacaaggccgugaacgcgcugaucaacgaccagcucaucaugaagaaccaccuccgggacaucaugggcauccccuacugcaacuacuccaaguacugcuaccugaaccacaccgucaccgggaagacgagccugccccgcugcugccugguguccaacggcagcuaccugaacgagacccacuucuccgacgacaucgagcagcaggccgacaacaugaucaccgagcuccugcagaaggaguacaucgaccggcagggcaagaccccgcuggggcucguggaccuguucgucuucagcacguccuucuaccugaucagcaucuuccugcaccucgugaagaucccgacccaccgccacgugaucggcaagcccugccccaagccccaccggcugaaccacauggggaucugcuccugcggccuguacaagcacccggggguccccgugaaguggaagcgcugaggacuaguaauaaggaaacuguaugaaugucugugggcaggaagugaagagauccuucuguaaagguuuuuggaauuaugucugcugaauaauaaacuuuuuugaaauaauaaaucugguagaaaaaugagaucucaaaggcucuuuucagagccaccaaaaaaaaaaaaaaaaaaaaaaaaaaaaaaaaaaaaaaaaaaaaaaaaaaaaaaaaaaaaaaaaagaauu

SEQ ID NO: 32373 - RNA, 1778 nt, Artificial Sequence
  mRNA product Design b-4 (hSL-A64-N5) comprising derived and/or modified sequence from LASV(LASV1000-NIG-2009;Clade II)__AIT17782__GPCmut7 (opt1)
aggagagucccgcagucggcguccagcggcucugcuuguucgugugugugucguugcaggccuuauucaagcuuaccaugggccagaucaucaccuucuuccaggaggugccccacgucaucgaggaggugaugaacaucgugcugaucgcccucagccugcuggccauccucaaggggaucuacaacgucgcgaccugcggccuguucgggcugguguccuuccuccugcugugcggccgcagcugcuccacgaccuacaaggggguguacgagcuccagacccuggagcuggacauggccagccucaacaugaccaugccgcuguccugcacgaagaacaacagccaccacuacaucauggucggcaacgagaccggccuggagcucacccugaccaacacguccaucaucaaccacaaguucugcaaccugagcgacgcccacaagaagaaccucuacgaccacgcccugauguccaucaucagcaccuuccaccuguccauccccaacuucaaccaguacgaggccaugagcugcgacuucaacgggggcaagaucuccgugcaguacaaccucagccacaccuacgcgguggacgccgccaaccacugcgggaccaucgccaacggcguccugcagacguucaugcggauggcguggggcggguccuacaucgcccuggacagcggcaagggguccugggacugcaucaugaccagcuaccaguaccucaucauccagaacaccaccugggaggaccacugccaguucucccgccccagccccaucggcuaccuggggcugcucagccagcggacgcgcgacaucuacaucucccggcgccugcugggcaccuucaccuggacccucagcgacuccgagggcaacgagacgcccgggggcuacugccugacccgguggaugcugaucgaggccgagcucaagugcuucgggaacaccgccguggccaagugcaacgagaagcacgacgaggaguucugcgacaugcugcgccuguucgacuucaacaagcaggcgaucaagcggcucaagacccccgcccagaugagcauccagcugaucaacaaggccgugaacgcccugaucaacgaccagcucaucaugaagaaccaccuccgcgacaucaugggcauccccuacugcaacuacuccaaguacugcuaccugaaccacacggucaccgggaagaccagccugccccggugcugccugguguccaacggcagcuaccugaacgagacccacuucuccgacgacaucgagcagcaggccgacaacaugaucacggagcuccugcagaaggaguacaucgaccgccagggcaagaccccgcuggggcucguggaccuguucgucuucagcaccuccuucuaccugaucagcaucuuccugcaccucgugaagaucccgacccaccggcacguggucggcaagcccugccccaagccccaccgccugaaccacauggggaucugcuccugcggccuguacaagcacccgggggugcccgugaaguggaagcggugaggacuaguaauaaggaaacuguaugaaugucugugggcaggaagugaagagauccuucuguaaagguuuuuggaauuaugucugcugaauaauaaacuuuuuugaaauaauaaaucugguagaaaaaugagaucucaaaggcucuuuucagagccaccaaaaaaaaaaaaaaaaaaaaaaaaaaaaaaaaaaaaaaaaaaaaaaaaaaaaaaaaaaaaaaaaagaauu

SEQ ID NO: 32374 - RNA, 1778 nt, Artificial Sequence
  mRNA product Design b-4 (hSL-A64-N5) comprising derived and/or modified sequence from LASV(LASV221-NIG-2010;Clade II)__AIT17624__GPCmut7 (opt1)
aggagagucccgcagucggcguccagcggcucugcuuguucgugugugugucguugcaggccuuauucaagcuuaccaugggccagaucaucaccuucuuccaggaggugccccacgucaucgaggaggugaugaacaucgugcugaucgcccucagccugcuggccauccucaaggggaucuacaacgucgcgaccugcggccuguucgggcugguguccuuccuccugcugugcggccgcagcugcuccacgaccuacaaggggguguacgagcuccagacccuggagcuggacauggccagccucaacaugaccaugccgcuguccugcacgaagaacaacagccaccacuacaucauggucggcaacgagaccggccuggagcucacccugaccaacacguccaucaucaaccacaaguucugcaaccugagcgacgcccacaagaagaaccucuacgaccacgcccugauguccaucaucagcaccuuccaccuguccauccccaacuucaaccaguacgaggccaugagcugcgacuucaacgggggcaagaucuccgugcaguacaaccucagccacaccuacgcgaucgacgccgccaaccacugcgggaccaucgccaacggcgugcugcagacguucaugcggauggcguggggcggguccuacaucgcccuggacagcggcaagggguccugggacugcaucaugaccagcuaccaguaccucaucauccagaacaccaccugggaggaccacugccaguucucccgccccagccccaucggcuaccuggggcugcucagccagcggacgcgcgacaucuacaucucccggcgccugcugggcaccuucaccuggacccucagcgacuccgagggcaacgagacgcccgggggcuacugccugacccgguggaugcugaucgaggccgagcucaagugcuucgggaacaccgccgucgccaagugcaacgagaagcacgacgaggaguucugcgacaugcugcgccuguucgacuucaacaagcaggcgauccggcgccucaagacccccgcccagaugagcauccagcugaucaacaaggccgugaacgcccugaucaacgaccagcucaucaugaagaaccaccuccgggacaucaugggcauccccuacugcaacuacuccaaguacugcuaccugaaccacacggugaccgggaagaccagccugccccgcugcugccuggucuccaacggcagcuaccugaacgagacccacuucuccgacgacaucgagcagcaggccgacaacaugaucacggagaugcuccagaaggaguacauggaccggcagggcaagaccccgcuggggcugguggaccucuucguguucagcaccuccuucuaccugaucagcaucuuccugcaccuggucaagaucccgacccaccgccacgugaucggcaagcccugccccaagccccaccggcucaaccacauggggaucugcuccugcggccuguacaagcacccgggggugcccgucaaguggaagcgcugaggacuaguaauaaggaaacuguaugaaugucugugggcaggaagugaagagauccuucuguaaagguuuuuggaauuaugucugcugaauaauaaacuuuuuugaaauaauaaaucugguagaaaaaugagaucucaaaggcucuuuucagagccaccaaaaaaaaaaaaaaaaaaaaaaaaaaaaaaaaaaaaaaaaaaaaaaaaaaaaaaaaaaaaaaaaagaauu

SEQ ID NO: 32375 - RNA, 1778 nt, Artificial Sequence
  mRNA product Design b-4 (hSL-A64-N5) comprising derived and/or modified sequence from LASV(LASV237-NIG-2010;Clade II)__AIT17638__GPCmut7 (opt1)
aggagagucccgcagucggcguccagcggcucugcuuguucgugugugugucguugcaggccuuauucaagcuuaccaugggccagaucaucaccuucuuccaggaggugccccacgucaucgaggaggugaugaacaucgugcugaucgcccucagccugcuggccauccucaaggggaucuacaacgucgcgaccugcggccuguucgggcugguguccuuccuccugcugugcggccgcagcugcuccacgaccuacaaggggguguacgagcuccagacccuggagcuggacauggccagccucaacaugaccaugccgcuguccugcacgaagaacaacagccaccacuacaucauggucggcaacgagaccggccuggagcucacccugaccaacacguccaucaucaaccacaaguucugcaaccugagcgacgcccacaagaaggaccucuacgaccacgcccugauguccaucaucagcaccuuccaccuguccauccccaacuucaaccaguacgaggccaugagcugcgacuucaacgggggcaagaucuccgugcaguacaaccucagccacaccuacgcgguggacgccgccaaccacugcgggaccaucgccaacggcguccugcagacguucaugcggauggcguggggcggguccuacaucgcccuggacagcggcaagggguccugggacugcaucaugaccagcuaccaguaccucaucauccagaacaccaccugggaggaccacugccaguucucccgccccagccccaucggcuaccuggggcugcucagccagcggacgcgcgacaucuacaucucccggcgccugcugggcaccuucaccuggacccucagcgacuccgagggcaacgagacgcccgggggcuacugccugacccgguggaugcugaucgaggccgagcucaagugcuucgggaacaccgccguggccaagugcaacgagaagcacgacgaggaguucugcgacaugcugcgccuguucgacuucaacaagcaggcgauccggcgccucaagacccccgcccagaugagcauccagcugaucaacaaggccgugaacgcccugaucaacgaccagcucaucaugaagaaccaccuccgggacaucaugggcauccccuacugcaacuacuccaaguacugcuaccugaaccacacggucaccgggaagaccagccugccccgcugcugccugguguccaacggcagcuaccugaacgagacccacuucuccgacgacaucgagcagcaggccgacaacaugaucacggagcuccugcagaaggaguacauggaccggcagggcaagaccccgcuggggcucguggaccuguucgucuucagcaccuccuucuaccugaucagcaucuuccugcaccucaucaagaucccgacccaccgccacaucacgggcaagcccugccccaagccccaccggcugaaccacauggggaucugcuccugcggccuguacaagcacccgggggugcccgugaaguggaagcgcugaggacuaguaauaaggaaacuguaugaaugucugugggcaggaagugaagagauccuucuguaaagguuuuuggaauuaugucugcugaauaauaaacuuuuuugaaauaauaaaucugguagaaaaaugagaucucaaaggcucuuuucagagccaccaaaaaaaaaaaaaaaaaaaaaaaaaaaaaaaaaaaaaaaaaaaaaaaaaaaaaaaaaaaaaaaaagaauu

SEQ ID NO: 32376 - RNA, 1778 nt, Artificial Sequence
  mRNA product Design b-4 (hSL-A64-N5) comprising derived and/or modified sequence from LASV(LASV253-NIG-2011;Clade II)__AIT17670__GPCmut7 (opt1)
aggagagucccgcagucggcguccagcggcucugcuuguucgugugugugucguugcaggccuuauucaagcuuaccaugggccagaucaucaccuucuuccaggaggugccccacgucaucgaggaggugaugaacaucgugcugaucgcccucagccugcuggccauccucaaggggaucuacaacgucgcgaccugcggccuguucgggcugguguccuuccuccugcugugcggccgcagcugcuccacgaccuacaaggggguguacgagcuccagacccuggagcuggacauggccagccucaacaugaccaugccgcuguccugcacgaagaacaacagccaccacuacaucauggucggcaacgagaccggccuggagcucacccugaccaacacguccaucaucaaccacaaguucugcaaccugagcgacgcccacaagaagaaccucuacgaccacgcccugauguccaucaucagcaccuuccaccuguccauccccaacuucaaccaguacgaggccaugagcugcgacuucaacgggggcaagaucuccgugcaguacaaccucagccacaccuacgcgguggacgccgccaaccacugcgggaccaucgccaacggcguccugcagacguucaugcggauggcguggggcggguccuacaucgcccuggacagcggcaagggguccugggacugcaucaugaccagcuaccaguaccucaucauccagaacaccaccugggaggaccacugccaguucucccgccccagccccaucggcuaccuggggcugcucagccagcggacgcgcgacaucuacaucucccggcgccugcugggcaccuucaccuggacccucagcgacuccgagggcaacgagacgcccgggggcuacugccugacccgguggaugcugaucgaggccgagcucaagugcuucgggaacaccgccguggccaagugcaacgagaagcacgacgaggaguucugcgacaugcugcgccuguucgacuucaacaagcaggcgauccggcgccucaaggcccccgcccagaugagcauccagcugaucaacaaggccgugaacgcccugaucaacgaccagcucaucaugaagaaccaccuccgggacaucaugggcaucccguacugcaacuacuccaaguacugcuaccugaaccacaccgucacggggcgcaccagccugccccggugcugccugguguccaacggcagcuaccugaacgagacccacuucuccgacgacaucgagcagcaggcggacaacaugaucaccgagcuccugcagaaggaguacaucgaccgccagggcaagacgccccuggggcucguggaccuguucgucuucagcaccuccuucuaccugaucagcaucuuccugcaccucgugaagaucccgacccaccggcacaucaucggcaagcccugccccaagccccaccgccugaaccacauggggaucugcuccugcggccuguacaagcacccgggggugcccgucaaguggaagcggugaggacuaguaauaaggaaacuguaugaaugucugugggcaggaagugaagagauccuucuguaaagguuuuuggaauuaugucugcugaauaauaaacuuuuuugaaauaauaaaucugguagaaaaaugagaucucaaaggcucuuuucagagccaccaaaaaaaaaaaaaaaaaaaaaaaaaaaaaaaaaaaaaaaaaaaaaaaaaaaaaaaaaaaaaaaaagaauu

SEQ ID NO: 32377 - RNA, 1778 nt, Artificial Sequence
  mRNA product Design b-4 (hSL-A64-N5) comprising derived and/or modified sequence from LASV(LASV254-NIG-2011;Clade II)__AIT17674__GPCmut7 (opt1)
aggagagucccgcagucggcguccagcggcucugcuuguucgugugugugucguugcaggccuuauucaagcuuaccaugggccagaucaucaccuucuuccaggaggugccccacgucaucgaggaggugaugaacaucgugcugaucgcccucagccugcuggccauccucaaggggaucuacaacgucgcgaccugcggccuguucgggcugguguccuuccuccugcugugcggccgcagcugcuccacgaccuacaaggggguguacgagcuccagacccuggagcuggacaugaccaaccucaacaugacgaugccgcugagcugcaccaagaacaacucccaccacuacaucauggucggcaacgagaccggccuggagcucacccugacgaacaccagcaucaucaaccacaaguucugcaaccuguccgacgcccacaagaagaaccucuacaaccacgcccugaugagcaucaucuccaccuuccaccugagcauccccaacuucaaccaguacgaggccauguccugcgacuucaacgggggcaagaucagcgugcaguacaaccucucccacagcuacgccguggacgcggccaaccacugcgggaccaucgccaacggcguccugcagacguucaugcggauggccuggggcggguccuacaucgcgcuggacagcggcaaggggaacugggacugcaucaugaccuccuaccaguaccucaucauccagaacaccaccugggaggaccacugccaguucagccgccccucccccaucggcuaccuggggcugcucagccagcggacgcgcgacaucuacaucagccggcgccugcugggcaccuucaccuggacccucuccgacagcgagggcaacgagacgcccgggggcuacugccugacccgguggaugcugaucgaggccgagcucaagugcuucgggaacaccgccguggccaagugcaacgagaagcacgacgaggaguucugcgacaugcugcgccuguucgacuucaacaagcaggccauccggcgccucaagacccccgcgcaggccaacauccagcugaucaacaaggccgugaacgcccugaucaacgaccagcucaucaugaagaaccaccuccgggacaucaugggcauccccuacugcaacuacuccaaguacugcuaccugaaccacacggucaccgggaagaccagccugccccgcugcugccugguguccaacggcagcuaccugaacgagacccacuucuccgacgacaucgagcagcaggccgacaacaugaucacggagcuccugcagaaggaguacauggaccggcagggcaagaccccgcuggggcucguggaccuguucgucuucagcaccuccuucuaccugaucagcaucuuccugcaccucgugaagaucccgacccaccgccacgugaucggcaagcccugccccaagccccaccggcugaaccacauggggaucugcuccugcggccuguacaagcacccggggguccccgugaaguggaagcgcugaggacuaguaauaaggaaacuguaugaaugucugugggcaggaagugaagagauccuucuguaaagguuuuuggaauuaugucugcugaauaauaaacuuuuuugaaauaauaaaucugguagaaaaaugagaucucaaaggcucuuuucagagccaccaaaaaaaaaaaaaaaaaaaaaaaaaaaaaaaaaaaaaaaaaaaaaaaaaaaaaaaaaaaaaaaaagaauu

SEQ ID NO: 32378 - RNA, 1778 nt, Artificial Sequence
  mRNA product Design b-4 (hSL-A64-N5) comprising derived and/or modified sequence from LASV(Nig08-A19;Clade III)__ADU56618__GPCmut7 (opt1)
aggagagucccgcagucggcguccagcggcucugcuuguucgugugugugucguugcaggccuuauucaagcuuaccaugggccagaucgugaccuucuuccaggaggucccccacgugaucgaggaggugaugaacaucguccugaucgcccucagcauccuggccauccugaaggggcucuacaacaucgcgaccugcggccugaucgggcuggugacguuccuccugcuguccggccgcagcugcuccaugaccuacaaggggguguacgagcuccagacccuggagcugaacaugaacacccucaacaugacgaugccgcugagcugcaccaagaacaacucccaccacuacaucauggucggcaacgagaccggccuggagcucacccugacgaacaccagccugcuccaccacaaguucugcaaccuguccgacgcccacaagaagaaccuguacgaccacacccucaugagcaucaucuccaccuuccaccugagcauccccaacuucaaccaguacgaggccauguccugcgacuucaacgggggcaagaucacggugcaguacaaccugagccacuccuacgccaucgacgccgcgaaccacugcgggaccguggccaacggcguccuccagaccuucaugcggauggccuggggcgggagcuacaucgcccuggacuccggccgcgggaagugggacugcaucaugaccagcuaccaguaccugaucauccagaacacgaccugggaggaccacugccaguucucccggcccagccccaucggcuaccucgggcugcugucccagcgcacccgggacaucuacaucagccgccggcuccugggcaccuucacguggacccugagcgacuccgagggcaacgagacccccgggggcuacugccucacccgcuggaugcugaucgaggcggagcugaagugcuucgggaacacggccguggccaagugcaacgagaagcacgacgaggaguucugcgacaugcuccggcuguucgacuucaacaagcaggccauccgccggcugaaggcccccgcgcagaugagcauccagcucaucaacaaggccgugaacgcccugaucaacgaccagcugaucaugaagaaccaccuccgcgacaucaugggcauccccuacugcaacuacuccaaguacugcuaccugaaccacaccagcaccgggcggaccucccugccccgcugcugccucgucagcaacggcuccuaccugaacgagacgcacuucagcgacgacaucgagcagcaggccgacaacaugaucaccgagaugcugcagaaggaguaccucgaccggcagggcaagaccccgcuggggcugguggaccuguucguguucuccaccagcuucuaccucaucuccaucuuccugcaccuggucaagaucccgacgcaccgccacaucgugggcaagcccugccccaagccccaccggcucaaccacauggggaucugcagcugcggccuguacaagcagccgggggugcccguccgcuggaagcggugaggacuaguaauaaggaaacuguaugaaugucugugggcaggaagugaagagauccuucuguaaagguuuuuggaauuaugucugcugaauaauaaacuuuuuugaaauaauaaaucugguagaaaaaugagaucucaaaggcucuuuucagagccaccaaaaaaaaaaaaaaaaaaaaaaaaaaaaaaaaaaaaaaaaaaaaaaaaaaaaaaaaaaaaaaaaagaauu

SEQ ID NO: 32379 - RNA, 1781 nt, Artificial Sequence
  mRNA product Design b-4 (hSL-A64-N5) comprising derived and/or modified sequence from LASV(G1180-SLE-2010;Clade IV)__AIT17168__GPCmut7 (opt1)
aggagagucccgcagucggcguccagcggcucugcuuguucgugugugugucguugcaggccuuauucaagcuuaccaugggccagaucgugaccuucuuccaggaggucccccacgugaucgaggaggugaugaacaucguccugaucgcccucagcauccuggccgugcugaaggggcucuacaacuucgcgaccugcggccugguggggcugcucaccuuccugcugcucugcggccgcuccugcaccgccagccgguacaagggggucuacgagcugcagacccuggagcucaacauggagacccugaacaugacgaugccgcuguccugcaccaagaacaacagccaccacuacaucauggugggcaacgagaccggccucgagcugacccugacgaacaccuccaucaucaaccacaaguucugcaaccucagcgacgcccacaagaagaaccuguacgaccacgcccugauguccaucaucagcaccuuccaccucuccauccccaacuucaaccaguacgaggccaugagcugcgacuucaacgggggcaagaucuccgugcaguacaaccugagccacuccuacgcgggggacgccgccaaccacugcggcaccgucgccaacggggugcugcagacguucaugcgcauggcguggggcggcagcuacaucgcccucgacuccgggcacggcagcugggacugcaucaugaccuccuaccaguaccugaucauccagaacaccaccugggaggaccacugccaguucagccggcccucccccaucggguaccugggccuccugagccagcgcacgcgggacaucuacaucagccgccggcugcucggcaccuucaccuggacccuguccgacagcgaggggaaggacacgccgggcggguacugccugacccgcuggaugcucaucgaggccgagcugaagugcuucggcaacaccgccguggccaagugcaacgagaagcacgacgaggaguucugcgacaugcugcggcuguucgacuucaacaagcaggcgauccagcgccugaaggcccccgcccagauguccauccagcugaucaacaaggccgucaacgcccucaucaacgaccagcugaucaugaagaaccaccuccgggacaucauggggauccccuacugcaacuacagcaaguacugcuaccucaaccacaccacgaccggcaagaccucccugcccaagugcugccuggugagcaacggcuccuaccucaacgagacccacuucagcgacgacaucgagcagcaggcggacaacaugaucacggagaugcugcagaaggaguacauggagcgccaggggaagacgccccugggccucguggaccuguucgucuucuccaccagcuucuaccugaucuccaucuuccugcaccucgugaagaucccgacccaccggcacaucgugggcaagagcugccccaagccccaccgccugaaccacauggggaucugcuccugcgggcuguacaagcagcccggcgucccggugaaguggaagcggugaggacuaguaauaaggaaacuguaugaaugucugugggcaggaagugaagagauccuucuguaaagguuuuuggaauuaugucugcugaauaauaaacuuuuuugaaauaauaaaucugguagaaaaaugagaucucaaaggcucuuuucagagccaccaaaaaaaaaaaaaaaaaaaaaaaaaaaaaaaaaaaaaaaaaaaaaaaaaaaaaaaaaaaaaaaaagaauu

SEQ ID NO: 32380 - RNA, 1781 nt, Artificial Sequence
  mRNA product Design b-4 (hSL-A64-N5) comprising derived and/or modified sequence from LASV(G1442-SLE-2011;Clade IV)__AIT17180__GPCmut7 (opt1)
aggagagucccgcagucggcguccagcggcucugcuuguucgugugugugucguugcaggccuuauucaagcuuaccaugggccagaucgugaccuucuuccaggaggucccccacgugaucgaggaggugaugaacaucguccugaucgcccucagcauccuggccgugcugaaggggcucuacaacguggcgaccugcggccugaucgggcuggucacguuccuccugcugugcggccgcuccugcaccaccacccucuacaaggggguguacgagcugcagacgcuggagcucaacauggagacccugaacaugaccaugccgcugagcugcaccaagaacaacucccaccacuacauccgggugggcaacgagacgggccucgagcugacccugaccaacaccagcaucaucaaccacaaguucugcaaccucuccgacgcccacaagaagaaccuguacgaccacgcccugaugagcaucaucuccacguuccaccucagcauccccaacuucaaccaguacgaggccauguccugcgacuucaacgggggcaagaucagcguccaguacaaccugucccacagcuacgccggggacgcggccaaccacugcggcaccguggccaacggggugcugcagaccuucaugcgcauggccuggggcggcuccuacaucgcgcucgacagcgggcggggcaacugggacugcaucaugaccuccuaccaguaccugaucauccagaacacgaccugggacgaccacugccaguucagccgccccucccccaucggguaccugggccuccugagccagcggacccgcgacgucuacaucucccggcgccugcucggcaccuucacguggacccugagcgacagcgaggggaaggacaccccgggcggguacugccugacccgguggaugcucaucgaggccgagcugaagugcuucggcaacacggccguggccaagugcaacgagaagcacgacgaggaguucugcgacaugcugcgccucuucgacuucaacaagcaggccauccagcggcugaaggcgcccgcccagauguccauccagcugaucaacaaggccgugaacgcccucaucaacgaccagcugaucaugaagaaccaccuccgcgacaucauggggauccccuacugcaacuacagcaaguacugcuaccugaacaacaccgccaccggcaagaccucccugcccaagugcugccugaucagcaacggcuccuaccucaacgagacgcacuucagcgacgacaucgagcaggaggcggacaacaugaucaccgagaugcugcagaaggaguacauggagcggcaggggaagacgccccugggccucgucgaccuguucguguucuccaccagcuucuaccugaucuccaucuuccugcaccucgugaagaucccgacccaccgccacaucgucggcaagagcugccccaagccccaccggcugaaccacauggggaucugcuccugcgggcuguacaagcagcccggcgugccggugcgcuggaagcggugaggacuaguaauaaggaaacuguaugaaugucugugggcaggaagugaagagauccuucuguaaagguuuuuggaauuaugucugcugaauaauaaacuuuuuugaaauaauaaaucugguagaaaaaugagaucucaaaggcucuuuucagagccaccaaaaaaaaaaaaaaaaaaaaaaaaaaaaaaaaaaaaaaaaaaaaaaaaaaaaaaaaaaaaaaaaagaauu

SEQ ID NO: 32381 - RNA, 1781 nt, Artificial Sequence
  mRNA product Design b-4 (hSL-A64-N5) comprising derived and/or modified sequence from LASV(G3010-SLE-2013;Clade IV)__AIT17344__GPCmut7 (opt1)
aggagagucccgcagucggcguccagcggcucugcuuguucgugugugugucguugcaggccuuauucaagcuuaccaugggccagaucgugaccuucuuccaggaggucccccacgugaucgaggaggugaugaacaucguccugaucgcccucagcauccuggccgugcugaaggggcucuacaacuucgcgaccugcggccugguggggcuggucacguuccuccugcugugcggccgcuccugcaccaccagccucuacaaggggguguacgagcugcagacccuggagcucaacauggagacgcugaacaugaccaugccgcuguccugcaccaagaacaacagccaccacuacaucauggugggcaacgagaccggccucgagcugacgcugaccaacaccuccaucaucaaccacaaguucugcaaccucagcgacgcccacaagaagaaccuguacaaccacgcccugauguccaucaucagcaccuuccaccucuccauccccaacuucaaccaguacgaggccaugagcugcgacuucaacgggggcaagaucuccguccaguacaaccugagccacuccuacgccggggacgcggccagccacugcggcacgguggccaacggggugcugcagaccuucaugcggauggccuggggcggcuccuacaucgcgcucgacagcggguacggcaagugggacugcaucaugaccuccuaccaguaccugaucauccagaacaccacgugggaggaccacugccaguucagccgccccucccccaucggguaccugggccuccugagccagcggacccgcgacaucuacaucagccggcgccugcucggcaccuucaccuggacgcuguccgacagcgaggggaaggacaccccgggcggguacugccugacccgguggaugcucaucgaggccgagcugaagugcuucggcaacaccgccgucgccaagugcaacgagaagcacgacgaggaguucugcgacaugcugcgccucuucgacuucaacaagcaggccauccagcggcugaagacgcccgcgcagauguccauccagcugaucaacaaggccgugaacgcccucaucaacgaccagcugaucaugaagaaccaccuccgcgacaucauggggauccccuacugcaacuacagcaaguacugcuaccugaaccacaccaccaccggcaagacgucccugcccaagugcugccuggugagcaacggcuccuaccucaacgagacccacuucagcgacgacaucgagcagcaggccgacaacaugaucaccgagaugcugcagaaggaguacauggagcggcaggggaagacgccccugggccucgucgaccuguucguguucuccaccagcuucuaccugaucuccaucuuccugcaccucgugaagaucccgacccaccgccacaucgucggcaagagcugccccaagccccaccggcugaaccacauggggaucugcuccugcgggcuguacaagcagcccggcgugccggugcgcuggaagcggugaggacuaguaauaaggaaacuguaugaaugucugugggcaggaagugaagagauccuucuguaaagguuuuuggaauuaugucugcugaauaauaaacuuuuuugaaauaauaaaucugguagaaaaaugagaucucaaaggcucuuuucagagccaccaaaaaaaaaaaaaaaaaaaaaaaaaaaaaaaaaaaaaaaaaaaaaaaaaaaaaaaaaaaaaaaaagaauu

SEQ ID NO: 32382 - RNA, 1781 nt, Artificial Sequence
  mRNA product Design b-4 (hSL-A64-N5) comprising derived and/or modified sequence from LASV(G502-SLE-2009;Clade IV)__AIT17126__GPCmut7 (opt1)
aggagagucccgcagucggcguccagcggcucugcuuguucgugugugugucguugcaggccuuauucaagcuuaccaugggccagaucgugaccuucuuccaggaggucccccacgugaucgaggaggugaugaacaucguccugaucgcccucagcauccuggccgugcugaaggggcucuacaacuucgcgaccugcggccugguggggcugcucacguuccugcugcucugcggccgcuccugcaccaccgggcuguacaagggcgucuacgagcugcagacccucgagcugaacauggagacgcugaacaugaccaugccgcucagcugcaccaagaacaacucccaccacuacaucauggugggcaacgagaccgggcuggagcugacgcucaccaacaccagcaucaucaaccacaaguucugcaaccuguccgacgcccacaagaagaaccuguacgaccacgcccucaugagcaucaucuccaccuuccaccugagcauccccaacuucaaccaguacgaggccauguccugcgacuucaacggcgggaagaucagcgugcaguacaaccugucccacagcuacgccggcgacgcggccgaccacugcgggacggucgccaacggcgugcuccagaccuucaugcggauggccuggggcggguccuacaucgcgcuggacagcggccgcgggcggugggacugcaucaugaccuccuaccaguaccugaucauccagaacaccacgugggaggaccacugccaguucagccgccccucccccaucggcuaccucggccugcugagccagcggacccgcgacaucuacaucucccggcgccuccuggggaccuucaccuggacgcugagcgacagcgagggcaaggacacccccgggggcuacugccucacccgguggaugcugaucgaggccgagcugaagugcuucgggaacaccgccguggccaagugcaacgagaagcacgacgaggaguucugcgacaugcuccgccuguucgacuucaacaagcaggccauccagcggcugaaggcgcccgcccagauguccauccagcucaucaacaaggccgucaacgcccugaucaacgaccagcuggugaugaagaaccaccuccgcgacaucaugggcauccccuacugcaacuacagccgguacugcuaccugaaccacacgaccaccggccgcaccucccugcccaagugcugccucgugagcaacggguccuaccugaacgagacgcacuucagcgacgacaucgagcagcaggccgacaacaugaucaccgagaugcugcagaaggaguacauggagcggcagggcaagaccccgcucgggcuggucgaccuguucguguucuccaccagcuucuaccugaucuccaucuuccuccaccuggugaagaucccgacgcaccgccacaucgucggcaagagcugccccaagccccaccggcugaaccacauggggaucugcuccugcggccucuacaagcagcccggcgugccggugaaguggaagcgcugaggacuaguaauaaggaaacuguaugaaugucugugggcaggaagugaagagauccuucuguaaagguuuuuggaauuaugucugcugaauaauaaacuuuuuugaaauaauaaaucugguagaaaaaugagaucucaaaggcucuuuucagagccaccaaaaaaaaaaaaaaaaaaaaaaaaaaaaaaaaaaaaaaaaaaaaaaaaaaaaaaaaaaaaaaaaagaauu

SEQ ID NO: 32383 - RNA, 1781 nt, Artificial Sequence
  mRNA product Design b-4 (hSL-A64-N5) comprising derived and/or modified sequence from LASV(G733-SLE-2010;Clade IV)__AIT17154__GPCmut7 (opt1)
aggagagucccgcagucggcguccagcggcucugcuuguucgugugugugucguugcaggccuuauucaagcuuaccaugggccagaucgugaccuucuuccaggaggucccccacgugaucgaggaggugaugaacaucguccugaucgcccucagcauccuggccgugcugaaggggcucuacaacuucgcgaccugcggcaucguggggcuggucuccuuccugcuccugugcggccgcagcugcacgaccucccuguacaaggggguguacgagcuccagacccuggagcugaacauggagacccucaacaugacgaugccgcugagcugcaccaagaacaacucccaccacuacaucauggugggcaacgagaccggccuggagcucacccugacgaacaccagcaucaucaaccacaaguucugcaaccuguccgacgcccacaagaagaaccucuacgaccacgcccugaugagcaucaucuccaccuuccaccugagcauccccaacuucaaccaguacgaggccauguccugcgacuucaacgggggcaagaucagcguccaguacaaccucucccacagcuacgccggggacgcggccaaccacugcggcaccaucgccaacggggugcugcagacguucaugcggauggccuggggcggcuccuacaucgcgcuggacagcgggcgcgaccggugggacugcaucaugaccuccuaccaguaccucaucauccagaacaccaccugggaggaccacugccaguucagccgccccucccccaucggcuaccuggggcugcucagccagcggacgcgcgacaucuacaucagccggcgccugcugggcaccuucaccuggacccucuccgacagcgagggcaaggacacgcccgggggcuacugccugacccgguggaugcugaucgaggccgagcucaagugcuucgggaacaccgccguggccaagugcaacgagaagcacgacgaggaguucugcgacaugcugcgccuguucgacuucaacaagcaggccauccagcggcucaaggcgcccgcccagauguccauccagcugaucaacaaggccgucaacgcccugaucaacgaccagcucaucaugaagaaccaccuccgcgacaucaugggcauccccuacugcaacuacagcaaguacugcuaccugaaccacaccacgaccgggaagaccucccugcccaagugcugccuggugagcaacggcuccuaccugaacgagacccacuucagcgacgacaucgagcagcaggccgacaacaugaucacggagaugcuccagaaggaguacauggagcggcagggcaagaccccgcuggggcugguggaccucuucgucuucuccaccagcuucuaccugaucuccaucuuccugcaccuggugaagaucccgacccaccgccacguggucggcaagagcugccccaagccccaccggcucaaccacauggggaucugcuccugcggccuguacgggcagcccggcgugccggugaaguggaagcgcugaggacuaguaauaaggaaacuguaugaaugucugugggcaggaagugaagagauccuucuguaaagguuuuuggaauuaugucugcugaauaauaaacuuuuuugaaauaauaaaucugguagaaaaaugagaucucaaaggcucuuuucagagccaccaaaaaaaaaaaaaaaaaaaaaaaaaaaaaaaaaaaaaaaaaaaaaaaaaaaaaaaaaaaaaaaaagaauu

SEQ ID NO: 32384 - RNA, 1781 nt, Artificial Sequence
  mRNA product Design b-4 (hSL-A64-N5) comprising derived and/or modified sequence from MOPV/LASV reassortant(IGS-1;Clade IV)__AFY05576__GPCmut7 (opt1)
aggagagucccgcagucggcguccagcggcucugcuuguucgugugugugucguugcaggccuuauucaagcuuaccaugggccagaucgugaccuucuuccaggaggucccccacgugaucgaggaggugaugaacaucguccugaucgcccucagcgugcuggccgugcugaaggggcucuacaacuucgcgaccugcggccuggucgggcuggugacguuccuccugcugugcggccgcuccugcaccaccagccucuacaaggggguguacgagcugcagacccuggagcucaacauggagacgcugaacaugaccaugccgcuguccugcaccaagaacaacagccaccacuacaucauggucggcaacgagaccggccucgagcugacgcugaccaacaccuccaucaucaaccacaaguucugcaaccucagcgacgcccacaagaagaaccuguacgaccacgcccugauguccaucaucagcaccuuccaccucuccauccccaacuucaaccaguacgaggccaugagcugcgacuucaacgggggcaagaucuccgugcaguacaaccugagccacuccuacgccggggacgcggccaaccacugcggcacgguggccaacgggguccugcagaccuucaugcggauggccuggggcggcagcuacaucgcgcucgacuccgggcgcggcaacugggacugcaucaugaccagcuaccaguaccugaucauccagaacaccacgugggaggaccacugccaguucucccggcccagccccaucggguaccugggccuccugucccagcgcacccgggacaucuacaucagccgccggcugcucggcaccuucaccuggacgcugagcgacuccgagggggaggacaccccgggcggguacugccugacccgcuggaugcucaucgaggccgagcugaagugcuucggcaacaccgccguggccaagugcaacgagaagcacgacgaggaguucugcgacaugcugcggcuguucgacuucaacaagcaggccauccagcgccugaaggcgcccgcccagaugagcauccagcugaucaacaaggccgugaacgcccucaucaacgaccagcugaucaugaagaaccaccuccgggacaucauggggauccccuacugcaacuacuccaaguacugcuaccucaaccacacgaccaccggccgcaccagccugcccaagugcugccuggucuccaacggcagcuaccucaacgagacgcacuucuccgacgacaucgagcagcaggccgacaacaugaucaccgagaugcugcagaaggaguacauggagcggcaggggaagacgccccugggccucguggaccuguucguguucagcaccuccuucuaccugaucagcaucuuccugcaccucgucaagaucccgacccaccgccacaucguggggaaguccugccccaagccccaccggcugaaccacaugggcaucugcagcugcgggcuguacaagcagcccggcgugccggucaaguggaagcgcugaggacuaguaauaaggaaacuguaugaaugucugugggcaggaagugaagagauccuucuguaaagguuuuuggaauuaugucugcugaauaauaaacuuuuuugaaauaauaaaucugguagaaaaaugagaucucaaaggcucuuuucagagccaccaaaaaaaaaaaaaaaaaaaaaaaaaaaaaaaaaaaaaaaaaaaaaaaaaaaaaaaaaaaaaaaaagaauu

SEQ ID NO: 32385 - RNA, 1781 nt, Artificial Sequence
  mRNA product Design b-4 (hSL-A64-N5) comprising derived and/or modified sequence from LASV(LM765-SLE-2012;Clade IV)__AIT17814__GPCmut7 (opt1)
aggagagucccgcagucggcguccagcggcucugcuuguucgugugugugucguugcaggccuuauucaagcuuaccaugggccagaucgugaccuucuuccaggaggucccccacgugaucgaggaggugaugaacaucguccugaucgcccucagcauccuggccgugcugaaggggcucuacaacuucgcgaccugcggccugguggggcuggucacguuccuccugcugugcggccgcuccugcaccaccagccucuacaaggggguguacgagcugcagacccuggagcucaacauggagacgcugaacaugaccaugccgcuguccugcaccaagaacaacagccaccacuacaucauggugggcaacgagaccggccucgagcugacgcugaccaacaccuccaucaucgaccacaaguucugcaaccucagcgacgcccaccggaagaaccuguacgaccacgcccugauguccaucaucagcaccuuccaccucuccauccccaacuucaaccaguacgaggccaugagcugcgacuucaacgggggcaagaucuccguccaguacaaccugagccacuccuacgccaaggacgcggccgaccacugcgggacgguggccaacggcgugcugcagaccuucaugcgcauggccuggggcgggagcuacaucgcgcucgacuccggccgggggcgcugggacugcaucaugaccagcuaccaguaccugaucauccagaacaccacgugggaggaccacugccaguucucccggcccagccccaucggcuaccuggggcuccugucccagcgcacccgggacaucuacaucagccgccggcugcucggcaccuucaccuggacgcugagcgacuccgagggcaaggacacccccgggggcuacugccugacccgcuggaugcucaucgaggccgagcugaagugcuucgggaacaccgccgucgccaagugcaacgagaagcacgacgaggaguucugcgacaugcugcggcuguucgacuucaacaagcaggccauccagcgccugaaggcgcccgcccagaugagcauccagcugaucaacaaggccgugaacgcccucaucaacgaccagcugaucaugaagaaccaccuccgggacaucaugggcauccccuacugcaacuacuccaaguacugcuaccucaaccacacgaccaccgggaagaccagccugcccaagugcugccugguguccaacggcagcuaccucaacgagacgcacuucuccgacgacaucgagcagcaggccgacaacaugaucaccgagaugcugcagaaggaguacauggagcgccagggcaagaccccgcuggggcucgucgaccuguucguguucagcaccuccuucuaccugaucagcaucuuccugcaccucgugaagaucccgacgcaccggcacaucgucggcaagcccugccccaagccccaccgccugaaccacauggggaucugcuccugcggccuguacaagcagccgggggugcccgugaaguggaagcggugaggacuaguaauaaggaaacuguaugaaugucugugggcaggaagugaagagauccuucuguaaagguuuuuggaauuaugucugcugaauaauaaacuuuuuugaaauaauaaaucugguagaaaaaugagaucucaaaggcucuuuucagagccaccaaaaaaaaaaaaaaaaaaaaaaaaaaaaaaaaaaaaaaaaaaaaaaaaaaaaaaaaaaaaaaaaagaauu

SEQ ID NO: 32386 - RNA, 1781 nt, Artificial Sequence
  mRNA product Design b-4 (hSL-A64-N5) comprising derived and/or modified sequence from LASV(LM776-SLE-2012;Clade IV)__AIT17824__GPCmut7 (opt1)
aggagagucccgcagucggcguccagcggcucugcuuguucgugugugugucguugcaggccuuauucaagcuuaccaugggccagaucgugaccuucuuccaggaggucccccacgugaucgaggaggugaugaacaucguccugaucgcccucagcauccuggccgugcugaaggggcucuacaacuucgcgaccugcggccugguggggcuggucacguuccuccugcugugcggccgcuccugcaccaccagcguguacaaggggguguacgagcuccagacccuggagcugaacauggagacgcucaacaugaccaugccgcuguccugcaccaagaacaacagccaccacuacaucauggucggcaacgagaccggccuggagcucacgcugaccaacaccuccaucaucaaccacaaguucugcaaccugagcgacgcccacaagaagaaccucuacgaccacgcccugauguccaucaucagcaccuuccaccuguccauccccaacuucaaccaguacgaggccaugagcugcgacuucaacgggggcaagaucuccgugcaguacaaccucagccacuccuacgccggggacgcggccaaccacugcggcacgguggccaacgggguccugcagaccuucaugcggauggccuggggcggcagcuacaucgcgcuggacuccgggcacggcaagugggacugcaucaugaccagcuaccaguaccucaucauccagaacaccacgugggaggaccacugccaguucucccgccccagccccaucggguaccugggccugcucucccagcggacccgcgacaucuacaucagccggcgccugcugggcaccuucaccuggacgcucagcgacuccgaggggaaggacaccccgggcggguacugccugacccgguggaugcugaucgaggccgagcucaagugcuucggcaacaccgccguggccaagugcaacgagaagcacgacgaggaguucugcgacaugcugcgccuguucgacuucaacaagcaggccauccagcggcucaaggcgcccgcccagaugagcauccagcugaucaacaaggccgugaacgcccugaucaacgaccagcucaucaugaagaaccaccuccgcgacaucauggggauccccuacugcaacuacuccaaguacugcuaccugaaccacacgaccaccggcaagaccagccugcccaagugcugccuggucuccaacggcagcuaccugaacgagacgcacuucuccgacgacaucgagcagcaggccgacaacaugaucaccgagaugcuccagaaggaguacauggagcggcaggggaagacgccccugggccugguggaccucuucguguucagcaccuccuucuaccugaucagcaucuuccugcaccuggucaagaucccgacccaccgccacaucguggggaaguccugccccaagccccaccggcucaaccacaugggcaucugcagcugcgggcuguacaagcagcccggcgugccgguccgcuggaagcggugaggacuaguaauaaggaaacuguaugaaugucugugggcaggaagugaagagauccuucuguaaagguuuuuggaauuaugucugcugaauaauaaacuuuuuugaaauaauaaaucugguagaaaaaugagaucucaaaggcucuuuucagagccaccaaaaaaaaaaaaaaaaaaaaaaaaaaaaaaaaaaaaaaaaaaaaaaaaaaaaaaaaaaaaaaaaagaauu

SEQ ID NO: 32387 - RNA, 1781 nt, Artificial Sequence
  mRNA product Design b-4 (hSL-A64-N5) comprising derived and/or modified sequence from LASV(Mad39;Clade IV)__ANH09722__GPCmut7 (opt1)
aggagagucccgcagucggcguccagcggcucugcuuguucgugugugugucguugcaggccuuauucaagcuuaccaugggccagaucgugaccuucuuccaggaggucccccacgugaucgaggaggugaugaacaucguccugaucgcccucagcauccuggccgugcugaaggggcucuacaacguggcgaccugcggccugaucgggcuggucacguuccuccugcugugcggccgcuccugcaccaccacccucuacaaggggguguacgagcugcaggcccuggagcucaacauggagacgcugaacaugaccaugccgcugagcugcaccaagaacaacucccaccacuacauccgggugggcaacgagaccggccucgagcugacgcugaccaacaccagccucaucaaccacaaguucugcaaccuguccgacgcccacaagaagaaccuguacgaccacgcccucaugagcaucaucuccaccuuccaccugagcauccccaacuucaaccaguacgaggccauguccugcgacuucaacgacgggaagaucagcguccaguacaaccugucccacacguacgcgggcgacaccgccaaccacugcgggaccguggccaacggcgugcuccagaccuucaugcgcauggccuggggcgggagcuacaucgcgcuggacuccggccgcgggggcugggacugcaucaugacgagcuaccaguaccugaucauccagaacaccaccugggaggaccacugccaguucucccggcccagccccaucggguaccucggccugcugucccagcggacccgcgacaucuacaucagccggcgccuccugggcacguucaccuggacccuguccgacagcgaggggaaggacaccccgggcggguacugccucacgcgguggaugcugaucgaggccgagcugaagugcuucggcaacaccgccgucgccaagugcaacgagaagcacgacgaggaguucugcgacaugcuccgccuguucgacuucaacaagcaggccauccagcggcugaaggcgcccgcccagaugagcauccagcucaucaacaaggccgugaacgcccugaucaacgaccagcugaucaugaagaaccaccuccgcgacaucauggggauccccuacugcaacuacuccaaguacugcuaccugaaccacaccgugaccggcaagacgagccugcccaagugcugccucgucuccaacggcagcuaccugaacgagacccacuucuccgacgacaucgagcagcaggccgacaacaugaucaccgagaugcugcagaaggaguacauggagcggcaggggaagacgccccucggccugguggaccuguucguguucagcaccuccuucuaccugaucagcaucuuccuccaccuggucaagaucccgacccaccgccacgugguggggaagcccugccccaagccccaccggcugaaccacaugggcaucugcuccugcggguucuacaagcagccgggcguccccgugcgcuggaagcggugaggacuaguaauaaggaaacuguaugaaugucugugggcaggaagugaagagauccuucuguaaagguuuuuggaauuaugucugcugaauaauaaacuuuuuugaaauaauaaaucugguagaaaaaugagaucucaaaggcucuuuucagagccaccaaaaaaaaaaaaaaaaaaaaaaaaaaaaaaaaaaaaaaaaaaaaaaaaaaaaaaaaaaaaaaaaagaauu

SEQ ID NO: 32388 - RNA, 1781 nt, Artificial Sequence
  mRNA product Design b-4 (hSL-A64-N5) comprising derived and/or modified sequence from LASV(Z0947-SLE-2011;Clade IV)__AIT17840__GPCmut7 (opt1)
aggagagucccgcagucggcguccagcggcucugcuuguucgugugugugucguugcaggccuuauucaagcuuaccaugggccagaucgugaccuucuuccaggaggucccccacgugaucgaggaggugaugaacaucguccugaucgcccucagcauccuggccgugcugaaggggcucuacaacuucgcgaccugcggccugguggggcuggucacguuccuccugcugugcggccgcuccugcaccaucagccucuacaaggggguguacgagcugcagacccuggagcucaacauggagacccugaacaugacgaugccgcuguccugcaccaagaacaacagccaccacuacaucauggugggcaacgagaccggccucgagcugacccugacgaacaccuccaucaucaaccacaaguucugcaaccucagcgacgcccacaagaagaaccuguacgaccacgcccugauguccaucaucagcaccuuccaccucuccauccccaacuucaaccaguacgaggccaugagcugcgacuucaacgggggcaagaucuccguccaguacaaccugagccacuccuacgccggggacgcggccaaccacugcggcaccguggccaacggggugcugcagacguucaugcggauggccuggggcggcagcuacaucgcgcucgacuccgggcgcgaccggugggacugcaucaugaccagcuaccaguaccugaucauccagaacaccaccugggaggaccacugccaguucucccgccccagccccaucggcuaccuggggcuccugucccagcggacgcgcgacaucuacaucagccggcgccugcucggcaccuucaccuggacccugagcgacuccgagggcaaggacacgcccgggggcuacugccugacccgguggaugcucaucgaggccgagcugaagugcuucgggaacaccgccgucgccaagugcaacgagaagcacgacgaggaguucugcgacaugcugcgccucuucgacuucaacaagcaggccauccagcggcugaaggcgcccgcccagaugagcauccagcugaucaacaaggccgugaacgcccucaucaacgaccagcugaucaugaagaaccaccuccgcgacaucaugggcauccccuacugcaacuacuccaaguacugcuaccugaaccacaccacgaccgggaagaccagccugcccaagugcugccugguguccaacggcagcuaccucaacgagacccacuucuccgacgacaucgagcagcaggccgacaacaugaucacggagaugcugcagaaggaguacauggagcggcagggcaagaccccgcuggggcucgucgaccuguucguguucagcaccuccuucuaccugaucagcaucuuccugcaccucgugaagaucccgacccaccgccacaucgucggcaagcccugccccaagccccaccggcugaaccacauggggaucugcuccugcggccuguacaagcagccgggggugcccgugaaguggaagcgcugaggacuaguaauaaggaaacuguaugaaugucugugggcaggaagugaagagauccuucuguaaagguuuuuggaauuaugucugcugaauaauaaacuuuuuugaaauaauaaaucugguagaaaaaugagaucucaaaggcucuuuucagagccaccaaaaaaaaaaaaaaaaaaaaaaaaaaaaaaaaaaaaaaaaaaaaaaaaaaaaaaaaaaaaaaaaagaauu

SEQ ID NO: 32389 - RNA, 1781 nt, Artificial Sequence
  mRNA product Design b-4 (hSL-A64-N5) comprising derived and/or modified sequence from LASV(Josiah;Clade IV)__NP_694870__GPCmut7 (opt1)
aggagagucccgcagucggcguccagcggcucugcuuguucgugugugugucguugcaggccuuauucaagcuuaccaugggccagaucgugaccuucuuccaggaggucccccacgugaucgaggaggugaugaacaucguccugaucgcccucagcgugcuggccgugcugaaggggcucuacaacuucgcgaccugcggccuggucgggcuggugacguuccuccugcugugcggccgcuccugcaccaccagccucuacaaggggguguacgagcugcagacccuggagcucaacauggagacgcugaacaugaccaugccgcuguccugcaccaagaacaacagccaccacuacaucauggucggcaacgagaccggccucgagcugacgcugaccaacaccuccaucaucaaccacaaguucugcaaccucagcgacgcccacaagaagaaccuguacgaccacgcccugauguccaucaucagcaccuuccaccucuccauccccaacuucaaccaguacgaggccaugagcugcgacuucaacgggggcaagaucuccgugcaguacaaccugagccacuccuacgccggggacgcggccaaccacugcggcacgguggccaacgggguccugcagaccuucaugcggauggccuggggcggcagcuacaucgcgcucgacuccgggcgcggcaacugggacugcaucaugaccagcuaccaguaccugaucauccagaacaccacgugggaggaccacugccaguucucccggcccagccccaucggguaccugggccuccugucccagcgcacccgggacaucuacaucagccgccggcugcucggcaccuucaccuggacgcugagcgacuccgaggggaaggacaccccgggcggguacugccugacccgcuggaugcucaucgaggccgagcugaagugcuucggcaacaccgccguggccaagugcaacgagaagcacgacgaggaguucugcgacaugcugcggcuguucgacuucaacaagcaggccauccagcgccugaaggcgcccgcccagaugagcauccagcugaucaacaaggccgugaacgcccucaucaacgaccagcugaucaugaagaaccaccuccgggacaucauggggauccccuacugcaacuacuccaaguacugcuaccucaaccacacgaccaccggccgcaccagccugcccaagugcugccuggucuccaacggcagcuaccucaacgagacgcacuucuccgacgacaucgagcagcaggccgacaacaugaucaccgagaugcugcagaaggaguacauggagcggcaggggaagaccccgcugggccugguggaccucuucguguucagcaccuccuucuaccugaucagcaucuuccugcaccucgucaagauccccacgcaccgccacaucguggggaaguccugccccaagccccaccggcugaaccacaugggcaucugcagcugcgggcuguacaagcagccgggcgugcccgucaaguggaagcgcugaggacuaguaauaaggaaacuguaugaaugucugugggcaggaagugaagagauccuucuguaaagguuuuuggaauuaugucugcugaauaauaaacuuuuuugaaauaauaaaucugguagaaaaaugagaucucaaaggcucuuuucagagccaccaaaaaaaaaaaaaaaaaaaaaaaaaaaaaaaaaaaaaaaaaaaaaaaaaaaaaaaaaaaaaaaaagaauu

SEQ ID NO: 32390 - RNA, 1778 nt, Artificial Sequence
  mRNA product Design b-4 (hSL-A64-N5) comprising derived and/or modified sequence from LASV(LP;Clade I)__AAF86701__GPCmut7 (opt1)
aggagagucccgcagucggcguccagcggcucugcuuguucgugugugugucguugcaggccuuauucaagcuuaccaugggccagaucaucaccuucuuccaggaggugccccacgucaucgaggaggugaugaacaucgugcugaucgcccucagccugcuggccauccucaaggggcuguacaacaucgcgaccugcggcaucaucgggcuggucgccuuccucuuccugugcggcaaguccugcagccugacgcucaagggcggguacgagcugcagacccuggagcucaacauggagacccugaacaugaccaugccgcuguccugcacgaagaacagcucccaccacuacauccgcgugggcaacgagaccgggcucgagcugacccugaccaacacgagcaucaucaaccacaaguucugcaaccucuccgacgcccacaagaagaaccuguacgaccacgcccugaugagcaucaucuccaccuuccaccucagcauccccaacuucaaccaguacgaggccauguccugcgacuucaacggcgggaagaucagcgugcaguacaaccugucccacagcuacgcgggcgacgccgccgagcacugcgggaccgucgccaacggcgugcugcagaccuucaugcggauggcguggggcgggcgcuacaucgcccucgacuccggcaaggggaacugggacugcaucaugacgagcuaccaguaccugaucauccagaacaccaccugggaggaccacugccaguucucccggcccagccccaucggcuaccugggccuccugucccagcgcacccgggacaucuacaucagccgccggcugcucgggacguucaccuggacccugagcgacuccgagggcaacgagacccccgggggcuacugccugacgcgcuggaugcucaucgaggccgagcugaagugcuucgggaacaccgccguggccaagugcaacgagaagcacgacgaggaguucugcgacaugcugcggcuguucgacuucaacaagcaggcgauccgccggcugaaggccccggcccagaugagcauccagcugaucaacaaggccgucaacgcccucaucaacgaccagcugaucaugaagaaccaccuccgcgacaucaugggcauccccuacugcaacuacuccaaguacugcuaccucaaccacaccagcuccggccggaccagccugcccaagugcugccugaucuccaacgggagcuaccucaacgagacgcaguucuccgacgacaucgagcagcaggcggacaacaugaucaccgagaugcugcagaaggaguacaucgagcgccagggcaagaccccgcuggggcugguggacaucuucaucuucagcaccuccuucuaccucaucagcaucuuccugcaccugaucaagauccccacgcaccggcacaucgugggcaagcccugccccaagccgcaccgccucaaccacaugggggucugcuccugcggccuguacaagcaccccggcgugcccaccaaguggaagcggugaggacuaguaauaaggaaacuguaugaaugucugugggcaggaagugaagagauccuucuguaaagguuuuuggaauuaugucugcugaauaauaaacuuuuuugaaauaauaaaucugguagaaaaaugagaucucaaaggcucuuuucagagccaccaaaaaaaaaaaaaaaaaaaaaaaaaaaaaaaaaaaaaaaaaaaaaaaaaaaaaaaaaaaaaaaaagaauu

SEQ ID NO: 32391 - RNA, 1778 nt, Artificial Sequence
  mRNA product Design b-4 (hSL-A64-N5) comprising derived and/or modified sequence from LASV(803213;Clade II)__AAF86703__GPCmut7 (opt1)
aggagagucccgcagucggcguccagcggcucugcuuguucgugugugugucguugcaggccuuauucaagcuuaccaugggccagaucaucaccuucuuccaggaggugccccacgucaucgaggaggugaugaacaucgugcugaucgcccucagccugcuggccauccucaaggggaucuacaacgucgcgaccugcggccuguucgggcugaucuccuuccuccugcugugcggccgcagcugcuccgugacguacaaggggguguacgagcuccagacccuggagcugaacauggccaaccucaacaugaccaugccgcugagcugcaccaagaacaacucccaccacuacaucauggucggcaacgagacgggccuggagcucacccugaccaacaccagcaucaucaaccacaaguucugcaaccuguccgacgcccacaagaagaaccucuacgaccacgcccugaugagcaucaucuccacguuccaccugagcauccccaacuucaaccaguacgaggccauguccugcgacuucaacgggggcaagaucagcgugcaguacaaccucucccacagcuucgcgguggacgccgccaaccacugcgggaccaucgccaacggcguccugcagaccuucaugcggauggcguggggcggguccuacaucgcccuggacagcggcaaggggaacugggacugcaucaugaccuccuaccaguaccucaucauccagaacacgaccugggaggaccacugccaguucagccgccccucccccaucggcuaccuggggcugcucagccagcggacccgcgacaucuacaucagccggcgccugcugggcaccuucacguggacccucuccgacagcgagggcaacgaggcccccgggggcuacugccugacccgguggaugcugaucgaggccgagcucaagugcuucgggaacaccgccguggcgaagugcaacgagaagcacgacgaggaguucugcgacaugcugcgccuguucgacuucaacaagcaggccaucaagcggcucaagacgccggcccagauguccauccagcugaucaacaaggccgugaacgcccugaucaacgaccagcucaucaugaagaaccaccuccgcgacaucaugggcauccccuacugcaacuacagccgguacugcuaccugaaccacaccgucaccgggaagaccucccugccccgcugcugccuggugagcaacggcuccuaccugaacgagacgcacuucagcgacgacaucgagcagcaggcggacaacaugaucaccgagaugcuccagaaggaguacauggaccggcagggcaagaccccgcuggggcugguggaccuguucgucuucuccaccagcuucuaccucaucuccaucuuccugcaccuggugaagauccccacgcaccgccacaucgugggcaagcccugccccaagccgcaccggcucaaccacauggggaucugcagcugcggccuguacaagcaccccgggguccccgugaaguggaagcgcugaggacuaguaauaaggaaacuguaugaaugucugugggcaggaagugaagagauccuucuguaaagguuuuuggaauuaugucugcugaauaauaaacuuuuuugaaauaauaaaucugguagaaaaaugagaucucaaaggcucuuuucagagccaccaaaaaaaaaaaaaaaaaaaaaaaaaaaaaaaaaaaaaaaaaaaaaaaaaaaaaaaaaaaaaaaaagaauu

SEQ ID NO: 32392 - RNA, 1778 nt, Artificial Sequence
  mRNA product Design b-4 (hSL-A64-N5) comprising derived and/or modified sequence from LASV(GA391;Clade III)__CAA36645__GPCmut7 (opt1)
aggagagucccgcagucggcguccagcggcucugcuuguucgugugugugucguugcaggccuuauucaagcuuaccaugggccagaucgugaccuucuuccaggaggucccccacgugaucgaggaggugaugaacaucguccugaucgcccucagcauccuggccauccugaaggggcucuacaacguggcgaccugcggccugaucgggcuggugacguuccuccugcuguccggccgcagcugcucccucaucuacaaggggaccuacgagcugcagacccuggagcucaacauggagacccugaacaugacgaugccgcugagcugcaccaagaacaacucccaccacuacauccgggucggcaacgagaccggccucgagcugacccugacgaacaccagcauccucaaccacaaguucugcaaccuguccgacgcccacaagcgcaaccuguacgaccacagccucauguccaucaucagcaccuuccaccuguccauccccaacuucaaccaguacgaggccaugagcugcgacuucaacgggggcaagaucaccgugcaguacaaccugucccacagcuucgccguggacgccgcggggcacugcggcacgcucgccaacgggguccugcagaccuucaugcggauggccuggggcggcuccuacaucgcccuggacagcgggcgcggcaacugggacugcaucaugaccuccuaccaguaccucaucauccagaacaccacgugggacgaccacugccaguucagccggcccucccccaucggguaccugggccugcucagccagcgcacccgggacaucuacaucagccgccggcugcugggcaccuucaccuggacgcucuccgacagcgaggggaacgagaccccgggcggguacugccugacccgcuggaugcugaucgaggcggagcucaagugcuucggcaacaccgccguggccaagugcaacgagaagcacgacgaggaguucugcgacaugcugcggcuguucgacuucaacaagcaggccauccgccggcucaagacgcccgcccagauguccauccagcugaucaacaaggcggugaacgcccugaucaacgaccagcucaucaugaagaaccaccuccgcgacaucauggggauccccuacugcaacuacagccgguacugcuaccugaaccacaccuccaccggcaagaccagccugccccgcugcugccugaucuccaacggcagcuaccugaacgagacgaaguucuccgacgacaucgagcagcaggccgacaacaugaucaccgagaugcugcagaaggaguacaucgaccggcaggggaagaccccgcucggccuggucgaccuguucguguucagcaccuccuucuaccucaucagcaucuuccugcaccuggugaagauccccacgcaccgccacaucgucgggaagcccugccccaagccgcaccggcucaaccacaugggcaucugcuccugcgggcuguacaagcagcccggcgugcccgugcgcuggaagcggugaggacuaguaauaaggaaacuguaugaaugucugugggcaggaagugaagagauccuucuguaaagguuuuuggaauuaugucugcugaauaauaaacuuuuuugaaauaauaaaucugguagaaaaaugagaucucaaaggcucuuuucagagccaccaaaaaaaaaaaaaaaaaaaaaaaaaaaaaaaaaaaaaaaaaaaaaaaaaaaaaaaaaaaaaaaaagaauu

SEQ ID NO: 32393 - RNA, 1781 nt, Artificial Sequence
  mRNA product Design b-4 (hSL-A64-N5) comprising derived and/or modified sequence from LASV(AV;Clade V)__CCA30314__GPCmut7 (opt1)
aggagagucccgcagucggcguccagcggcucugcuuguucgugugugugucguugcaggccuuauucaagcuuaccaugggccagaucgugaccuucuuccaggaggucccccacgugaucgaggaggugaugaacaucguccugaucgcccucagcauccuggccgugcugaaggggcucuacaacaucgcgaccugcggccugaucgggcugaucacguuccuccugcugugcggccgcuccugcagcuccaaccucuacaaggggguguacgagcugcagagccuggaccucaacauggagacccugaacaugaccaugccgcuguccugcaccaagaacaacagccaccacuacauccgggucggcaacgacacgggccucgagcugacccugaccaacaccuccauccucaaccacaaguucugcaaccugagcgacgcccacaagaaggaccuguacgaccacgcccucauguccaucaucagcacguuccaccuguccauccccaacuucaaccaguacgaggccaugagcugcgacuucaacgggggcaagaucuccgugcaguacaaccugagccacuccuacgccaucgacgcggccaaccacugcgggaccguggccaacggcauccuccagaccuucaugcgcauggccuggggcgggagcuacaucgcgcuggacuccggccgggggaacugggacugcaucaugaccagcuaccaguaccugaucauccagaacacgaccugggagaaccacugccaguucucccgccccagccccaucggcuaccucgggcugcugagccagcggacccgcgacaucuacaucucccggcgccuccugggcaccuucacguggacccugagcgacuccgagggcaacgccacccccgggggcuacugccucacccgguggaugcugaucgaggccgagcugaagugcuucgggaacacggccgucgccaagugcaacgagaagcacgacgaggaguucugcgacaugcuccgccuguucgacuucaacaagcaggcgaucagccggcugaaguccccggcccagaugagcauccagcucaucaacaaggccgugaacgcccugaucaacgaccagcugaucaugaagaaccaccuccgcgacaucaugggcauccccuacugcaacuacuccaaguacugcuaccugaaccacaccaucaccgggaagaccagccugcccaagugcugccucguguccaacggcagcuaccugaacgagacgcacuucuccgacgacaucgagcagcaggccgacaacaugaucaccgagaugcugcagaaggaguacauggagcggcagggcaagaccccgcuggggcucgucgaccuguucguguucagcaccuccuucuaccugaucagcaucuuccuccgccuggugaagauccccacgcaccggcacaucgucggcaagcccugccccaagccgcaccgccugaaccacauggggaucugcuccugcggccucuacaagcagcccggggugcccgugcgguggaagcgcugaggacuaguaauaaggaaacuguaugaaugucugugggcaggaagugaagagauccuucuguaaagguuuuuggaauuaugucugcugaauaauaaacuuuuuugaaauaauaaaucugguagaaaaaugagaucucaaaggcucuuuucagagccaccaaaaaaaaaaaaaaaaaaaaaaaaaaaaaaaaaaaaaaaaaaaaaaaaaaaaaaaaaaaaaaaaagaauu

SEQ ID NO: 32394 - RNA, 1778 nt, Artificial Sequence
  mRNA product Design b-4 (hSL-A64-N5) comprising derived and/or modified sequence from LASV(Togo/2016/7082;Clade VI)__AMR44577__GPCmut7 (opt1)
aggagagucccgcagucggcguccagcggcucugcuuguucgugugugugucguugcaggccuuauucaagcuuaccaugggccagaucaucaccuucuuccaggaggugccccacgucaucgaggaggugaugaacaucgugcugaucgcccucagccugcuggccauccucaagggggucuacaacguggcgaccugcggcaucaucgggcuggugacguuccuguuccucugcggccgcuccugcagccugaucuacaagggguccuacgagcugcagacccucgagcugaacauggagacccugaacaugaccaugccgcucagcugcacgaagaacuccagccaccacuacauccgggucggcaacgagaccggccuggagcugacccucaccaacacguccaucaucaaccacaaguucugcaaccugagcgacgcccacaagcgcaaccuguacgaccacgcccucauguccauccugagcaccuuccaccuguccauccccaacuucaaccaguacgaggccaugagcugcgacuucaacgggggcaagaucuccgugcaguacaaccucagccacgccuacgcgguggacgccgccgagcacugcgggaccgucgccaacggcgugcugcagaccuucaugcggauggcguggggcggguccuacaucgcccuggacagcggccgcgggaacugggacugcaucaugacguccuaccaguaccucaucauccagaacaccaccugggaggaccacugccaguucagccggcccucccccaucggcuaccuggggcugcucagccagcgcacccgggacaucuacaucagccgccggcugcugggcacguucaccuggacccucuccgacagcgagggcaacgagacccccgggggcuacugccugacgcgcuggaugcugaucgaggccgagcucaagugcuucgggaacaccgccguggccaagugcaacgagaagcacgacgaggaguucugcgacaugcugcggcuguucgacuucaacaagcaggcgauccagcgccucaaguccccggcccagaugagcauccagcugaucaacaaggccgucaacgcccugaucaacgaccagcucaucaugaagaaccaccuccgggacaugaugggcauccccuacugcaacuacuccaaguacugcuaccugaaccacaccagcuccgggcgcaccagccugcccaagugcugccugguguccaacggcagcuaccugaacgagacgcacuucuccgacgacaucgagcagcaggccgacaacaugaucaccgagaugcuccagaaggaguacaucgaccggcagggcaagaccccgcuggggcugguggaccuguucgucuucagcaccuccuucuaccucaucagcaucuuccugcaccugaucaagauccccacgcaccgccacaucgugggcaagcccugccccaagccgcaccggcucaaccacauggggaucugcuccugcggccuguacaagcagcccggggugcccacccgcuggaagcggugaggacuaguaauaaggaaacuguaugaaugucugugggcaggaagugaagagauccuucuguaaagguuuuuggaauuaugucugcugaauaauaaacuuuuuugaaauaauaaaucugguagaaaaaugagaucucaaaggcucuuuucagagccaccaaaaaaaaaaaaaaaaaaaaaaaaaaaaaaaaaaaaaaaaaaaaaaaaaaaaaaaaaaaaaaaaagaauu

SEQ ID NO: 32395 - RNA, 1778 nt, Artificial Sequence
  mRNA product Design b-4 (hSL-A64-N5) comprising derived and/or modified sequence from LASV(KAK-428;Clade n.d. (VII))__ANH09740__GPCmut7 (opt1)
aggagagucccgcagucggcguccagcggcucugcuuguucgugugugugucguugcaggccuuauucaagcuuaccaugggccagaucgugaccuucuuccaggaggucccccacgugaucgaggaggugaugaacaucguccugaucgcccucagccugcuggccauccucaaggggcuguacaacuucgcgaccugcggcgugaucgggcugaucacguuccuccugcugugcggccgcuccugcagcgccaccuacaaggggcaguacgagcuccagacccuggagcugaacauggagucccucaacaugaccaugccgcugagcugcacgaagaacaacucccaccacuacauccgggccggcaacaacaccggccuggagcucacccugaccaacacgagcaucaucucccacaaguucugcaaccugagcgacgcccacaagaagaaccucuacgaccacacccugauguccaucaucaccaccuuccaccugagcauccccaacuucaaccaguacgaggccauguccugcgacuucaacgggggcaagaucagcauccaguacaaccucucccacagcuacgcgggggacgccgcccagcacugcggcacgguggccaacgggguccugcagaccuucaugcgcauggcguggggcggcuccuaccuggcccucgacagcgggcggcgcggcugggacugcaucaucuccagcuaccaguaccugaucauccagaacaccaccugggacgaccacugccaguucucccggcccagccccaucggguaccugggcuucgugagccagaagacgcgcgacaucuacaucucccggcgccuccugggcaccuucaccuggacccugagcgacuccgaggggcacgacaugccgggcggguacugccucacgcgguggaugcugaucgaggccgaccugaagugcuucggcaacaccgccguggccaagugcaacgagaagcacgacgaggaguucugcgacauguggcgccucuucgacuucaacaagcaggcgauccagcggcugaaggcccccgcccagaugaacauccagcugaucaacaaggccgucaacgcccucaucaacgaccagcugaugaugaagaaccaccuccgcgacaucauggggauccccuacugcaacuacagcaaguucugcuaccugaacaacaccaccacgggccggaccucccugccccgcugcugccugaucagcaacggcuccuaccucaacgagacccacuucagcgacgacaucgagcagcaggcggacaacaugaucaccgagaugcugcagaaggaguacauggaccggcaggggaagacgccgcugggccucguggaccuguucguguucuccaccagcuucuaccugaucaccaucuuccugcaccucgucaagauccccacccaccgccacaucguggggaagcccugccccaagccgcaccggcugaaccacaugggcaucugcuccugcgggcuguacaagcagcccggcgugcccguccgcuggaagcggugaggacuaguaauaaggaaacuguaugaaugucugugggcaggaagugaagagauccuucuguaaagguuuuuggaauuaugucugcugaauaauaaacuuuuuugaaauaauaaaucugguagaaaaaugagaucucaaaggcucuuuucagagccaccaaaaaaaaaaaaaaaaaaaaaaaaaaaaaaaaaaaaaaaaaaaaaaaaaaaaaaaaaaaaaaaaagaauu

SEQ ID NO: 32396 - RNA, 1778 nt, Artificial Sequence; identical to SEQ ID NO: 32390
  mRNA product Design b-4 (hSL-A64-N5) comprising derived and/or modified sequence from LASV(Pinneo-NIG-1969;Clade I)__AIT17836__GPCmut7 (opt1)

SEQ ID NO: 32397 - RNA, 1778 nt, Artificial Sequence
  mRNA product Design b-4 (hSL-A64-N5) comprising derived and/or modified sequence from LASV(ISTH0009-NIG-2011;Clade II)__AIT17404__GPCmut7 (opt1)
aggagagucccgcagucggcguccagcggcucugcuuguucgugugugugucguugcaggccuuauucaagcuuaccaugggccagaucaucaccuucuuccaggaggugccccacgucaucgaggaggugaugaacaucgugcugaucgcccucagccugcuggccauccucaaggggaucuacaacgucgcgaccugcggccuguucgggcugguguccuuccuccugcugugcggccgcagcugcuccacgaccuacaaggggguguacgagcuccagacccuggagcuggacauggccagccucaacaugaccaugccgcuguccugcacgaagaacaacagccaccacuacaucauggucggcaacgagaccggccuggagcucacccugaccaacacguccaucaucaaccacaaguucugcaaccugagcgacgcccacaagaagaaccucuacgaccacgcccugauguccaucaucagcaccuuccaccuguccauccccaacuucaaccaguacgaggccaugagcugcgacuucaacgggggcaagaucuccgugcaguacaaccucagccacgcguacgccguggacgccgccaaccacugcgggaccaucgcgaacggcguccugcagaccuucaugcggauggccuggggcggguccuacaucgcccuggacagcggcaagggguccugggacugcaucaugacgagcuaccaguaccucaucauccagaacaccaccugggaggaccacugccaguucucccgccccagccccaucggcuaccuggggcugcucagccagcggacccgcgacaucuacaucucccggcgccugcugggcacguucaccuggacccucagcgacuccgagggcaacgagacccccgggggcuacugccugacgcgguggaugcugaucgaggccgagcucaagugcuucgggaacaccgccguggcgaagugcaacgagaagcacgacgaggaguucugcgacaugcugcgccuguucgacuucaacaagcaggccauccggcgccucaagaccccggcccagaugagcauccagcugaucaacaaggccgugaacgcccugaucaacgaccagcucaucaugaagaaccaccuccgggacaucaugggcauccccuacugcaacuacuccaaguacugcuaccugaaccacaccgucacggggaagaccagccugccccgcugcugccugguguccaacggcagcuaccugaacgagacccacuucuccgacgacaucgagcagcaggcggacaacaugaucaccgagcuccugcagaaggaguacauggaccggcagggcaagacgccgcuggggcugguggaccucuucgucuucagcaccuccuucuaccugaucagcaucuuccugcaccucaucaagauccccacccaccgccacaucaccggcaagcccugccccaagccgcaccggcugaaccacauggggaucugcuccugcggccuguacaagcaccccggggugcccgugaaguggaagcgcugaggacuaguaauaaggaaacuguaugaaugucugugggcaggaagugaagagauccuucuguaaagguuuuuggaauuaugucugcugaauaauaaacuuuuuugaaauaauaaaucugguagaaaaaugagaucucaaaggcucuuuucagagccaccaaaaaaaaaaaaaaaaaaaaaaaaaaaaaaaaaaaaaaaaaaaaaaaaaaaaaaaaaaaaaaaaagaauu

SEQ ID NO: 32398 - RNA, 1778 nt, Artificial Sequence
  mRNA product Design b-4 (hSL-A64-N5) comprising derived and/or modified sequence from LASV(ISTH2010-NIG-2012;Clade II)__AIT17482__GPCmut7 (opt1)
aggagagucccgcagucggcguccagcggcucugcuuguucgugugugugucguugcaggccuuauucaagcuuaccaugggccagaucaucaccuucuuccaggaggugccccacgucaucgaggaggugaugaacaucgugcugaucgcccucagccugcuggccauccucaaggggaucuacaacgucgcgaccugcggccuguucgggcugguguccuuccuccugcugugcggccgcagcugcuccacgaccuacaaggggguguacgagcuccagacccuggagcuggacauggccagccucaacaugaccaugccgcuguccugcacgaagaacaacagccaccacuacaucauggucggcaacgagaccggccuggagcucacccugaccaacacguccaucaucaaccacaaguucugcaaccugagcgacgcccacaagaagaaccucuacgaccacgcccugauguccaucaucagcaccuuccaccuguccauccccaacuucaaccaguacgaggccaugagcugcgacuucaacgggggcaagaucuccgugcaguacaaccucagccacgcguacgccguggacgccgccaaccacugcgggaccaucgcgaacggcguccugcagaccuucaugcggauggccuggggcggguccuacaucgcccuggacagcggcaagggguccugggacugcaucaugacgagcuaccaguaccucaucauccagaacaucaccugggaggaccacugccaguucucccgccccagccccaucggcuaccuggggcugcucagccagcggacccgcgacaucuacaucucccggcgccugcugggcaccuucacguggacccucagcgacuccgagggcaacgagacccccgggggcuacugccugacccgguggaugcugaucgaggccgagcucaagugcuucgggaacacggccguggcgaagugcaacgagaagcacgacgaggaguucugcgacaugcugcgccuguucgacuucaacaagcaggccauccggcgccucaagaccccggcccagaugagcauccagcugaucaacaaggccgugaacgcccugaucaacgaccagcucaucaugaagaaccaccuccgggacaucaugggcauccccuacugcaacuacuccaaguacugcuaccugaaccacaccgucaccgggaagacgagccugccccgcugcugccugguguccaacggcagcuaccugaacgagacccacuucuccgacgacaucgagcagcaggcggacaacaugaucaccgagcuccugcagaaggaguacaucgaccggcagggcaagaccccgcuggggcugguggaccucuucgucuucagcacguccuucuaccugaucagcaucuuccugcaccucgugaagauccccacccaccgccacguggucggcaagcccugccccaagccgcaccggcugaaccacauggggaucugcuccugcggccuguacaagcaccccggggugcccgugaaguggaagcgcugaggacuaguaauaaggaaacuguaugaaugucugugggcaggaagugaagagauccuucuguaaagguuuuuggaauuaugucugcugaauaauaaacuuuuuugaaauaauaaaucugguagaaaaaugagaucucaaaggcucuuuucagagccaccaaaaaaaaaaaaaaaaaaaaaaaaaaaaaaaaaaaaaaaaaaaaaaaaaaaaaaaaaaaaaaaaagaauu

SEQ ID NO: 32399 - RNA, 1778 nt, Artificial Sequence
  mRNA product Design b-4 (hSL-A64-N5) comprising derived and/or modified sequence from LASV(Lassa virus/H.sapiens-wt/NGA/2015/ISTH_0543;Clade II)__AVO03639__GPCmut7 (opt1)
aggagagucccgcagucggcguccagcggcucugcuuguucgugugugugucguugcaggccuuauucaagcuuaccaugggccagaucaucaccuucuuccaggaggugccccacgucaucgaggaggugaugaacaucgugcugaucgcccucagccugcuggccauccucaaggggaucuacaacgucgcgaccugcggccuguucgggcugguguccuuccuccugcugugcggccgcagcugcuccacgaccuacaaggggguguacgagcuccagacccuggagcuggacauggccaaccucaacaugaccaugccgcugagcugcacgaagaacaacucccaccacuacaucauggucggcaacgagaccggccuggagcucacccugaccaacacgagcaucaucaaccacaaguucugcaaccuguccgacgcccacaagaagaaccucuacgaccacgcccugaugagcaucaucuccaccuuccaccugagcauccccaacuucaaccaguacgaggccauguccugcgacuucaacgggggcaagaucagcgugcaguacaaccucucccacaccuacgcgguggacgccgccaaccacugcgggaccaucgccaacggcguccugcagacguucaugcggauggcguggggcgggagcuacaucgcccuggacuccggcaaggggagcugggacugcaucaugaccuccuaccaguaccucgugauccagaacaccaccugggaggaccacugccaguucagccgccccucccccaucggcuaccuggggcugcucagccagcggacgcgcgacaucuacaucagccggcgccugcugggcaccuucaccuggacccucuccgacagcgagggcaacgagacgcccgggggcuacugccugacccgguggaugcugaucgaggccgagcucaagugcuucgggaacaccgccguggccaagugcaacgagaagcacgacgaggaguucugcgacaugcugcgccuguucgacuucaacaagcaggcgauccggcgccucaagaccccggcccagauguccauccagcugaucaacaaggccgucaacgcccugaucaacgaccagcucaucaugaagaaccaccuccgggacaucaugggcauccccuacugcaacuacagcaaguacugcuaccugaaccacacggugaccgggaagaccucccugccccgcugcugccuggugagcaacggcuccuaccugaacgagacccacuucagcgacgacaucgagcagcaggccgacaacaugaucacggagcuccugcagaaggaguacaucgaccggcagggcaagaccccgcuggggcuggucgaccucuucguguucuccaccagcuucuaccugaucuccaucuuccugcaccucgugaagauccccacccaccgccacaucacgggcaagcccugccccaagccgcaccggcugaaccacauggggaucugcagcugcggccuguacaagcaccccgggguccccgugaaguggaagcgcugaggacuaguaauaaggaaacuguaugaaugucugugggcaggaagugaagagauccuucuguaaagguuuuuggaauuaugucugcugaauaauaaacuuuuuugaaauaauaaaucugguagaaaaaugagaucucaaaggcucuuuucagagccaccaaaaaaaaaaaaaaaaaaaaaaaaaaaaaaaaaaaaaaaaaaaaaaaaaaaaaaaaaaaaaaaaagaauu

SEQ ID NO: 32400 - RNA, 1778 nt, Artificial Sequence
  mRNA product Design b-4 (hSL-A64-N5) comprising derived and/or modified sequence from LASV(Lassa virus/H.sapiens-wt/NGA/2016/ISTH_0009;Clade II)__AVO03571__GPCmut7 (opt1)
aggagagucccgcagucggcguccagcggcucugcuuguucgugugugugucguugcaggccuuauucaagcuuaccaugggccagaucaucaccuucuuccaggaggugccccacgucaucgaggaggugaugaacaucgugcugaucgcccucagccugcuggccauccucaaggggaucuacaacgucgcgaccugcggccugcuggggcucguguccuuccugcugcucugcggccgcagcugcuccacgaccuacaaggggguguacgagcugcagacccuggagcucgacauggccagccugaacaugaccaugccgcuguccugcacgaagaacaacagccaccacuacaucauggucggcaacgagaccggccucgagcugacccugaccaacacguccaucaucaaccacaaguucugcaaccucagcgacgcccacaagaagaaccuguacgaccacgcccugauguccaucaucagcaccuuccaccucuccauccccaacuucaaccaguacgaggccaugagcugcgacuucaacgggggccggaucuccgugcaguacaaccugagccacuccuacgcgguggacgccgccaaccacugcgggaccaucgccaacggcguccugcagaccuucaugcgcauggcguggggcgggagcuacaucgcccucgacuccggcaaggggagcugggacugcaucaugacguccuaccaguaccugaucauccagaacaccaccugggaggaccacugccaguucagccggcccagccccaucggcuaccuggggcuccugucccagcgcacccgggacaucuacaucagccgccggcugcucggcacguucaccuggacccuguccgacagcgagggcaacgagacccccgggggcuacugccugacgcgcuggaugcucaucgaggccgagcugaagugcuucgggaacaccgccguggccaagugcaacgagaagcacgacgaggaguucugcgacaugcugcggcuguucgacuucaacaagcaggcgauccgccggcugaagaccccggcccagauguccauccagcugaucaacaaggccgugaacgcccucaucaacgaccagcugaucaugaagaaccaccuccgcgacaucaugggcauccccuacugcaacuacagcaaguacugcuaccucaaccacaccgucacggggaagaccucccugccccggugcugccuggugagcaacggcuccuaccucaacgagacccacuucagcgacgacaucgagcagcaggccgacaacaugaucaccgagcugcugcagaaggaguacaucgaccgccagggcaagacgccgcuggggcucguggaccuguucgucuucuccaccagcuucuaccugaucuccaucuuccuccaccuggugaagauccccacccaccggcacaucaccggcaagcccugccccaagccgcaccgccugaaccacauggggaucugcagcugcggccucuacaaccaccccggggugcccgucaaguggaagcggugaggacuaguaauaaggaaacuguaugaaugucugugggcaggaagugaagagauccuucuguaaagguuuuuggaauuaugucugcugaauaauaaacuuuuuugaaauaauaaaucugguagaaaaaugagaucucaaaggcucuuuucagagccaccaaaaaaaaaaaaaaaaaaaaaaaaaaaaaaaaaaaaaaaaaaaaaaaaaaaaaaaaaaaaaaaaagaauu

SEQ ID NO: 32401 - RNA, 1778 nt, Artificial Sequence
  mRNA product Design b-4 (hSL-A64-N5) comprising derived and/or modified sequence from LASV(Lassa virus/H.sapiens-wt/NGA/2016/ISTH_0017;Clade II)__AVO03567__GPCmut7 (opt1)
aggagagucccgcagucggcguccagcggcucugcuuguucgugugugugucguugcaggccuuauucaagcuuaccaugggccagaucaucaccuucuuccaggaggugccccacgucaucgaggaggugaugaacaucgugcugaucgcccucagccugcuggccauccucaaggggaucuacaacgucgcgaccugcggccuguucgggcugguguccuuccuccugcugugcggccgcagcugcuccacgaccuacaaggggguguacgagcuccagacccuggagcuggacauggccagccucaacaugaccaugccgcuguccugcacgaagaacaacagccaccacuacaucauggucggcaacgagaccggccuggagcucacccugaccaacacguccaucaucaaccacaaguucugcaaccugagcgacgcccacaagaagaaccucuacgaccacgcccugauguccaucaucagcaccuuccaccuguccauccccaacuucaaccaguacgaggccaugagcugcgacuucaacgggggcaagaucuccgugcaguacaaccucagccacaccuacgcgaucgacgccgccaaccacugcgggaccaucgccaacggcgugcugcagacguucaugcggauggcguggggcggguccuacaucgcccuggacagcggcaagggguccugggacugcaucaugaccagcuaccaguaccucaucauccagaacaccaccugggaggaccacugccaguucucccgccccagccccaucggcuaccuggggcugcucagccagcggacgcgcgacaucuacaucucccggcgccugcugggcaccuucaccuggacccucagcgacuccgagggcaacgagacgcccgggggcuacugccugacccgguggaugcugaucgaggccgagcucaagugcuucgggaacaccgccgucgccaagugcaacgagaagcacgacgaggaguucugcgacaugcugcgccuguucgacuucaacaagcaggcgauccggcgccucaagaccccggcccagaugagcauccagcugaucaacaaggccgugaacgcccugaucaacgaccagcucaucaugaagaaccaccuccgggacaucaugggcauccccuacugcaacuacuccaaguacugcuaccugaaccacacggugaccgggaagaccagccugccccgcugcugccuggucuccaacggcagcuaccugaacgagacccacuucuccgacgacaucgagcagcaggccgacaacaugaucacggagcuccugcagaaggaguacauggaccggcagggcaagaccccgcuggggcugguggaccucuucguguucagcaccuccuucuaccugaucagcaucuuccugcaccucguccgcauccccacccaccggcacgugaucggcaagcccugccccaagccgcaccgccugaaccacauggggaucugcuccugcggccuguacaagcaccccggggugcccgucaaguggaagcggugaggacuaguaauaaggaaacuguaugaaugucugugggcaggaagugaagagauccuucuguaaagguuuuuggaauuaugucugcugaauaauaaacuuuuuugaaauaauaaaucugguagaaaaaugagaucucaaaggcucuuuucagagccaccaaaaaaaaaaaaaaaaaaaaaaaaaaaaaaaaaaaaaaaaaaaaaaaaaaaaaaaaaaaaaaaaagaauu

SEQ ID NO: 32402 - RNA, 1778 nt, Artificial Sequence
  mRNA product Design b-4 (hSL-A64-N5) comprising derived and/or modified sequence from LASV(Lassa virus/H.sapiens-wt/NGA/2018/ISTH_0959;Clade II)__AVV65099__GPCmut7 (opt1)
aggagagucccgcagucggcguccagcggcucugcuuguucgugugugugucguugcaggccuuauucaagcuuaccaugggccagaucaucaccuucuuccaggaggugccccacgucaucgaggaggugaugaacaucgugcugaucgcccucagccugcuggccauccucaaggggaucuacaacgucgugaccugcggccuguucgggcugguguccuuccuccugcugugcggccgcagcugcuccacgaccuacaagggggucuacgagcuccagacccuggagcuggacauggcgagccucaacaugaccaugccgcuguccugcacgaagaacaacagccaccacuacaucauggugggcaacgagaccggccuggagcucacccugaccaacacguccaucaucaaccacaaguucugcaaccugagcgacgcccacaagaagaaccucuacgaccacgcccugauguccaucaucagcaccuuccaccuguccauccccaacuucaaccaguacgaggccaugagcugcgacuucaacgggggcaagaucuccgugcaguacaaccucagccacgccuacgcgaucgacgccgccaaccacugcgggaccaucgccaacggcguccugcagaccuucaugcggauggcguggggcggguccuacaucgcccuggacagcggcaagggguccugggacugcaucaugacgagcuaccaguaccucaucauccagaacaccaccugggaggaccacugccaguucucccgccccagccccaucggcuaccuggggcugcucagccagcggacccgcgacaucuacaucucccggcgccugcugggcacguucaccuggacccucagcgacuccgagggcaacgagacccccgggggcuacugccugacgcgguggaugcugaucgaggccgagcucaagugcuucgggaacaccgccguggccaagugcaacgagaagcacgacgaggaguucugcgacaugcugcgccuguucgacuucaacaagcaggcgauccggcgccucaagaccccggcccagaugagcauccagcugaucaacaaggccgugaacgcccugaucaacgaccagcucaucaugaagaaccaccuccgggacaucaugggcauccccuacugcaacuacuccaaguacugcuaccugaaccacaccgucacggggaagaccagccugccccgcugcugccugguguccaacggcagcuaccugaacgagacccacuucuccgacgacaucgagcagcaggccgacaacaugaucaccgagcuccugcagaaggaguacaucgaccggcagggcaagacgccgcuggggcugguggaccucuucgucuucagcaccuccuucuaccugaucagcaucuuccugcaccucgugaagauccccacccaccgccacgugaucggcaagcccugccccaagccgcaccggcugaaccacauggggaucugcuccugcggccuguacaagcaccccgggguccccgugaaguggaagcgcugaggacuaguaauaaggaaacuguaugaaugucugugggcaggaagugaagagauccuucuguaaagguuuuuggaauuaugucugcugaauaauaaacuuuuuugaaauaauaaaucugguagaaaaaugagaucucaaaggcucuuuucagagccaccaaaaaaaaaaaaaaaaaaaaaaaaaaaaaaaaaaaaaaaaaaaaaaaaaaaaaaaaaaaaaaaaagaauu

SEQ ID NO: 32403 - RNA, 1778 nt, Artificial Sequence
  mRNA product Design b-4 (hSL-A64-N5) comprising derived and/or modified sequence from LASV(LASV003-NIG-2008;Clade II)__AIT17580__GPCmut7 (opt1)
aggagagucccgcagucggcguccagcggcucugcuuguucgugugugugucguugcaggccuuauucaagcuuaccaugggccagaucaucaccuucuuccaggaggugccccacgucaucgaggaggugaugaacaucgugcugaucgcccucagccugcuggccauccucaaggggaucuacaacgucgcgaccugcggccuguucgggcugguguccuuccuccugcugugcggccgcagcugcuccacgaccuacaaggggguguacgagcuccagacccuggagcuggacauggccagccucaacaugaccaugccgcuguccugcacgaagaacaacagccaccacuacaucauggucggcaacgagaccggccuggagcucacccugaccaacacguccaucaucaaccacaaguucugcaaccugagcgacgcccacaagaagaaccucuacgaccacgcccugauguccaucaucagcaccuuccaccuguccauccccaacuucaaccaguacgaggccaugagcugcgacuucaacgggggcaagaucuccgugcaguacaaccucagccacaccuacgcgguggacgccgccaaccacugcgggaccaucgccaacggcguccugcagacguucaugcggauggcguggggcggguccuacaucgcccuggacagcggcaagggguccugggacugcaucaugaccagcuaccaguaccucaucauccagaacaccaccugggaggaccacugccaguucucccgccccagccccaucggcuaccuggggcugcucagccagcggacgcgcgacaucuacaucucccggcgccugcugggcaccuucaccuggacccucagcgacuccgagagcaacgagacgccgggcggguacugccugacccgguggaugcugaucgaggccgagcucaagugcuucggcaacaccgccguggccaagugcaacgagaagcacgacgaggaguucugcgacaugcugcgccuguucgacuucaacaagcaggcgauccggcgccucaaggcccccgcccagauguccauccagcugaucaacaaggccgugaacgcccugaucaacgaccagcucaucaugaagaaccaccuccgggacaucauggggauccccuacugcaacuacagcaaguacugcuaccugaaccacaccgucacgggccgcaccucccugccccggugcugccuggugagcaacggguccuaccugaacgagacccacuucagcgacgacaucgagcagcaggcggacaacaugaucaccgagcuccugcagaaggaguacauggaccgccagggcaagacgccgcugggccugguggaccucuucgucuucuccaccagcuucuaccugaucuccaucuuccugcaccucgugaagauccccacccaccggcacgugaucgggaagcccugccccaagccgcaccgccugaaccacaugggcaucugcagcugcgggcuguacaagcaccccggcguccccgugaaguggaagcggugaggacuaguaauaaggaaacuguaugaaugucugugggcaggaagugaagagauccuucuguaaagguuuuuggaauuaugucugcugaauaauaaacuuuuuugaaauaauaaaucugguagaaaaaugagaucucaaaggcucuuuucagagccaccaaaaaaaaaaaaaaaaaaaaaaaaaaaaaaaaaaaaaaaaaaaaaaaaaaaaaaaaaaaaaaaaagaauu

SEQ ID NO: 32404 - RNA, 1778 nt, Artificial Sequence
  mRNA product Design b-4 (hSL-A64-N5) comprising derived and/or modified sequence from LASV(LASV035-NIG-2009;Clade II)__AIT17588__GPCmut7 (opt1)
aggagagucccgcagucggcguccagcggcucugcuuguucgugugugugucguugcaggccuuauucaagcuuaccaugggccagaucaucaccuucuuccaggaggugccccacgucaucgaggaggugaugaacaucgugcugaucgcccucagccugcuggccauccucaaggggaucuacaacgucgcgaccugcggccuguucgggcugguguccuuccuccugcugugcggccgcagcugcuccacgaccuacaaggggguguacgagcuccagacccuggagcuggacauggccagccucaacaugaccaugccgcuguccugcacgaagaacaacagccaccacuacaucauggucggcaacgagaccggccuggagcucacccugaccaacacguccaucaucaaccacaaguucugcaaccugagcgacgcccacaagaagaaccucuacgaccacgcccugauguccaucaucagcaccuuccaccuguccauccccaacuucaaccaguacgaggccaugagcugcgacuucaacgggggcaagaucuccgugcaguacaaccucagccacgcguacgccguggacgccgccaaccacugcgggaccaucgcgaacggcguccugcagaccuucaugcggauggccuggggcggguccuacaucgcccuggacagcggcaagggguccugggacugcaucaugacgagcuaccaguaccucaucauccagaacaccaccugggaggaccacugccaguucucccgccccagccccaucggcuaccuggggcugcucagccagcggacccgcgacaucuacaucucccggcgccugcugggcacguucaccuggacccucagcgacuccgagggcaacgagacccccgggggcuacugccugacgcgguggaugcugaucgaggccgagcucaagugcuucgggaacaccgccguggcgaagugcaacgagaagcacgacgaggaguucugcgacaugcugcgccuguucgacuucaacaagcaggccauccggcgccucaaggccccggcccagaugagcauccagcugaucaacaaggccgugaacgcgcugaucaacgaccagcucaucaugaagaaccaccuccgggacaucaugggcauccccuacugcaacuacuccaaguacugcuaccugaaccacaccgucaccgggaagacgagccugccccgcugcugccugguguccaacggcagcuaccugaacgagacccacuucuccgacgacaucgagcagcaggccgacaacaugaucaccgagcuccugcagaaggaguacaucgaccggcagggcaagaccccgcuggggcugguggaccucuucgucuucagcacguccuucuaccugaucagcaucuuccugcaccucgugaagauccccacccaccgccacgugaucggcaagcccugccccaagccgcaccggcugaaccacauggggaucugcuccugcggccuguacaagcaccccgggguccccgugaaguggaagcgcugaggacuaguaauaaggaaacuguaugaaugucugugggcaggaagugaagagauccuucuguaaagguuuuuggaauuaugucugcugaauaauaaacuuuuuugaaauaauaaaucugguagaaaaaugagaucucaaaggcucuuuucagagccaccaaaaaaaaaaaaaaaaaaaaaaaaaaaaaaaaaaaaaaaaaaaaaaaaaaaaaaaaaaaaaaaaagaauu

SEQ ID NO: 32405 - RNA, 1778 nt, Artificial Sequence
  mRNA product Design b-4 (hSL-A64-N5) comprising derived and/or modified sequence from LASV(LASV1000-NIG-2009;Clade II)__AIT17782__GPCmut7 (opt1)
aggagagucccgcagucggcguccagcggcucugcuuguucgugugugugucguugcaggccuuauucaagcuuaccaugggccagaucaucaccuucuuccaggaggugccccacgucaucgaggaggugaugaacaucgugcugaucgcccucagccugcuggccauccucaaggggaucuacaacgucgcgaccugcggccuguucgggcugguguccuuccuccugcugugcggccgcagcugcuccacgaccuacaaggggguguacgagcuccagacccuggagcuggacauggccagccucaacaugaccaugccgcuguccugcacgaagaacaacagccaccacuacaucauggucggcaacgagaccggccuggagcucacccugaccaacacguccaucaucaaccacaaguucugcaaccugagcgacgcccacaagaagaaccucuacgaccacgcccugauguccaucaucagcaccuuccaccuguccauccccaacuucaaccaguacgaggccaugagcugcgacuucaacgggggcaagaucuccgugcaguacaaccucagccacaccuacgcgguggacgccgccaaccacugcgggaccaucgccaacggcguccugcagacguucaugcggauggcguggggcggguccuacaucgcccuggacagcggcaagggguccugggacugcaucaugaccagcuaccaguaccucaucauccagaacaccaccugggaggaccacugccaguucucccgccccagccccaucggcuaccuggggcugcucagccagcggacgcgcgacaucuacaucucccggcgccugcugggcaccuucaccuggacccucagcgacuccgagggcaacgagacgcccgggggcuacugccugacccgguggaugcugaucgaggccgagcucaagugcuucgggaacaccgccguggccaagugcaacgagaagcacgacgaggaguucugcgacaugcugcgccuguucgacuucaacaagcaggcgaucaagcggcucaagaccccggcccagaugagcauccagcugaucaacaaggccgugaacgcccugaucaacgaccagcucaucaugaagaaccaccuccgcgacaucaugggcauccccuacugcaacuacuccaaguacugcuaccugaaccacacggucaccgggaagaccagccugccccggugcugccugguguccaacggcagcuaccugaacgagacccacuucuccgacgacaucgagcagcaggccgacaacaugaucacggagcuccugcagaaggaguacaucgaccgccagggcaagaccccgcuggggcugguggaccucuucgucuucagcaccuccuucuaccugaucagcaucuuccugcaccucgugaagauccccacccaccggcacguggucggcaagcccugccccaagccgcaccgccugaaccacauggggaucugcuccugcggccuguacaagcaccccggggugcccgugaaguggaagcggugaggacuaguaauaaggaaacuguaugaaugucugugggcaggaagugaagagauccuucuguaaagguuuuuggaauuaugucugcugaauaauaaacuuuuuugaaauaauaaaucugguagaaaaaugagaucucaaaggcucuuuucagagccaccaaaaaaaaaaaaaaaaaaaaaaaaaaaaaaaaaaaaaaaaaaaaaaaaaaaaaaaaaaaaaaaaagaauu

SEQ ID NO: 32406 - RNA, 1778 nt, Artificial Sequence
  mRNA product Design b-4 (hSL-A64-N5) comprising derived and/or modified sequence from LASV(LASV221-NIG-2010;Clade II)__AIT17624__GPCmut7 (opt1)
aggagagucccgcagucggcguccagcggcucugcuuguucgugugugugucguugcaggccuuauucaagcuuaccaugggccagaucaucaccuucuuccaggaggugccccacgucaucgaggaggugaugaacaucgugcugaucgcccucagccugcuggccauccucaaggggaucuacaacgucgcgaccugcggccuguucgggcugguguccuuccuccugcugugcggccgcagcugcuccacgaccuacaaggggguguacgagcuccagacccuggagcuggacauggccagccucaacaugaccaugccgcuguccugcacgaagaacaacagccaccacuacaucauggucggcaacgagaccggccuggagcucacccugaccaacacguccaucaucaaccacaaguucugcaaccugagcgacgcccacaagaagaaccucuacgaccacgcccugauguccaucaucagcaccuuccaccuguccauccccaacuucaaccaguacgaggccaugagcugcgacuucaacgggggcaagaucuccgugcaguacaaccucagccacaccuacgcgaucgacgccgccaaccacugcgggaccaucgccaacggcgugcugcagacguucaugcggauggcguggggcggguccuacaucgcccuggacagcggcaagggguccugggacugcaucaugaccagcuaccaguaccucaucauccagaacaccaccugggaggaccacugccaguucucccgccccagccccaucggcuaccuggggcugcucagccagcggacgcgcgacaucuacaucucccggcgccugcugggcaccuucaccuggacccucagcgacuccgagggcaacgagacgcccgggggcuacugccugacccgguggaugcugaucgaggccgagcucaagugcuucgggaacaccgccgucgccaagugcaacgagaagcacgacgaggaguucugcgacaugcugcgccuguucgacuucaacaagcaggcgauccggcgccucaagaccccggcccagaugagcauccagcugaucaacaaggccgugaacgcccugaucaacgaccagcucaucaugaagaaccaccuccgggacaucaugggcauccccuacugcaacuacuccaaguacugcuaccugaaccacacggugaccgggaagaccagccugccccgcugcugccuggucuccaacggcagcuaccugaacgagacccacuucuccgacgacaucgagcagcaggccgacaacaugaucacggagaugcuccagaaggaguacauggaccggcagggcaagaccccgcuggggcugguggaccuguucguguucagcaccuccuucuaccucaucagcaucuuccugcaccuggucaagauccccacccaccgccacgugaucggcaagcccugccccaagccgcaccggcucaaccacauggggaucugcuccugcggccuguacaagcaccccggggugcccgucaaguggaagcgcugaggacuaguaauaaggaaacuguaugaaugucugugggcaggaagugaagagauccuucuguaaagguuuuuggaauuaugucugcugaauaauaaacuuuuuugaaauaauaaaucugguagaaaaaugagaucucaaaggcucuuuucagagccaccaaaaaaaaaaaaaaaaaaaaaaaaaaaaaaaaaaaaaaaaaaaaaaaaaaaaaaaaaaaaaaaaagaauu

SEQ ID NO: 32407 - RNA, 1778 nt, Artificial Sequence
  mRNA product Design b-4 (hSL-A64-N5) comprising derived and/or modified sequence from LASV(LASV237-NIG-2010;Clade II)__AIT17638__GPCmut7 (opt1)
aggagagucccgcagucggcguccagcggcucugcuuguucgugugugugucguugcaggccuuauucaagcuuaccaugggccagaucaucaccuucuuccaggaggugccccacgucaucgaggaggugaugaacaucgugcugaucgcccucagccugcuggccauccucaaggggaucuacaacgucgcgaccugcggccuguucgggcugguguccuuccuccugcugugcggccgcagcugcuccacgaccuacaaggggguguacgagcuccagacccuggagcuggacauggccagccucaacaugaccaugccgcuguccugcacgaagaacaacagccaccacuacaucauggucggcaacgagaccggccuggagcucacccugaccaacacguccaucaucaaccacaaguucugcaaccugagcgacgcccacaagaaggaccucuacgaccacgcccugauguccaucaucagcaccuuccaccuguccauccccaacuucaaccaguacgaggccaugagcugcgacuucaacgggggcaagaucuccgugcaguacaaccucagccacaccuacgcgguggacgccgccaaccacugcgggaccaucgccaacggcguccugcagacguucaugcggauggcguggggcggguccuacaucgcccuggacagcggcaagggguccugggacugcaucaugaccagcuaccaguaccucaucauccagaacaccaccugggaggaccacugccaguucucccgccccagccccaucggcuaccuggggcugcucagccagcggacgcgcgacaucuacaucucccggcgccugcugggcaccuucaccuggacccucagcgacuccgagggcaacgagacgcccgggggcuacugccugacccgguggaugcugaucgaggccgagcucaagugcuucgggaacaccgccguggccaagugcaacgagaagcacgacgaggaguucugcgacaugcugcgccuguucgacuucaacaagcaggcgauccggcgccucaagaccccggcccagaugagcauccagcugaucaacaaggccgugaacgcccugaucaacgaccagcucaucaugaagaaccaccuccgggacaucaugggcauccccuacugcaacuacuccaaguacugcuaccugaaccacacggucaccgggaagaccagccugccccgcugcugccugguguccaacggcagcuaccugaacgagacccacuucuccgacgacaucgagcagcaggccgacaacaugaucacggagcuccugcagaaggaguacauggaccggcagggcaagaccccgcuggggcugguggaccucuucgucuucagcaccuccuucuaccugaucagcaucuuccugcaccucaucaagauccccacccaccgccacaucacgggcaagcccugccccaagccgcaccggcugaaccacauggggaucugcuccugcggccuguacaagcaccccggggugcccgugaaguggaagcgcugaggacuaguaauaaggaaacuguaugaaugucugugggcaggaagugaagagauccuucuguaaagguuuuuggaauuaugucugcugaauaauaaacuuuuuugaaauaauaaaucugguagaaaaaugagaucucaaaggcucuuuucagagccaccaaaaaaaaaaaaaaaaaaaaaaaaaaaaaaaaaaaaaaaaaaaaaaaaaaaaaaaaaaaaaaaaagaauu

SEQ ID NO: 32408 - RNA, 1778 nt, Artificial Sequence
  mRNA product Design b-4 (hSL-A64-N5) comprising derived and/or modified sequence from LASV(LASV253-NIG-2011;Clade II)__AIT17670__GPCmut7 (opt1)
aggagagucccgcagucggcguccagcggcucugcuuguucgugugugugucguugcaggccuuauucaagcuuaccaugggccagaucaucaccuucuuccaggaggugccccacgucaucgaggaggugaugaacaucgugcugaucgcccucagccugcuggccauccucaaggggaucuacaacgucgcgaccugcggccuguucgggcugguguccuuccuccugcugugcggccgcagcugcuccacgaccuacaaggggguguacgagcuccagacccuggagcuggacauggccagccucaacaugaccaugccgcuguccugcacgaagaacaacagccaccacuacaucauggucggcaacgagaccggccuggagcucacccugaccaacacguccaucaucaaccacaaguucugcaaccugagcgacgcccacaagaagaaccucuacgaccacgcccugauguccaucaucagcaccuuccaccuguccauccccaacuucaaccaguacgaggccaugagcugcgacuucaacgggggcaagaucuccgugcaguacaaccucagccacaccuacgcgguggacgccgccaaccacugcgggaccaucgccaacggcguccugcagacguucaugcggauggcguggggcggguccuacaucgcccuggacagcggcaagggguccugggacugcaucaugaccagcuaccaguaccucaucauccagaacaccaccugggaggaccacugccaguucucccgccccagccccaucggcuaccuggggcugcucagccagcggacgcgcgacaucuacaucucccggcgccugcugggcaccuucaccuggacccucagcgacuccgagggcaacgagacgcccgggggcuacugccugacccgguggaugcugaucgaggccgagcucaagugcuucgggaacaccgccguggccaagugcaacgagaagcacgacgaggaguucugcgacaugcugcgccuguucgacuucaacaagcaggcgauccggcgccucaaggccccggcccagaugagcauccagcugaucaacaaggccgugaacgcccugaucaacgaccagcucaucaugaagaaccaccuccgggacaucaugggcauccccuacugcaacuacuccaaguacugcuaccugaaccacaccgucacggggcgcaccagccugccccggugcugccugguguccaacggcagcuaccugaacgagacccacuucuccgacgacaucgagcagcaggcggacaacaugaucaccgagcuccugcagaaggaguacaucgaccgccagggcaagacgccgcuggggcugguggaccucuucgucuucagcaccuccuucuaccugaucagcaucuuccugcaccucgugaagauccccacccaccggcacaucaucggcaagcccugccccaagccgcaccgccugaaccacauggggaucugcuccugcggccuguacaagcaccccggggugcccgucaaguggaagcggugaggacuaguaauaaggaaacuguaugaaugucugugggcaggaagugaagagauccuucuguaaagguuuuuggaauuaugucugcugaauaauaaacuuuuuugaaauaauaaaucugguagaaaaaugagaucucaaaggcucuuuucagagccaccaaaaaaaaaaaaaaaaaaaaaaaaaaaaaaaaaaaaaaaaaaaaaaaaaaaaaaaaaaaaaaaaagaauu

SEQ ID NO: 32409 - RNA, 1778 nt, Artificial Sequence
  mRNA product Design b-4 (hSL-A64-N5) comprising derived and/or modified sequence from LASV(LASV254-NIG-2011;Clade II)__AIT17674__GPCmut7 (opt1)
aggagagucccgcagucggcguccagcggcucugcuuguucgugugugugucguugcaggccuuauucaagcuuaccaugggccagaucaucaccuucuuccaggaggugccccacgucaucgaggaggugaugaacaucgugcugaucgcccucagccugcuggccauccucaaggggaucuacaacgucgcgaccugcggccuguucgggcugguguccuuccuccugcugugcggccgcagcugcuccacgaccuacaaggggguguacgagcuccagacccuggagcuggacaugaccaaccucaacaugacgaugccgcugagcugcaccaagaacaacucccaccacuacaucauggucggcaacgagaccggccuggagcucacccugacgaacaccagcaucaucaaccacaaguucugcaaccuguccgacgcccacaagaagaaccucuacaaccacgcccugaugagcaucaucuccaccuuccaccugagcauccccaacuucaaccaguacgaggccauguccugcgacuucaacgggggcaagaucagcgugcaguacaaccucucccacagcuacgccguggacgcggccaaccacugcgggaccaucgccaacggcguccugcagacguucaugcggauggccuggggcggguccuacaucgcgcuggacagcggcaaggggaacugggacugcaucaugaccuccuaccaguaccucaucauccagaacaccaccugggaggaccacugccaguucagccgccccucccccaucggcuaccuggggcugcucagccagcggacgcgcgacaucuacaucagccggcgccugcugggcaccuucaccuggacccucuccgacagcgagggcaacgagacgcccgggggcuacugccugacccgguggaugcugaucgaggccgagcucaagugcuucgggaacaccgccguggccaagugcaacgagaagcacgacgaggaguucugcgacaugcugcgccuguucgacuucaacaagcaggccauccggcgccucaagaccccggcgcaggccaacauccagcugaucaacaaggccgugaacgcccugaucaacgaccagcucaucaugaagaaccaccuccgggacaucaugggcauccccuacugcaacuacuccaaguacugcuaccugaaccacacggucaccgggaagaccagccugccccgcugcugccugguguccaacggcagcuaccugaacgagacccacuucuccgacgacaucgagcagcaggccgacaacaugaucacggagcuccugcagaaggaguacauggaccggcagggcaagaccccgcuggggcugguggaccucuucgucuucagcaccuccuucuaccugaucagcaucuuccugcaccucgugaagauccccacccaccgccacgugaucggcaagcccugccccaagccgcaccggcugaaccacauggggaucugcuccugcggccuguacaagcaccccgggguccccgugaaguggaagcgcugaggacuaguaauaaggaaacuguaugaaugucugugggcaggaagugaagagauccuucuguaaagguuuuuggaauuaugucugcugaauaauaaacuuuuuugaaauaauaaaucugguagaaaaaugagaucucaaaggcucuuuucagagccaccaaaaaaaaaaaaaaaaaaaaaaaaaaaaaaaaaaaaaaaaaaaaaaaaaaaaaaaaaaaaaaaaagaauu

SEQ ID NO: 32410 - RNA, 1778 nt, Artificial Sequence
  mRNA product Design b-4 (hSL-A64-N5) comprising derived and/or modified sequence from LASV(Nig08-A19;Clade III)__ADU56618__GPCmut7 (opt1)
aggagagucccgcagucggcguccagcggcucugcuuguucgugugugugucguugcaggccuuauucaagcuuaccaugggccagaucgugaccuucuuccaggaggucccccacgugaucgaggaggugaugaacaucguccugaucgcccucagcauccuggccauccugaaggggcucuacaacaucgcgaccugcggccugaucgggcuggugacguuccuccugcuguccggccgcagcugcuccaugaccuacaaggggguguacgagcuccagacccuggagcugaacaugaacacccucaacaugacgaugccgcugagcugcaccaagaacaacucccaccacuacaucauggucggcaacgagaccggccuggagcucacccugacgaacaccagccugcuccaccacaaguucugcaaccuguccgacgcccacaagaagaaccuguacgaccacacccucaugagcaucaucuccaccuuccaccugagcauccccaacuucaaccaguacgaggccauguccugcgacuucaacgggggcaagaucacggugcaguacaaccugagccacuccuacgccaucgacgccgcgaaccacugcgggaccguggccaacggcguccuccagaccuucaugcggauggccuggggcgggagcuacaucgcccuggacuccggccgcgggaagugggacugcaucaugaccagcuaccaguaccugaucauccagaacacgaccugggaggaccacugccaguucucccggcccagccccaucggcuaccucgggcugcugucccagcgcacccgggacaucuacaucagccgccggcuccugggcaccuucacguggacccugagcgacuccgagggcaacgagacccccgggggcuacugccucacccgcuggaugcugaucgaggcggagcugaagugcuucgggaacacggccguggccaagugcaacgagaagcacgacgaggaguucugcgacaugcuccggcuguucgacuucaacaagcaggccauccgccggcugaaggccccggcgcagaugagcauccagcucaucaacaaggccgugaacgcccugaucaacgaccagcugaucaugaagaaccaccuccgcgacaucaugggcauccccuacugcaacuacuccaaguacugcuaccugaaccacaccagcaccgggcggaccucccugccccgcugcugccucgucagcaacggcuccuaccugaacgagacgcacuucagcgacgacaucgagcagcaggccgacaacaugaucaccgagaugcugcagaaggaguaccuggaccggcagggcaagaccccgcucgggcugguggaccuguucguguucuccaccagcuucuaccucaucuccaucuuccugcaccuggucaagauccccacgcaccgccacaucgugggcaagcccugccccaagccgcaccggcucaaccacauggggaucugcagcugcggccuguacaagcagcccggggugcccguccgcuggaagcggugaggacuaguaauaaggaaacuguaugaaugucugugggcaggaagugaagagauccuucuguaaagguuuuuggaauuaugucugcugaauaauaaacuuuuuugaaauaauaaaucugguagaaaaaugagaucucaaaggcucuuuucagagccaccaaaaaaaaaaaaaaaaaaaaaaaaaaaaaaaaaaaaaaaaaaaaaaaaaaaaaaaaaaaaaaaaagaauu

SEQ ID NO: 32411 - RNA, 1781 nt, Artificial Sequence
  mRNA product Design b-4 (hSL-A64-N5) comprising derived and/or modified sequence from LASV(G1180-SLE-2010;Clade IV)__AIT17168__GPCmut7 (opt1)
aggagagucccgcagucggcguccagcggcucugcuuguucgugugugugucguugcaggccuuauucaagcuuaccaugggccagaucgugaccuucuuccaggaggucccccacgugaucgaggaggugaugaacaucguccugaucgcccucagcauccuggccgugcugaaggggcucuacaacuucgcgaccugcggccugguggggcugcucacguuccugcugcucugcggccgcuccugcaccgccagccgguacaagggggucuacgagcugcagacccuggagcucaacauggagacccugaacaugacgaugccgcuguccugcaccaagaacaacagccaccacuacaucauggugggcaacgagaccggccucgagcugacccugacgaacaccuccaucaucaaccacaaguucugcaaccucagcgacgcccacaagaagaaccuguacgaccacgcccugauguccaucaucagcaccuuccaccucuccauccccaacuucaaccaguacgaggccaugagcugcgacuucaacgggggcaagaucuccgugcaguacaaccugagccacuccuacgcgggggacgccgccaaccacugcggcaccgucgccaacggggugcugcagacguucaugcgcauggcguggggcggcagcuacaucgcccucgacuccgggcacggcagcugggacugcaucaugaccuccuaccaguaccugaucauccagaacaccaccugggaggaccacugccaguucagccggcccucccccaucggguaccugggccuccugagccagcgcacgcgggacaucuacaucagccgccggcugcucggcaccuucaccuggacccuguccgacagcgaggggaaggacacgccgggcggguacugccugacccgcuggaugcucaucgaggccgagcugaagugcuucggcaacaccgccguggccaagugcaacgagaagcacgacgaggaguucugcgacaugcugcggcuguucgacuucaacaagcaggcgauccagcgccugaaggcccccgcccagauguccauccagcugaucaacaaggccgucaacgcccucaucaacgaccagcugaucaugaagaaccaccuccgggacaucauggggauccccuacugcaacuacagcaaguacugcuaccucaaccacaccacgaccggcaagaccucccugcccaagugcugccuggugagcaacggcuccuaccucaacgagacccacuucagcgacgacaucgagcagcaggcggacaacaugaucacggagaugcugcagaaggaguacauggagcgccaggggaagaccccgcugggccugguggaccucuucgucuucuccaccagcuucuaccugaucuccaucuuccugcaccucgugaagauccccacccaccggcacaucgugggcaagagcugccccaagccccaccgccugaaccacauggggaucugcuccugcgggcuguacaagcagccgggcguccccgugaaguggaagcggugaggacuaguaauaaggaaacuguaugaaugucugugggcaggaagugaagagauccuucuguaaagguuuuuggaauuaugucugcugaauaauaaacuuuuuugaaauaauaaaucugguagaaaaaugagaucucaaaggcucuuuucagagccaccaaaaaaaaaaaaaaaaaaaaaaaaaaaaaaaaaaaaaaaaaaaaaaaaaaaaaaaaaaaaaaaaagaauu

SEQ ID NO: 32412 - RNA, 1781 nt, Artificial Sequence
  mRNA product Design b-4 (hSL-A64-N5) comprising derived and/or modified sequence from LASV(G1442-SLE-2011;Clade IV)__AIT17180__GPCmut7 (opt1)
aggagagucccgcagucggcguccagcggcucugcuuguucgugugugugucguugcaggccuuauucaagcuuaccaugggccagaucgugaccuucuuccaggaggucccccacgugaucgaggaggugaugaacaucguccugaucgcccucagcauccuggccgugcugaaggggcucuacaacguggcgaccugcggccugaucgggcuggucacguuccuccugcugugcggccgcuccugcaccaccacccucuacaaggggguguacgagcugcagacgcuggagcucaacauggagacccugaacaugaccaugccgcugagcugcaccaagaacaacucccaccacuacauccgggugggcaacgagacgggccucgagcugacccugaccaacaccagcaucaucaaccacaaguucugcaaccucuccgacgcccacaagaagaaccuguacgaccacgcccugaugagcaucaucuccacguuccaccucagcauccccaacuucaaccaguacgaggccauguccugcgacuucaacgggggcaagaucagcguccaguacaaccugucccacagcuacgccggggacgcggccaaccacugcggcaccguggccaacggggugcugcagaccuucaugcgcauggccuggggcggcuccuacaucgcgcucgacagcgggcggggcaacugggacugcaucaugaccuccuaccaguaccugaucauccagaacacgaccugggacgaccacugccaguucagccgccccucccccaucggguaccugggccuccugagccagcggacccgcgacgucuacaucucccggcgccugcucggcaccuucacguggacccugagcgacagcgaggggaaggacaccccgggcggguacugccugacccgguggaugcucaucgaggccgagcugaagugcuucggcaacacggccguggccaagugcaacgagaagcacgacgaggaguucugcgacaugcugcgccucuucgacuucaacaagcaggccauccagcggcugaaggcgcccgcccagauguccauccagcugaucaacaaggccgugaacgcccucaucaacgaccagcugaucaugaagaaccaccuccgcgacaucauggggauccccuacugcaacuacagcaaguacugcuaccugaacaacaccgccaccggcaagaccucccugcccaagugcugccugaucagcaacggcuccuaccucaacgagacgcacuucagcgacgacaucgagcaggaggcggacaacaugaucaccgagaugcugcagaaggaguacauggagcggcaggggaagaccccgcugggccuggucgaccucuucguguucuccaccagcuucuaccugaucuccaucuuccugcaccucgugaagauccccacgcaccgccacaucgucggcaagagcugccccaagccccaccggcugaaccacauggggaucugcuccugcgggcuguacaagcagccgggcgugcccgugcgcuggaagcggugaggacuaguaauaaggaaacuguaugaaugucugugggcaggaagugaagagauccuucuguaaagguuuuuggaauuaugucugcugaauaauaaacuuuuuugaaauaauaaaucugguagaaaaaugagaucucaaaggcucuuuucagagccaccaaaaaaaaaaaaaaaaaaaaaaaaaaaaaaaaaaaaaaaaaaaaaaaaaaaaaaaaaaaaaaaaagaauu

SEQ ID NO: 32413 - RNA, 1781 nt, Artificial Sequence
  mRNA product Design b-4 (hSL-A64-N5) comprising derived and/or modified sequence from LASV(G3010-SLE-2013;Clade IV)__AIT17344__GPCmut7 (opt1)
aggagagucccgcagucggcguccagcggcucugcuuguucgugugugugucguugcaggccuuauucaagcuuaccaugggccagaucgugaccuucuuccaggaggucccccacgugaucgaggaggugaugaacaucguccugaucgcccucagcauccuggccgugcugaaggggcucuacaacuucgcgaccugcggccugguggggcuggucacguuccuccugcugugcggccgcuccugcaccaccagccucuacaaggggguguacgagcugcagacccuggagcucaacauggagacgcugaacaugaccaugccgcuguccugcaccaagaacaacagccaccacuacaucauggugggcaacgagaccggccucgagcugacgcugaccaacaccuccaucaucaaccacaaguucugcaaccucagcgacgcccacaagaagaaccuguacaaccacgcccugauguccaucaucagcaccuuccaccucuccauccccaacuucaaccaguacgaggccaugagcugcgacuucaacgggggcaagaucuccguccaguacaaccugagccacuccuacgccggggacgcggccagccacugcggcacgguggccaacggggugcugcagaccuucaugcggauggccuggggcggcuccuacaucgcgcucgacagcggguacggcaagugggacugcaucaugaccuccuaccaguaccugaucauccagaacaccacgugggaggaccacugccaguucagccgccccucccccaucggguaccugggccuccugagccagcggacccgcgacaucuacaucagccggcgccugcucggcaccuucaccuggacgcuguccgacagcgaggggaaggacaccccgggcggguacugccugacccgguggaugcucaucgaggccgagcugaagugcuucggcaacaccgccgucgccaagugcaacgagaagcacgacgaggaguucugcgacaugcugcgccucuucgacuucaacaagcaggccauccagcggcugaagacgcccgcgcagauguccauccagcugaucaacaaggccgugaacgcccucaucaacgaccagcugaucaugaagaaccaccuccgcgacaucauggggauccccuacugcaacuacagcaaguacugcuaccugaaccacaccaccaccggcaagacgucccugcccaagugcugccuggugagcaacggcuccuaccucaacgagacccacuucagcgacgacaucgagcagcaggccgacaacaugaucaccgagaugcugcagaaggaguacauggagcggcaggggaagaccccgcugggccuggucgaccucuucguguucuccacgagcuucuaccugaucuccaucuuccugcaccucgugaagauccccacccaccgccacaucgucggcaagagcugccccaagccccaccggcugaaccacauggggaucugcuccugcgggcuguacaagcagccgggcgugcccgugcgcuggaagcggugaggacuaguaauaaggaaacuguaugaaugucugugggcaggaagugaagagauccuucuguaaagguuuuuggaauuaugucugcugaauaauaaacuuuuuugaaauaauaaaucugguagaaaaaugagaucucaaaggcucuuuucagagccaccaaaaaaaaaaaaaaaaaaaaaaaaaaaaaaaaaaaaaaaaaaaaaaaaaaaaaaaaaaaaaaaaagaauu

SEQ ID NO: 32414 - RNA, 1781 nt, Artificial Sequence
  mRNA product Design b-4 (hSL-A64-N5) comprising derived and/or modified sequence from LASV(G502-SLE-2009;Clade IV)__AIT17126__GPCmut7 (opt1)
aggagagucccgcagucggcguccagcggcucugcuuguucgugugugugucguugcaggccuuauucaagcuuaccaugggccagaucgugaccuucuuccaggaggucccccacgugaucgaggaggugaugaacaucguccugaucgcccucagcauccuggccgugcugaaggggcucuacaacuucgcgaccugcggccugguggggcugcucacguuccugcugcucugcggccgcuccugcaccaccgggcuguacaagggcgucuacgagcugcagacccucgagcugaacauggagacgcugaacaugaccaugccgcucagcugcaccaagaacaacucccaccacuacaucauggugggcaacgagaccgggcuggagcugacgcucaccaacaccagcaucaucaaccacaaguucugcaaccuguccgacgcccacaagaagaaccuguacgaccacgcccucaugagcaucaucuccaccuuccaccugagcauccccaacuucaaccaguacgaggccauguccugcgacuucaacggcgggaagaucagcgugcaguacaaccugucccacagcuacgccggcgacgcggccgaccacugcgggacggucgccaacggcgugcuccagaccuucaugcggauggccuggggcggguccuacaucgcgcuggacagcggccgcgggcggugggacugcaucaugaccuccuaccaguaccugaucauccagaacaccacgugggaggaccacugccaguucagccgccccucccccaucggcuaccucggccugcugagccagcggacccgcgacaucuacaucucccggcgccuccuggggaccuucaccuggacgcugagcgacagcgagggcaaggacacccccgggggcuacugccucacccgguggaugcugaucgaggccgagcugaagugcuucgggaacaccgccguggccaagugcaacgagaagcacgacgaggaguucugcgacaugcuccgccuguucgacuucaacaagcaggccauccagcggcugaaggcgccggcccagauguccauccagcucaucaacaaggccgucaacgcccugaucaacgaccagcuggugaugaagaaccaccuccgcgacaucaugggcauccccuacugcaacuacagccgguacugcuaccugaaccacacgaccaccggccgcaccucccugcccaagugcugccucgugagcaacggguccuaccugaacgagacgcacuucagcgacgacaucgagcagcaggccgacaacaugaucaccgagaugcugcagaaggaguacauggagcggcagggcaagaccccgcuggggcucgucgaccuguucguguucuccaccagcuucuaccugaucuccaucuuccuccaccuggugaagauccccacgcaccgccacaucgucggcaagagcugccccaagccccaccggcugaaccacauggggaucugcuccugcggccucuacaagcagccgggcgugcccgugaaguggaagcgcugaggacuaguaauaaggaaacuguaugaaugucugugggcaggaagugaagagauccuucuguaaagguuuuuggaauuaugucugcugaauaauaaacuuuuuugaaauaauaaaucugguagaaaaaugagaucucaaaggcucuuuucagagccaccaaaaaaaaaaaaaaaaaaaaaaaaaaaaaaaaaaaaaaaaaaaaaaaaaaaaaaaaaaaaaaaaagaauu

SEQ ID NO: 32415 - RNA, 1781 nt, Artificial Sequence
  mRNA product Design b-4 (hSL-A64-N5) comprising derived and/or modified sequence from LASV(G733-SLE-2010;Clade IV)__AIT17154__GPCmut7 (opt1)
aggagagucccgcagucggcguccagcggcucugcuuguucgugugugugucguugcaggccuuauucaagcuuaccaugggccagaucgugaccuucuuccaggaggucccccacgugaucgaggaggugaugaacaucguccugaucgcccucagcauccuggccgugcugaaggggcucuacaacuucgcgaccugcggcaucguggggcuggucuccuuccugcuccugugcggccgcagcugcacgaccucccuguacaaggggguguacgagcuccagacccuggagcugaacauggagacccucaacaugacgaugccgcugagcugcaccaagaacaacucccaccacuacaucauggugggcaacgagaccggccuggagcucacccugacgaacaccagcaucaucaaccacaaguucugcaaccuguccgacgcccacaagaagaaccucuacgaccacgcccugaugagcaucaucuccaccuuccaccugagcauccccaacuucaaccaguacgaggccauguccugcgacuucaacgggggcaagaucagcguccaguacaaccucucccacagcuacgccggggacgcggccaaccacugcggcaccaucgccaacggggugcugcagacguucaugcggauggccuggggcggcuccuacaucgcgcuggacagcgggcgcgaccggugggacugcaucaugaccuccuaccaguaccucaucauccagaacaccaccugggaggaccacugccaguucagccgccccucccccaucggcuaccuggggcugcucagccagcggacgcgcgacaucuacaucagccggcgccugcugggcaccuucaccuggacccucuccgacagcgagggcaaggacacgcccgggggcuacugccugacccgguggaugcugaucgaggccgagcucaagugcuucgggaacaccgccguggccaagugcaacgagaagcacgacgaggaguucugcgacaugcugcgccuguucgacuucaacaagcaggccauccagcggcucaaggcgccggcccagauguccauccagcugaucaacaaggccgucaacgcccugaucaacgaccagcucaucaugaagaaccaccuccgcgacaucaugggcauccccuacugcaacuacagcaaguacugcuaccugaaccacaccacgaccgggaagaccucccugcccaagugcugccuggugagcaacggcuccuaccugaacgagacccacuucagcgacgacaucgagcagcaggccgacaacaugaucacggagaugcuccagaaggaguacauggagcggcagggcaagaccccgcuggggcugguggaccuguucgucuucuccaccagcuucuaccucaucuccaucuuccugcaccuggugaagauccccacccaccgccacguggucggcaagagcugccccaagccccaccggcucaaccacauggggaucugcuccugcggccuguacgggcagccgggcgugcccgugaaguggaagcgcugaggacuaguaauaaggaaacuguaugaaugucugugggcaggaagugaagagauccuucuguaaagguuuuuggaauuaugucugcugaauaauaaacuuuuuugaaauaauaaaucugguagaaaaaugagaucucaaaggcucuuuucagagccaccaaaaaaaaaaaaaaaaaaaaaaaaaaaaaaaaaaaaaaaaaaaaaaaaaaaaaaaaaaaaaaaaagaauu

SEQ ID NO: 32416 - RNA, 1781 nt, Artificial Sequence
  mRNA product Design b-4 (hSL-A64-N5) comprising derived and/or modified sequence from MOPV/LASV reassortant(IGS-1;Clade IV)__AFY05576__GPCmut7 (opt1)
aggagagucccgcagucggcguccagcggcucugcuuguucgugugugugucguugcaggccuuauucaagcuuaccaugggccagaucgugaccuucuuccaggaggucccccacgugaucgaggaggugaugaacaucguccugaucgcccucagcgugcuggccgugcugaaggggcucuacaacuucgcgaccugcggccuggucgggcuggugacguuccuccugcugugcggccgcuccugcaccaccagccucuacaaggggguguacgagcugcagacccuggagcucaacauggagacgcugaacaugaccaugccgcuguccugcaccaagaacaacagccaccacuacaucauggucggcaacgagaccggccucgagcugacgcugaccaacaccuccaucaucaaccacaaguucugcaaccucagcgacgcccacaagaagaaccuguacgaccacgcccugauguccaucaucagcaccuuccaccucuccauccccaacuucaaccaguacgaggccaugagcugcgacuucaacgggggcaagaucuccgugcaguacaaccugagccacuccuacgccggggacgcggccaaccacugcggcacgguggccaacgggguccugcagaccuucaugcggauggccuggggcggcagcuacaucgcgcucgacuccgggcgcggcaacugggacugcaucaugaccagcuaccaguaccugaucauccagaacaccacgugggaggaccacugccaguucucccggcccagccccaucggguaccugggccuccugucccagcgcacccgggacaucuacaucagccgccggcugcucggcaccuucaccuggacgcugagcgacuccgagggggaggacaccccgggcggguacugccugacccgcuggaugcucaucgaggccgagcugaagugcuucggcaacaccgccguggccaagugcaacgagaagcacgacgaggaguucugcgacaugcugcggcuguucgacuucaacaagcaggccauccagcgccugaaggcgcccgcccagaugagcauccagcugaucaacaaggccgugaacgcccucaucaacgaccagcugaucaugaagaaccaccuccgggacaucauggggauccccuacugcaacuacuccaaguacugcuaccucaaccacacgaccaccggccgcaccagccugcccaagugcugccuggucuccaacggcagcuaccucaacgagacgcacuucuccgacgacaucgagcagcaggccgacaacaugaucaccgagaugcugcagaaggaguacauggagcggcaggggaagaccccgcugggccugguggaccucuucguguucagcaccuccuucuaccugaucagcaucuuccugcaccucgucaagauccccacgcaccgccacaucguggggaaguccugccccaagccccaccggcugaaccacaugggcaucugcagcugcgggcuguacaagcagccgggcgugcccgucaaguggaagcgcugaggacuaguaauaaggaaacuguaugaaugucugugggcaggaagugaagagauccuucuguaaagguuuuuggaauuaugucugcugaauaauaaacuuuuuugaaauaauaaaucugguagaaaaaugagaucucaaaggcucuuuucagagccaccaaaaaaaaaaaaaaaaaaaaaaaaaaaaaaaaaaaaaaaaaaaaaaaaaaaaaaaaaaaaaaaaagaauu

SEQ ID NO: 32417 - RNA, 1781 nt, Artificial Sequence
  mRNA product Design b-4 (hSL-A64-N5) comprising derived and/or modified sequence from LASV(LM765-SLE-2012;Clade IV)__AIT17814__GPCmut7 (opt1)
aggagagucccgcagucggcguccagcggcucugcuuguucgugugugugucguugcaggccuuauucaagcuuaccaugggccagaucgugaccuucuuccaggaggucccccacgugaucgaggaggugaugaacaucguccugaucgcccucagcauccuggccgugcugaaggggcucuacaacuucgcgaccugcggccugguggggcuggucacguuccuccugcugugcggccgcuccugcaccaccagccucuacaaggggguguacgagcugcagacccuggagcucaacauggagacgcugaacaugaccaugccgcuguccugcaccaagaacaacagccaccacuacaucauggugggcaacgagaccggccucgagcugacgcugaccaacaccuccaucaucgaccacaaguucugcaaccucagcgacgcccaccggaagaaccuguacgaccacgcccugauguccaucaucagcaccuuccaccucuccauccccaacuucaaccaguacgaggccaugagcugcgacuucaacgggggcaagaucuccguccaguacaaccugagccacuccuacgccaaggacgcggccgaccacugcgggacgguggccaacggcgugcugcagaccuucaugcgcauggccuggggcgggagcuacaucgcgcucgacuccggccgggggcgcugggacugcaucaugaccagcuaccaguaccugaucauccagaacaccacgugggaggaccacugccaguucucccggcccagccccaucggcuaccuggggcuccugucccagcgcacccgggacaucuacaucagccgccggcugcucggcaccuucaccuggacgcugagcgacuccgagggcaaggacacccccgggggcuacugccugacccgcuggaugcucaucgaggccgagcugaagugcuucgggaacaccgccgucgccaagugcaacgagaagcacgacgaggaguucugcgacaugcugcggcuguucgacuucaacaagcaggccauccagcgccugaaggcgccggcccagaugagcauccagcugaucaacaaggccgugaacgcccucaucaacgaccagcugaucaugaagaaccaccuccgggacaucaugggcauccccuacugcaacuacuccaaguacugcuaccucaaccacacgaccaccgggaagaccagccugcccaagugcugccugguguccaacggcagcuaccucaacgagacgcacuucuccgacgacaucgagcagcaggccgacaacaugaucaccgagaugcugcagaaggaguacauggagcgccagggcaagaccccgcuggggcuggucgaccucuucguguucagcaccuccuucuaccugaucagcaucuuccugcaccucgugaagauccccacgcaccggcacaucgucggcaagcccugccccaagccgcaccgccugaaccacauggggaucugcuccugcggccuguacaagcagcccggggugcccgugaaguggaagcggugaggacuaguaauaaggaaacuguaugaaugucugugggcaggaagugaagagauccuucuguaaagguuuuuggaauuaugucugcugaauaauaaacuuuuuugaaauaauaaaucugguagaaaaaugagaucucaaaggcucuuuucagagccaccaaaaaaaaaaaaaaaaaaaaaaaaaaaaaaaaaaaaaaaaaaaaaaaaaaaaaaaaaaaaaaaaagaauu

SEQ ID NO: 32418 - RNA, 1781 nt, Artificial Sequence
  mRNA product Design b-4 (hSL-A64-N5) comprising derived and/or modified sequence from LASV(LM776-SLE-2012;Clade IV)__AIT17824__GPCmut7 (opt1)
aggagagucccgcagucggcguccagcggcucugcuuguucgugugugugucguugcaggccuuauucaagcuuaccaugggccagaucgugaccuucuuccaggaggucccccacgugaucgaggaggugaugaacaucguccugaucgcccucagcauccuggccgugcugaaggggcucuacaacuucgcgaccugcggccugguggggcuggucacguuccuccugcugugcggccgcuccugcaccaccagcguguacaaggggguguacgagcuccagacccuggagcugaacauggagacgcucaacaugaccaugccgcuguccugcaccaagaacaacagccaccacuacaucauggucggcaacgagaccggccuggagcucacgcugaccaacaccuccaucaucaaccacaaguucugcaaccugagcgacgcccacaagaagaaccucuacgaccacgcccugauguccaucaucagcaccuuccaccuguccauccccaacuucaaccaguacgaggccaugagcugcgacuucaacgggggcaagaucuccgugcaguacaaccucagccacuccuacgccggggacgcggccaaccacugcggcacgguggccaacgggguccugcagaccuucaugcggauggccuggggcggcagcuacaucgcgcuggacuccgggcacggcaagugggacugcaucaugaccagcuaccaguaccucaucauccagaacaccacgugggaggaccacugccaguucucccgccccagccccaucggguaccugggccugcucucccagcggacccgcgacaucuacaucagccggcgccugcugggcaccuucaccuggacgcucagcgacuccgaggggaaggacaccccgggcggguacugccugacccgguggaugcugaucgaggccgagcucaagugcuucggcaacaccgccguggccaagugcaacgagaagcacgacgaggaguucugcgacaugcugcgccuguucgacuucaacaagcaggccauccagcggcucaaggcgcccgcccagaugagcauccagcugaucaacaaggccgugaacgcccugaucaacgaccagcucaucaugaagaaccaccuccgcgacaucauggggauccccuacugcaacuacuccaaguacugcuaccugaaccacacgaccaccggcaagaccagccugcccaagugcugccuggucuccaacggcagcuaccugaacgagacgcacuucuccgacgacaucgagcagcaggccgacaacaugaucaccgagaugcuccagaaggaguacauggagcggcaggggaagaccccgcugggccugguggaccuguucguguucagcaccuccuucuaccucaucagcaucuuccugcaccuggucaagauccccacgcaccgccacaucguggggaaguccugccccaagccccaccggcucaaccacaugggcaucugcagcugcgggcuguacaagcagccgggcgugcccguccgcuggaagcggugaggacuaguaauaaggaaacuguaugaaugucugugggcaggaagugaagagauccuucuguaaagguuuuuggaauuaugucugcugaauaauaaacuuuuuugaaauaauaaaucugguagaaaaaugagaucucaaaggcucuuuucagagccaccaaaaaaaaaaaaaaaaaaaaaaaaaaaaaaaaaaaaaaaaaaaaaaaaaaaaaaaaaaaaaaaaagaauu

SEQ ID NO: 32419 - RNA, 1781 nt, Artificial Sequence
  mRNA product Design b-4 (hSL-A64-N5) comprising derived and/or modified sequence from LASV(Mad39;Clade IV)__ANH09722__GPCmut7 (opt1)
aggagagucccgcagucggcguccagcggcucugcuuguucgugugugugucguugcaggccuuauucaagcuuaccaugggccagaucgugaccuucuuccaggaggucccccacgugaucgaggaggugaugaacaucguccugaucgcccucagcauccuggccgugcugaaggggcucuacaacguggcgaccugcggccugaucgggcuggucacguuccuccugcugugcggccgcuccugcaccaccacccucuacaaggggguguacgagcugcaggcccuggagcucaacauggagacgcugaacaugaccaugccgcugagcugcaccaagaacaacucccaccacuacauccgggugggcaacgagaccggccucgagcugacgcugaccaacaccagccucaucaaccacaaguucugcaaccuguccgacgcccacaagaagaaccuguacgaccacgcccucaugagcaucaucuccaccuuccaccugagcauccccaacuucaaccaguacgaggccauguccugcgacuucaacgacgggaagaucagcguccaguacaaccugucccacacguacgcgggcgacaccgccaaccacugcgggaccguggccaacggcgugcuccagaccuucaugcgcauggccuggggcgggagcuacaucgcgcuggacuccggccgcgggggcugggacugcaucaugacgagcuaccaguaccugaucauccagaacaccaccugggaggaccacugccaguucucccggcccagccccaucggguaccucggccugcugucccagcggacccgcgacaucuacaucagccggcgccuccugggcacguucaccuggacccuguccgacagcgaggggaaggacaccccgggcggguacugccucacgcgguggaugcugaucgaggccgagcugaagugcuucggcaacaccgccgucgccaagugcaacgagaagcacgacgaggaguucugcgacaugcuccgccuguucgacuucaacaagcaggccauccagcggcugaaggcgcccgcccagaugagcauccagcucaucaacaaggccgugaacgcccugaucaacgaccagcugaucaugaagaaccaccuccgcgacaucauggggauccccuacugcaacuacuccaaguacugcuaccugaaccacaccgugaccggcaagacgagccugcccaagugcugccucgucuccaacggcagcuaccugaacgagacccacuucuccgacgacaucgagcagcaggccgacaacaugaucaccgagaugcugcagaaggaguacauggagcggcaggggaagaccccgcugggccucguggaccuguucguguucagcacguccuucuaccugaucagcaucuuccuccaccuggucaagauccccacccaccgccacgugguggggaagcccugccccaagccgcaccggcugaaccacaugggcaucugcuccugcggguucuacaagcagcccggcguccccgugcgcuggaagcggugaggacuaguaauaaggaaacuguaugaaugucugugggcaggaagugaagagauccuucuguaaagguuuuuggaauuaugucugcugaauaauaaacuuuuuugaaauaauaaaucugguagaaaaaugagaucucaaaggcucuuuucagagccaccaaaaaaaaaaaaaaaaaaaaaaaaaaaaaaaaaaaaaaaaaaaaaaaaaaaaaaaaaaaaaaaaagaauu

SEQ ID NO: 32420 - RNA, 1781 nt, Artificial Sequence
  mRNA product Design b-4 (hSL-A64-N5) comprising derived and/or modified sequence from LASV(Z0947-SLE-2011;Clade IV)__AIT17840__GPCmut7 (opt1)
aggagagucccgcagucggcguccagcggcucugcuuguucgugugugugucguugcaggccuuauucaagcuuaccaugggccagaucgugaccuucuuccaggaggucccccacgugaucgaggaggugaugaacaucguccugaucgcccucagcauccuggccgugcugaaggggcucuacaacuucgcgaccugcggccugguggggcuggucacguuccuccugcugugcggccgcuccugcaccaucagccucuacaaggggguguacgagcugcagacccuggagcucaacauggagacccugaacaugacgaugccgcuguccugcaccaagaacaacagccaccacuacaucauggugggcaacgagaccggccucgagcugacccugacgaacaccuccaucaucaaccacaaguucugcaaccucagcgacgcccacaagaagaaccuguacgaccacgcccugauguccaucaucagcaccuuccaccucuccauccccaacuucaaccaguacgaggccaugagcugcgacuucaacgggggcaagaucuccguccaguacaaccugagccacuccuacgccggggacgcggccaaccacugcggcaccguggccaacggggugcugcagacguucaugcggauggccuggggcggcagcuacaucgcgcucgacuccgggcgcgaccggugggacugcaucaugaccagcuaccaguaccugaucauccagaacaccaccugggaggaccacugccaguucucccgccccagccccaucggcuaccuggggcuccugucccagcggacgcgcgacaucuacaucagccggcgccugcucggcaccuucaccuggacccugagcgacuccgagggcaaggacacgcccgggggcuacugccugacccgguggaugcucaucgaggccgagcugaagugcuucgggaacaccgccgucgccaagugcaacgagaagcacgacgaggaguucugcgacaugcugcgccucuucgacuucaacaagcaggccauccagcggcugaaggcgccggcccagaugagcauccagcugaucaacaaggccgugaacgcccucaucaacgaccagcugaucaugaagaaccaccuccgcgacaucaugggcauccccuacugcaacuacuccaaguacugcuaccugaaccacaccacgaccgggaagaccagccugcccaagugcugccugguguccaacggcagcuaccucaacgagacccacuucuccgacgacaucgagcagcaggccgacaacaugaucacggagaugcugcagaaggaguacauggagcggcagggcaagaccccgcuggggcuggucgaccucuucguguucagcaccuccuucuaccugaucagcaucuuccugcaccucgugaagauccccacccaccgccacaucgucggcaagcccugccccaagccgcaccggcugaaccacauggggaucugcuccugcggccuguacaagcagcccggggugcccgugaaguggaagcgcugaggacuaguaauaaggaaacuguaugaaugucugugggcaggaagugaagagauccuucuguaaagguuuuuggaauuaugucugcugaauaauaaacuuuuuugaaauaauaaaucugguagaaaaaugagaucucaaaggcucuuuucagagccaccaaaaaaaaaaaaaaaaaaaaaaaaaaaaaaaaaaaaaaaaaaaaaaaaaaaaaaaaaaaaaaaaagaauu

SEQ ID NO: 32421 - RNA, 1781 nt, Artificial Sequence
  mRNA product Design b-4 (hSL-A64-N5) comprising derived and/or modified sequence from LASV(Josiah;Clade IV)__NP_694870__GPCmut7 (opt4)
aggagagucccgcagucggcguccagcggcucugcuuguucgugugugugucguugcaggccuuauucaagcuuaccaugggccagaucgugaccuucuuccaggaggugccccacgugaucgaggaggugaugaacaucgugcugaucgcccugagcgugcuggccgugcugaagggccuguacaacuucgccaccugcggccuggugggccuggugaccuuccugcugcugugcggcagaagcugcaccaccagccuguacaagggcguguacgagcugcagacccuggagcugaacauggagacccugaacaugaccaugccccugagcugcaccaagaacaacagccaccacuacaucauggugggcaacgagaccggccuggagcugacccugaccaacaccagcaucaucaaccacaaguucugcaaccugagcgacgcccacaagaagaaccuguacgaccacgcccugaugagcaucaucagcaccuuccaccugagcauccccaacuucaaccaguacgaggccaugagcugcgacuucaacggcggcaagaucagcgugcaguacaaccugagccacagcuacgccggcgacgccgccaaccacugcggcaccguggccaacggcgugcugcagaccuucaugagaauggccuggggcggcagcuacaucgcccuggacagcggcagaggcaacugggacugcaucaugaccagcuaccaguaccugaucauccagaacaccaccugggaggaccacugccaguucagcagacccagccccaucggcuaccugggccugcugagccagagaaccagagacaucuacaucagcagaagacugcugggcaccuucaccuggacccugagcgacagcgagggcaaggacacccccggcggcuacugccugaccagauggaugcugaucgaggccgagcugaagugcuucggcaacaccgccguggccaagugcaacgagaagcacgacgaggaguucugcgacaugcugagacuguucgacuucaacaagcaggccauccagagacugaaggcccccgcccagaugagcauccagcugaucaacaaggccgugaacgcccugaucaacgaccagcugaucaugaagaaccaccugagagacaucaugggcauccccuacugcaacuacagcaaguacugcuaccugaaccacaccaccaccggcagaaccagccugcccaagugcugccuggugagcaacggcagcuaccugaacgagacccacuucagcgacgacaucgagcagcaggccgacaacaugaucaccgagaugcugcagaaggaguacauggagagacagggcaagaccccccugggccugguggaccuguucguguucagcaccagcuucuaccugaucagcaucuuccugcaccuggugaagauccccacccacagacacaucgugggcaagagcugccccaagccccacagacugaaccacaugggcaucugcagcugcggccuguacaagcagcccggcgugcccgugaaguggaagagaugaggacuaguaauaaggaaacuguaugaaugucugugggcaggaagugaagagauccuucuguaaagguuuuuggaauuaugucugcugaauaauaaacuuuuuugaaauaauaaaucugguagaaaaaugagaucucaaaggcucuuuucagagccaccaaaaaaaaaaaaaaaaaaaaaaaaaaaaaaaaaaaaaaaaaaaaaaaaaaaaaaaaaaaaaaaaagaauu

SEQ ID NO: 32422 - RNA, 1778 nt, Artificial Sequence
  mRNA product Design b-4 (hSL-A64-N5) comprising derived and/or modified sequence from LASV(LP;Clade I)__AAF86701__GPCmut7 (opt4)
aggagagucccgcagucggcguccagcggcucugcuuguucgugugugugucguugcaggccuuauucaagcuuaccaugggccagaucaucaccuucuuccaggaggugccccacgugaucgaggaggugaugaacaucgugcugaucgcccugagccugcuggccauccugaagggccuguacaacaucgccaccugcggcaucaucggccugguggccuuccuguuccugugcggcaagagcugcagccugacccugaagggcggcuacgagcugcagacccuggagcugaacauggagacccugaacaugaccaugccccugagcugcaccaagaacagcagccaccacuacaucagagugggcaacgagaccggccuggagcugacccugaccaacaccagcaucaucaaccacaaguucugcaaccugagcgacgcccacaagaagaaccuguacgaccacgcccugaugagcaucaucagcaccuuccaccugagcauccccaacuucaaccaguacgaggccaugagcugcgacuucaacggcggcaagaucagcgugcaguacaaccugagccacagcuacgccggcgacgccgccgagcacugcggcaccguggccaacggcgugcugcagaccuucaugagaauggccuggggcggcagauacaucgcccuggacagcggcaagggcaacugggacugcaucaugaccagcuaccaguaccugaucauccagaacaccaccugggaggaccacugccaguucagcagacccagccccaucggcuaccugggccugcugagccagagaaccagagacaucuacaucagcagaagacugcugggcaccuucaccuggacccugagcgacagcgagggcaacgagacccccggcggcuacugccugaccagauggaugcugaucgaggccgagcugaagugcuucggcaacaccgccguggccaagugcaacgagaagcacgacgaggaguucugcgacaugcugagacuguucgacuucaacaagcaggccaucagaagacugaaggcccccgcccagaugagcauccagcugaucaacaaggccgugaacgcccugaucaacgaccagcugaucaugaagaaccaccugagagacaucaugggcauccccuacugcaacuacagcaaguacugcuaccugaaccacaccagcagcggcagaaccagccugcccaagugcugccugaucagcaacggcagcuaccugaacgagacccaguucagcgacgacaucgagcagcaggccgacaacaugaucaccgagaugcugcagaaggaguacaucgagagacagggcaagaccccccugggccugguggacaucuucaucuucagcaccagcuucuaccugaucagcaucuuccugcaccugaucaagauccccacccacagacacaucgugggcaagcccugccccaagccccacagacugaaccacaugggcgugugcagcugcggccuguacaagcaccccggcgugcccaccaaguggaagagaugaggacuaguaauaaggaaacuguaugaaugucugugggcaggaagugaagagauccuucuguaaagguuuuuggaauuaugucugcugaauaauaaacuuuuuugaaauaauaaaucugguagaaaaaugagaucucaaaggcucuuuucagagccaccaaaaaaaaaaaaaaaaaaaaaaaaaaaaaaaaaaaaaaaaaaaaaaaaaaaaaaaaaaaaaaaaagaauu

SEQ ID NO: 32423 - RNA, 1778 nt, Artificial Sequence
  mRNA product Design b-4 (hSL-A64-N5) comprising derived and/or modified sequence from LASV(803213;Clade II)__AAF86703__GPCmut7 (opt4)
aggagagucccgcagucggcguccagcggcucugcuuguucgugugugugucguugcaggccuuauucaagcuuaccaugggccagaucaucaccuucuuccaggaggugccccacgugaucgaggaggugaugaacaucgugcugaucgcccugagccugcuggccauccugaagggcaucuacaacguggccaccugcggccuguucggccugaucagcuuccugcugcugugcggcagaagcugcagcgugaccuacaagggcguguacgagcugcagacccuggagcugaacauggccaaccugaacaugaccaugccccugagcugcaccaagaacaacagccaccacuacaucauggugggcaacgagaccggccuggagcugacccugaccaacaccagcaucaucaaccacaaguucugcaaccugagcgacgcccacaagaagaaccuguacgaccacgcccugaugagcaucaucagcaccuuccaccugagcauccccaacuucaaccaguacgaggccaugagcugcgacuucaacggcggcaagaucagcgugcaguacaaccugagccacagcuucgccguggacgccgccaaccacugcggcaccaucgccaacggcgugcugcagaccuucaugagaauggccuggggcggcagcuacaucgcccuggacagcggcaagggcaacugggacugcaucaugaccagcuaccaguaccugaucauccagaacaccaccugggaggaccacugccaguucagcagacccagccccaucggcuaccugggccugcugagccagagaaccagagacaucuacaucagcagaagacugcugggcaccuucaccuggacccugagcgacagcgagggcaacgaggcccccggcggcuacugccugaccagauggaugcugaucgaggccgagcugaagugcuucggcaacaccgccguggccaagugcaacgagaagcacgacgaggaguucugcgacaugcugagacuguucgacuucaacaagcaggccaucaagagacugaagacccccgcccagaugagcauccagcugaucaacaaggccgugaacgcccugaucaacgaccagcugaucaugaagaaccaccugagagacaucaugggcauccccuacugcaacuacagcagauacugcuaccugaaccacaccgugaccggcaagaccagccugcccagaugcugccuggugagcaacggcagcuaccugaacgagacccacuucagcgacgacaucgagcagcaggccgacaacaugaucaccgagaugcugcagaaggaguacauggacagacagggcaagaccccccugggccugguggaccuguucguguucagcaccagcuucuaccugaucagcaucuuccugcaccuggugaagauccccacccacagacacaucgugggcaagcccugccccaagccccacagacugaaccacaugggcaucugcagcugcggccuguacaagcaccccggcgugcccgugaaguggaagagaugaggacuaguaauaaggaaacuguaugaaugucugugggcaggaagugaagagauccuucuguaaagguuuuuggaauuaugucugcugaauaauaaacuuuuuugaaauaauaaaucugguagaaaaaugagaucucaaaggcucuuuucagagccaccaaaaaaaaaaaaaaaaaaaaaaaaaaaaaaaaaaaaaaaaaaaaaaaaaaaaaaaaaaaaaaaaagaauu

SEQ ID NO: 32424 - RNA, 1778 nt, Artificial Sequence
  mRNA product Design b-4 (hSL-A64-N5) comprising derived and/or modified sequence from LASV(GA391;Clade III)__CAA36645__GPCmut7 (opt4)
aggagagucccgcagucggcguccagcggcucugcuuguucgugugugugucguugcaggccuuauucaagcuuaccaugggccagaucgugaccuucuuccaggaggugccccacgugaucgaggaggugaugaacaucgugcugaucgcccugagcauccuggccauccugaagggccuguacaacguggccaccugcggccugaucggccuggugaccuuccugcugcugagcggcagaagcugcagccugaucuacaagggcaccuacgagcugcagacccuggagcugaacauggagacccugaacaugaccaugccccugagcugcaccaagaacaacagccaccacuacaucagagugggcaacgagaccggccuggagcugacccugaccaacaccagcauccugaaccacaaguucugcaaccugagcgacgcccacaagagaaaccuguacgaccacagccugaugagcaucaucagcaccuuccaccugagcauccccaacuucaaccaguacgaggccaugagcugcgacuucaacggcggcaagaucaccgugcaguacaaccugagccacagcuucgccguggacgccgccggccacugcggcacccuggccaacggcgugcugcagaccuucaugagaauggccuggggcggcagcuacaucgcccuggacagcggcagaggcaacugggacugcaucaugaccagcuaccaguaccugaucauccagaacaccaccugggacgaccacugccaguucagcagacccagccccaucggcuaccugggccugcugagccagagaaccagagacaucuacaucagcagaagacugcugggcaccuucaccuggacccugagcgacagcgagggcaacgagacccccggcggcuacugccugaccagauggaugcugaucgaggccgagcugaagugcuucggcaacaccgccguggccaagugcaacgagaagcacgacgaggaguucugcgacaugcugagacuguucgacuucaacaagcaggccaucagaagacugaagacccccgcccagaugagcauccagcugaucaacaaggccgugaacgcccugaucaacgaccagcugaucaugaagaaccaccugagagacaucaugggcauccccuacugcaacuacagcagauacugcuaccugaaccacaccagcaccggcaagaccagccugcccagaugcugccugaucagcaacggcagcuaccugaacgagaccaaguucagcgacgacaucgagcagcaggccgacaacaugaucaccgagaugcugcagaaggaguacaucgacagacagggcaagaccccccugggccugguggaccuguucguguucagcaccagcuucuaccugaucagcaucuuccugcaccuggugaagauccccacccacagacacaucgugggcaagcccugccccaagccccacagacugaaccacaugggcaucugcagcugcggccuguacaagcagcccggcgugcccgugagauggaagagaugaggacuaguaauaaggaaacuguaugaaugucugugggcaggaagugaagagauccuucuguaaagguuuuuggaauuaugucugcugaauaauaaacuuuuuugaaauaauaaaucugguagaaaaaugagaucucaaaggcucuuuucagagccaccaaaaaaaaaaaaaaaaaaaaaaaaaaaaaaaaaaaaaaaaaaaaaaaaaaaaaaaaaaaaaaaaagaauu

SEQ ID NO: 32425 - RNA, 1781 nt, Artificial Sequence
  mRNA product Design b-4 (hSL-A64-N5) comprising derived and/or modified sequence from LASV(AV;Clade V)__CCA30314__GPCmut7 (opt4)
aggagagucccgcagucggcguccagcggcucugcuuguucgugugugugucguugcaggccuuauucaagcuuaccaugggccagaucgugaccuucuuccaggaggugccccacgugaucgaggaggugaugaacaucgugcugaucgcccugagcauccuggccgugcugaagggccuguacaacaucgccaccugcggccugaucggccugaucaccuuccugcugcugugcggcagaagcugcagcagcaaccuguacaagggcguguacgagcugcagagccuggaccugaacauggagacccugaacaugaccaugccccugagcugcaccaagaacaacagccaccacuacaucagagugggcaacgacaccggccuggagcugacccugaccaacaccagcauccugaaccacaaguucugcaaccugagcgacgcccacaagaaggaccuguacgaccacgcccugaugagcaucaucagcaccuuccaccugagcauccccaacuucaaccaguacgaggccaugagcugcgacuucaacggcggcaagaucagcgugcaguacaaccugagccacagcuacgccaucgacgccgccaaccacugcggcaccguggccaacggcauccugcagaccuucaugagaauggccuggggcggcagcuacaucgcccuggacagcggcagaggcaacugggacugcaucaugaccagcuaccaguaccugaucauccagaacaccaccugggagaaccacugccaguucagcagacccagccccaucggcuaccugggccugcugagccagagaaccagagacaucuacaucagcagaagacugcugggcaccuucaccuggacccugagcgacagcgagggcaacgccacccccggcggcuacugccugaccagauggaugcugaucgaggccgagcugaagugcuucggcaacaccgccguggccaagugcaacgagaagcacgacgaggaguucugcgacaugcugagacuguucgacuucaacaagcaggccaucagcagacugaagagccccgcccagaugagcauccagcugaucaacaaggccgugaacgcccugaucaacgaccagcugaucaugaagaaccaccugagagacaucaugggcauccccuacugcaacuacagcaaguacugcuaccugaaccacaccaucaccggcaagaccagccugcccaagugcugccuggugagcaacggcagcuaccugaacgagacccacuucagcgacgacaucgagcagcaggccgacaacaugaucaccgagaugcugcagaaggaguacauggagagacagggcaagaccccccugggccugguggaccuguucguguucagcaccagcuucuaccugaucagcaucuuccugagacuggugaagauccccacccacagacacaucgugggcaagcccugccccaagccccacagacugaaccacaugggcaucugcagcugcggccuguacaagcagcccggcgugcccgugagauggaagagaugaggacuaguaauaaggaaacuguaugaaugucugugggcaggaagugaagagauccuucuguaaagguuuuuggaauuaugucugcugaauaauaaacuuuuuugaaauaauaaaucugguagaaaaaugagaucucaaaggcucuuuucagagccaccaaaaaaaaaaaaaaaaaaaaaaaaaaaaaaaaaaaaaaaaaaaaaaaaaaaaaaaaaaaaaaaaagaauu

SEQ ID NO: 32426 - RNA, 1778 nt, Artificial Sequence
  mRNA product Design b-4 (hSL-A64-N5) comprising derived and/or modified sequence from LASV(Togo/2016/7082;Clade VI)__AMR44577__GPCmut7 (opt4)
aggagagucccgcagucggcguccagcggcucugcuuguucgugugugugucguugcaggccuuauucaagcuuaccaugggccagaucaucaccuucuuccaggaggugccccacgugaucgaggaggugaugaacaucgugcugaucgcccugagccugcuggccauccugaagggcguguacaacguggccaccugcggcaucaucggccuggugaccuuccuguuccugugcggcagaagcugcagccugaucuacaagggcagcuacgagcugcagacccuggagcugaacauggagacccugaacaugaccaugccccugagcugcaccaagaacagcagccaccacuacaucagagugggcaacgagaccggccuggagcugacccugaccaacaccagcaucaucaaccacaaguucugcaaccugagcgacgcccacaagagaaaccuguacgaccacgcccugaugagcauccugagcaccuuccaccugagcauccccaacuucaaccaguacgaggccaugagcugcgacuucaacggcggcaagaucagcgugcaguacaaccugagccacgccuacgccguggacgccgccgagcacugcggcaccguggccaacggcgugcugcagaccuucaugagaauggccuggggcggcagcuacaucgcccuggacagcggcagaggcaacugggacugcaucaugaccagcuaccaguaccugaucauccagaacaccaccugggaggaccacugccaguucagcagacccagccccaucggcuaccugggccugcugagccagagaaccagagacaucuacaucagcagaagacugcugggcaccuucaccuggacccugagcgacagcgagggcaacgagacccccggcggcuacugccugaccagauggaugcugaucgaggccgagcugaagugcuucggcaacaccgccguggccaagugcaacgagaagcacgacgaggaguucugcgacaugcugagacuguucgacuucaacaagcaggccauccagagacugaagagccccgcccagaugagcauccagcugaucaacaaggccgugaacgcccugaucaacgaccagcugaucaugaagaaccaccugagagacaugaugggcauccccuacugcaacuacagcaaguacugcuaccugaaccacaccagcagcggcagaaccagccugcccaagugcugccuggugagcaacggcagcuaccugaacgagacccacuucagcgacgacaucgagcagcaggccgacaacaugaucaccgagaugcugcagaaggaguacaucgacagacagggcaagaccccccugggccugguggaccuguucguguucagcaccagcuucuaccugaucagcaucuuccugcaccugaucaagauccccacccacagacacaucgugggcaagcccugccccaagccccacagacugaaccacaugggcaucugcagcugcggccuguacaagcagcccggcgugcccaccagauggaagagaugaggacuaguaauaaggaaacuguaugaaugucugugggcaggaagugaagagauccuucuguaaagguuuuuggaauuaugucugcugaauaauaaacuuuuuugaaauaauaaaucugguagaaaaaugagaucucaaaggcucuuuucagagccaccaaaaaaaaaaaaaaaaaaaaaaaaaaaaaaaaaaaaaaaaaaaaaaaaaaaaaaaaaaaaaaaaagaauu

SEQ ID NO: 32427 - RNA, 1778 nt, Artificial Sequence
  mRNA product Design b-4 (hSL-A64-N5) comprising derived and/or modified sequence from LASV(KAK-428;Clade n.d. (VII))__ANH09740__GPCmut7 (opt4)
aggagagucccgcagucggcguccagcggcucugcuuguucgugugugugucguugcaggccuuauucaagcuuaccaugggccagaucgugaccuucuuccaggaggugccccacgugaucgaggaggugaugaacaucgugcugaucgcccugagccugcuggccauccugaagggccuguacaacuucgccaccugcggcgugaucggccugaucaccuuccugcugcugugcggcagaagcugcagcgccaccuacaagggccaguacgagcugcagacccuggagcugaacauggagagccugaacaugaccaugccccugagcugcaccaagaacaacagccaccacuacaucagagccggcaacaacaccggccuggagcugacccugaccaacaccagcaucaucagccacaaguucugcaaccugagcgacgcccacaagaagaaccuguacgaccacacccugaugagcaucaucaccaccuuccaccugagcauccccaacuucaaccaguacgaggccaugagcugcgacuucaacggcggcaagaucagcauccaguacaaccugagccacagcuacgccggcgacgccgcccagcacugcggcaccguggccaacggcgugcugcagaccuucaugagaauggccuggggcggcagcuaccuggcccuggacagcggcagaagaggcugggacugcaucaucagcagcuaccaguaccugaucauccagaacaccaccugggacgaccacugccaguucagcagacccagccccaucggcuaccugggcuucgugagccagaagaccagagacaucuacaucagcagaagacugcugggcaccuucaccuggacccugagcgacagcgagggccacgacaugcccggcggcuacugccugaccagauggaugcugaucgaggccgaccugaagugcuucggcaacaccgccguggccaagugcaacgagaagcacgacgaggaguucugcgacauguggagacuguucgacuucaacaagcaggccauccagagacugaaggcccccgcccagaugaacauccagcugaucaacaaggccgugaacgcccugaucaacgaccagcugaugaugaagaaccaccugagagacaucaugggcauccccuacugcaacuacagcaaguucugcuaccugaacaacaccaccaccggcagaaccagccugcccagaugcugccugaucagcaacggcagcuaccugaacgagacccacuucagcgacgacaucgagcagcaggccgacaacaugaucaccgagaugcugcagaaggaguacauggacagacagggcaagaccccccugggccugguggaccuguucguguucagcaccagcuucuaccugaucaccaucuuccugcaccuggugaagauccccacccacagacacaucgugggcaagcccugccccaagccccacagacugaaccacaugggcaucugcagcugcggccuguacaagcagcccggcgugcccgugagauggaagagaugaggacuaguaauaaggaaacuguaugaaugucugugggcaggaagugaagagauccuucuguaaagguuuuuggaauuaugucugcugaauaauaaacuuuuuugaaauaauaaaucugguagaaaaaugagaucucaaaggcucuuuucagagccaccaaaaaaaaaaaaaaaaaaaaaaaaaaaaaaaaaaaaaaaaaaaaaaaaaaaaaaaaaaaaaaaaagaauu

SEQ ID NO: 32428 - RNA, 1778 nt, Artificial Sequence; identical to SEQ ID NO: 32422
  mRNA product Design b-4 (hSL-A64-N5) comprising derived and/or modified sequence from LASV(Pinneo-NIG-1969;Clade I)__AIT17836__GPCmut7 (opt4)

SEQ ID NO: 32429 - RNA, 1778 nt, Artificial Sequence
  mRNA product Design b-4 (hSL-A64-N5) comprising derived and/or modified sequence from LASV(ISTH0009-NIG-2011;Clade II)__AIT17404__GPCmut7 (opt4)
aggagagucccgcagucggcguccagcggcucugcuuguucgugugugugucguugcaggccuuauucaagcuuaccaugggccagaucaucaccuucuuccaggaggugccccacgugaucgaggaggugaugaacaucgugcugaucgcccugagccugcuggccauccugaagggcaucuacaacguggccaccugcggccuguucggccuggugagcuuccugcugcugugcggcagaagcugcagcaccaccuacaagggcguguacgagcugcagacccuggagcuggacauggccagccugaacaugaccaugccccugagcugcaccaagaacaacagccaccacuacaucauggugggcaacgagaccggccuggagcugacccugaccaacaccagcaucaucaaccacaaguucugcaaccugagcgacgcccacaagaagaaccuguacgaccacgcccugaugagcaucaucagcaccuuccaccugagcauccccaacuucaaccaguacgaggccaugagcugcgacuucaacggcggcaagaucagcgugcaguacaaccugagccacgccuacgccguggacgccgccaaccacugcggcaccaucgccaacggcgugcugcagaccuucaugagaauggccuggggcggcagcuacaucgcccuggacagcggcaagggcagcugggacugcaucaugaccagcuaccaguaccugaucauccagaacaccaccugggaggaccacugccaguucagcagacccagccccaucggcuaccugggccugcugagccagagaaccagagacaucuacaucagcagaagacugcugggcaccuucaccuggacccugagcgacagcgagggcaacgagacccccggcggcuacugccugaccagauggaugcugaucgaggccgagcugaagugcuucggcaacaccgccguggccaagugcaacgagaagcacgacgaggaguucugcgacaugcugagacuguucgacuucaacaagcaggccaucagaagacugaagacccccgcccagaugagcauccagcugaucaacaaggccgugaacgcccugaucaacgaccagcugaucaugaagaaccaccugagagacaucaugggcauccccuacugcaacuacagcaaguacugcuaccugaaccacaccgugaccggcaagaccagccugcccagaugcugccuggugagcaacggcagcuaccugaacgagacccacuucagcgacgacaucgagcagcaggccgacaacaugaucaccgagcugcugcagaaggaguacauggacagacagggcaagaccccccugggccugguggaccuguucguguucagcaccagcuucuaccugaucagcaucuuccugcaccugaucaagauccccacccacagacacaucaccggcaagcccugccccaagccccacagacugaaccacaugggcaucugcagcugcggccuguacaagcaccccggcgugcccgugaaguggaagagaugaggacuaguaauaaggaaacuguaugaaugucugugggcaggaagugaagagauccuucuguaaagguuuuuggaauuaugucugcugaauaauaaacuuuuuugaaauaauaaaucugguagaaaaaugagaucucaaaggcucuuuucagagccaccaaaaaaaaaaaaaaaaaaaaaaaaaaaaaaaaaaaaaaaaaaaaaaaaaaaaaaaaaaaaaaaaagaauu

SEQ ID NO: 32430 - RNA, 1778 nt, Artificial Sequence
  mRNA product Design b-4 (hSL-A64-N5) comprising derived and/or modified sequence from LASV(ISTH2010-NIG-2012;Clade II)__AIT17482__GPCmut7 (opt4)
aggagagucccgcagucggcguccagcggcucugcuuguucgugugugugucguugcaggccuuauucaagcuuaccaugggccagaucaucaccuucuuccaggaggugccccacgugaucgaggaggugaugaacaucgugcugaucgcccugagccugcuggccauccugaagggcaucuacaacguggccaccugcggccuguucggccuggugagcuuccugcugcugugcggcagaagcugcagcaccaccuacaagggcguguacgagcugcagacccuggagcuggacauggccagccugaacaugaccaugccccugagcugcaccaagaacaacagccaccacuacaucauggugggcaacgagaccggccuggagcugacccugaccaacaccagcaucaucaaccacaaguucugcaaccugagcgacgcccacaagaagaaccuguacgaccacgcccugaugagcaucaucagcaccuuccaccugagcauccccaacuucaaccaguacgaggccaugagcugcgacuucaacggcggcaagaucagcgugcaguacaaccugagccacgccuacgccguggacgccgccaaccacugcggcaccaucgccaacggcgugcugcagaccuucaugagaauggccuggggcggcagcuacaucgcccuggacagcggcaagggcagcugggacugcaucaugaccagcuaccaguaccugaucauccagaacaucaccugggaggaccacugccaguucagcagacccagccccaucggcuaccugggccugcugagccagagaaccagagacaucuacaucagcagaagacugcugggcaccuucaccuggacccugagcgacagcgagggcaacgagacccccggcggcuacugccugaccagauggaugcugaucgaggccgagcugaagugcuucggcaacaccgccguggccaagugcaacgagaagcacgacgaggaguucugcgacaugcugagacuguucgacuucaacaagcaggccaucagaagacugaagacccccgcccagaugagcauccagcugaucaacaaggccgugaacgcccugaucaacgaccagcugaucaugaagaaccaccugagagacaucaugggcauccccuacugcaacuacagcaaguacugcuaccugaaccacaccgugaccggcaagaccagccugcccagaugcugccuggugagcaacggcagcuaccugaacgagacccacuucagcgacgacaucgagcagcaggccgacaacaugaucaccgagcugcugcagaaggaguacaucgacagacagggcaagaccccccugggccugguggaccuguucguguucagcaccagcuucuaccugaucagcaucuuccugcaccuggugaagauccccacccacagacacguggugggcaagcccugccccaagccccacagacugaaccacaugggcaucugcagcugcggccuguacaagcaccccggcgugcccgugaaguggaagagaugaggacuaguaauaaggaaacuguaugaaugucugugggcaggaagugaagagauccuucuguaaagguuuuuggaauuaugucugcugaauaauaaacuuuuuugaaauaauaaaucugguagaaaaaugagaucucaaaggcucuuuucagagccaccaaaaaaaaaaaaaaaaaaaaaaaaaaaaaaaaaaaaaaaaaaaaaaaaaaaaaaaaaaaaaaaaagaauu

SEQ ID NO: 32431 - RNA, 1778 nt, Artificial Sequence
  mRNA product Design b-4 (hSL-A64-N5) comprising derived and/or modified sequence from LASV(Lassa virus/H.sapiens-wt/NGA/2015/ISTH_0543;Clade II)__AVO03639__GPCmut7 (opt4)
aggagagucccgcagucggcguccagcggcucugcuuguucgugugugugucguugcaggccuuauucaagcuuaccaugggccagaucaucaccuucuuccaggaggugccccacgugaucgaggaggugaugaacaucgugcugaucgcccugagccugcuggccauccugaagggcaucuacaacguggccaccugcggccuguucggccuggugagcuuccugcugcugugcggcagaagcugcagcaccaccuacaagggcguguacgagcugcagacccuggagcuggacauggccaaccugaacaugaccaugccccugagcugcaccaagaacaacagccaccacuacaucauggugggcaacgagaccggccuggagcugacccugaccaacaccagcaucaucaaccacaaguucugcaaccugagcgacgcccacaagaagaaccuguacgaccacgcccugaugagcaucaucagcaccuuccaccugagcauccccaacuucaaccaguacgaggccaugagcugcgacuucaacggcggcaagaucagcgugcaguacaaccugagccacaccuacgccguggacgccgccaaccacugcggcaccaucgccaacggcgugcugcagaccuucaugagaauggccuggggcggcagcuacaucgcccuggacagcggcaagggcagcugggacugcaucaugaccagcuaccaguaccuggugauccagaacaccaccugggaggaccacugccaguucagcagacccagccccaucggcuaccugggccugcugagccagagaaccagagacaucuacaucagcagaagacugcugggcaccuucaccuggacccugagcgacagcgagggcaacgagacccccggcggcuacugccugaccagauggaugcugaucgaggccgagcugaagugcuucggcaacaccgccguggccaagugcaacgagaagcacgacgaggaguucugcgacaugcugagacuguucgacuucaacaagcaggccaucagaagacugaagacccccgcccagaugagcauccagcugaucaacaaggccgugaacgcccugaucaacgaccagcugaucaugaagaaccaccugagagacaucaugggcauccccuacugcaacuacagcaaguacugcuaccugaaccacaccgugaccggcaagaccagccugcccagaugcugccuggugagcaacggcagcuaccugaacgagacccacuucagcgacgacaucgagcagcaggccgacaacaugaucaccgagcugcugcagaaggaguacaucgacagacagggcaagaccccccugggccugguggaccuguucguguucagcaccagcuucuaccugaucagcaucuuccugcaccuggugaagauccccacccacagacacaucaccggcaagcccugccccaagccccacagacugaaccacaugggcaucugcagcugcggccuguacaagcaccccggcgugcccgugaaguggaagagaugaggacuaguaauaaggaaacuguaugaaugucugugggcaggaagugaagagauccuucuguaaagguuuuuggaauuaugucugcugaauaauaaacuuuuuugaaauaauaaaucugguagaaaaaugagaucucaaaggcucuuuucagagccaccaaaaaaaaaaaaaaaaaaaaaaaaaaaaaaaaaaaaaaaaaaaaaaaaaaaaaaaaaaaaaaaaagaauu

SEQ ID NO: 32432 - RNA, 1778 nt, Artificial Sequence
  mRNA product Design b-4 (hSL-A64-N5) comprising derived and/or modified sequence from LASV(Lassa virus/H.sapiens-wt/NGA/2016/ISTH_0009;Clade II)__AVO03571__GPCmut7 (opt4)
aggagagucccgcagucggcguccagcggcucugcuuguucgugugugugucguugcaggccuuauucaagcuuaccaugggccagaucaucaccuucuuccaggaggugccccacgugaucgaggaggugaugaacaucgugcugaucgcccugagccugcuggccauccugaagggcaucuacaacguggccaccugcggccugcugggccuggugagcuuccugcugcugugcggcagaagcugcagcaccaccuacaagggcguguacgagcugcagacccuggagcuggacauggccagccugaacaugaccaugccccugagcugcaccaagaacaacagccaccacuacaucauggugggcaacgagaccggccuggagcugacccugaccaacaccagcaucaucaaccacaaguucugcaaccugagcgacgcccacaagaagaaccuguacgaccacgcccugaugagcaucaucagcaccuuccaccugagcauccccaacuucaaccaguacgaggccaugagcugcgacuucaacggcggcagaaucagcgugcaguacaaccugagccacagcuacgccguggacgccgccaaccacugcggcaccaucgccaacggcgugcugcagaccuucaugagaauggccuggggcggcagcuacaucgcccuggacagcggcaagggcagcugggacugcaucaugaccagcuaccaguaccugaucauccagaacaccaccugggaggaccacugccaguucagcagacccagccccaucggcuaccugggccugcugagccagagaaccagagacaucuacaucagcagaagacugcugggcaccuucaccuggacccugagcgacagcgagggcaacgagacccccggcggcuacugccugaccagauggaugcugaucgaggccgagcugaagugcuucggcaacaccgccguggccaagugcaacgagaagcacgacgaggaguucugcgacaugcugagacuguucgacuucaacaagcaggccaucagaagacugaagacccccgcccagaugagcauccagcugaucaacaaggccgugaacgcccugaucaacgaccagcugaucaugaagaaccaccugagagacaucaugggcauccccuacugcaacuacagcaaguacugcuaccugaaccacaccgugaccggcaagaccagccugcccagaugcugccuggugagcaacggcagcuaccugaacgagacccacuucagcgacgacaucgagcagcaggccgacaacaugaucaccgagcugcugcagaaggaguacaucgacagacagggcaagaccccccugggccugguggaccuguucguguucagcaccagcuucuaccugaucagcaucuuccugcaccuggugaagauccccacccacagacacaucaccggcaagcccugccccaagccccacagacugaaccacaugggcaucugcagcugcggccuguacaaccaccccggcgugcccgugaaguggaagagaugaggacuaguaauaaggaaacuguaugaaugucugugggcaggaagugaagagauccuucuguaaagguuuuuggaauuaugucugcugaauaauaaacuuuuuugaaauaauaaaucugguagaaaaaugagaucucaaaggcucuuuucagagccaccaaaaaaaaaaaaaaaaaaaaaaaaaaaaaaaaaaaaaaaaaaaaaaaaaaaaaaaaaaaaaaaaagaauu

SEQ ID NO: 32433 - RNA, 1778 nt, Artificial Sequence
  mRNA product Design b-4 (hSL-A64-N5) comprising derived and/or modified sequence from LASV(Lassa virus/H.sapiens-wt/NGA/2016/ISTH_0017;Clade II)__AVO03567__GPCmut7 (opt4)
aggagagucccgcagucggcguccagcggcucugcuuguucgugugugugucguugcaggccuuauucaagcuuaccaugggccagaucaucaccuucuuccaggaggugccccacgugaucgaggaggugaugaacaucgugcugaucgcccugagccugcuggccauccugaagggcaucuacaacguggccaccugcggccuguucggccuggugagcuuccugcugcugugcggcagaagcugcagcaccaccuacaagggcguguacgagcugcagacccuggagcuggacauggccagccugaacaugaccaugccccugagcugcaccaagaacaacagccaccacuacaucauggugggcaacgagaccggccuggagcugacccugaccaacaccagcaucaucaaccacaaguucugcaaccugagcgacgcccacaagaagaaccuguacgaccacgcccugaugagcaucaucagcaccuuccaccugagcauccccaacuucaaccaguacgaggccaugagcugcgacuucaacggcggcaagaucagcgugcaguacaaccugagccacaccuacgccaucgacgccgccaaccacugcggcaccaucgccaacggcgugcugcagaccuucaugagaauggccuggggcggcagcuacaucgcccuggacagcggcaagggcagcugggacugcaucaugaccagcuaccaguaccugaucauccagaacaccaccugggaggaccacugccaguucagcagacccagccccaucggcuaccugggccugcugagccagagaaccagagacaucuacaucagcagaagacugcugggcaccuucaccuggacccugagcgacagcgagggcaacgagacccccggcggcuacugccugaccagauggaugcugaucgaggccgagcugaagugcuucggcaacaccgccguggccaagugcaacgagaagcacgacgaggaguucugcgacaugcugagacuguucgacuucaacaagcaggccaucagaagacugaagacccccgcccagaugagcauccagcugaucaacaaggccgugaacgcccugaucaacgaccagcugaucaugaagaaccaccugagagacaucaugggcauccccuacugcaacuacagcaaguacugcuaccugaaccacaccgugaccggcaagaccagccugcccagaugcugccuggugagcaacggcagcuaccugaacgagacccacuucagcgacgacaucgagcagcaggccgacaacaugaucaccgagcugcugcagaaggaguacauggacagacagggcaagaccccccugggccugguggaccuguucguguucagcaccagcuucuaccugaucagcaucuuccugcaccuggugagaauccccacccacagacacgugaucggcaagcccugccccaagccccacagacugaaccacaugggcaucugcagcugcggccuguacaagcaccccggcgugcccgugaaguggaagagaugaggacuaguaauaaggaaacuguaugaaugucugugggcaggaagugaagagauccuucuguaaagguuuuuggaauuaugucugcugaauaauaaacuuuuuugaaauaauaaaucugguagaaaaaugagaucucaaaggcucuuuucagagccaccaaaaaaaaaaaaaaaaaaaaaaaaaaaaaaaaaaaaaaaaaaaaaaaaaaaaaaaaaaaaaaaaagaauu

SEQ ID NO: 32434 - RNA, 1778 nt, Artificial Sequence
  mRNA product Design b-4 (hSL-A64-N5) comprising derived and/or modified sequence from LASV(Lassa virus/H.sapiens-wt/NGA/2018/ISTH_0959;Clade II)__AVV65099__GPCmut7 (opt4)
aggagagucccgcagucggcguccagcggcucugcuuguucgugugugugucguugcaggccuuauucaagcuuaccaugggccagaucaucaccuucuuccaggaggugccccacgugaucgaggaggugaugaacaucgugcugaucgcccugagccugcuggccauccugaagggcaucuacaacguggugaccugcggccuguucggccuggugagcuuccugcugcugugcggcagaagcugcagcaccaccuacaagggcguguacgagcugcagacccuggagcuggacauggccagccugaacaugaccaugccccugagcugcaccaagaacaacagccaccacuacaucauggugggcaacgagaccggccuggagcugacccugaccaacaccagcaucaucaaccacaaguucugcaaccugagcgacgcccacaagaagaaccuguacgaccacgcccugaugagcaucaucagcaccuuccaccugagcauccccaacuucaaccaguacgaggccaugagcugcgacuucaacggcggcaagaucagcgugcaguacaaccugagccacgccuacgccaucgacgccgccaaccacugcggcaccaucgccaacggcgugcugcagaccuucaugagaauggccuggggcggcagcuacaucgcccuggacagcggcaagggcagcugggacugcaucaugaccagcuaccaguaccugaucauccagaacaccaccugggaggaccacugccaguucagcagacccagccccaucggcuaccugggccugcugagccagagaaccagagacaucuacaucagcagaagacugcugggcaccuucaccuggacccugagcgacagcgagggcaacgagacccccggcggcuacugccugaccagauggaugcugaucgaggccgagcugaagugcuucggcaacaccgccguggccaagugcaacgagaagcacgacgaggaguucugcgacaugcugagacuguucgacuucaacaagcaggccaucagaagacugaagacccccgcccagaugagcauccagcugaucaacaaggccgugaacgcccugaucaacgaccagcugaucaugaagaaccaccugagagacaucaugggcauccccuacugcaacuacagcaaguacugcuaccugaaccacaccgugaccggcaagaccagccugcccagaugcugccuggugagcaacggcagcuaccugaacgagacccacuucagcgacgacaucgagcagcaggccgacaacaugaucaccgagcugcugcagaaggaguacaucgacagacagggcaagaccccccugggccugguggaccuguucguguucagcaccagcuucuaccugaucagcaucuuccugcaccuggugaagauccccacccacagacacgugaucggcaagcccugccccaagccccacagacugaaccacaugggcaucugcagcugcggccuguacaagcaccccggcgugcccgugaaguggaagagaugaggacuaguaauaaggaaacuguaugaaugucugugggcaggaagugaagagauccuucuguaaagguuuuuggaauuaugucugcugaauaauaaacuuuuuugaaauaauaaaucugguagaaaaaugagaucucaaaggcucuuuucagagccaccaaaaaaaaaaaaaaaaaaaaaaaaaaaaaaaaaaaaaaaaaaaaaaaaaaaaaaaaaaaaaaaaagaauu

SEQ ID NO: 32435 - RNA, 1778 nt, Artificial Sequence
  mRNA product Design b-4 (hSL-A64-N5) comprising derived and/or modified sequence from LASV(LASV003-NIG-2008;Clade II)__AIT17580__GPCmut7 (opt4)
aggagagucccgcagucggcguccagcggcucugcuuguucgugugugugucguugcaggccuuauucaagcuuaccaugggccagaucaucaccuucuuccaggaggugccccacgugaucgaggaggugaugaacaucgugcugaucgcccugagccugcuggccauccugaagggcaucuacaacguggccaccugcggccuguucggccuggugagcuuccugcugcugugcggcagaagcugcagcaccaccuacaagggcguguacgagcugcagacccuggagcuggacauggccagccugaacaugaccaugccccugagcugcaccaagaacaacagccaccacuacaucauggugggcaacgagaccggccuggagcugacccugaccaacaccagcaucaucaaccacaaguucugcaaccugagcgacgcccacaagaagaaccuguacgaccacgcccugaugagcaucaucagcaccuuccaccugagcauccccaacuucaaccaguacgaggccaugagcugcgacuucaacggcggcaagaucagcgugcaguacaaccugagccacaccuacgccguggacgccgccaaccacugcggcaccaucgccaacggcgugcugcagaccuucaugagaauggccuggggcggcagcuacaucgcccuggacagcggcaagggcagcugggacugcaucaugaccagcuaccaguaccugaucauccagaacaccaccugggaggaccacugccaguucagcagacccagccccaucggcuaccugggccugcugagccagagaaccagagacaucuacaucagcagaagacugcugggcaccuucaccuggacccugagcgacagcgagagcaacgagacccccggcggcuacugccugaccagauggaugcugaucgaggccgagcugaagugcuucggcaacaccgccguggccaagugcaacgagaagcacgacgaggaguucugcgacaugcugagacuguucgacuucaacaagcaggccaucagaagacugaaggcccccgcccagaugagcauccagcugaucaacaaggccgugaacgcccugaucaacgaccagcugaucaugaagaaccaccugagagacaucaugggcauccccuacugcaacuacagcaaguacugcuaccugaaccacaccgugaccggcagaaccagccugcccagaugcugccuggugagcaacggcagcuaccugaacgagacccacuucagcgacgacaucgagcagcaggccgacaacaugaucaccgagcugcugcagaaggaguacauggacagacagggcaagaccccccugggccugguggaccuguucguguucagcaccagcuucuaccugaucagcaucuuccugcaccuggugaagauccccacccacagacacgugaucggcaagcccugccccaagccccacagacugaaccacaugggcaucugcagcugcggccuguacaagcaccccggcgugcccgugaaguggaagagaugaggacuaguaauaaggaaacuguaugaaugucugugggcaggaagugaagagauccuucuguaaagguuuuuggaauuaugucugcugaauaauaaacuuuuuugaaauaauaaaucugguagaaaaaugagaucucaaaggcucuuuucagagccaccaaaaaaaaaaaaaaaaaaaaaaaaaaaaaaaaaaaaaaaaaaaaaaaaaaaaaaaaaaaaaaaaagaauu

SEQ ID NO: 32436 - RNA, 1778 nt, Artificial Sequence
  mRNA product Design b-4 (hSL-A64-N5) comprising derived and/or modified sequence from LASV(LASV035-NIG-2009;Clade II)__AIT17588__GPCmut7 (opt4)
aggagagucccgcagucggcguccagcggcucugcuuguucgugugugugucguugcaggccuuauucaagcuuaccaugggccagaucaucaccuucuuccaggaggugccccacgugaucgaggaggugaugaacaucgugcugaucgcccugagccugcuggccauccugaagggcaucuacaacguggccaccugcggccuguucggccuggugagcuuccugcugcugugcggcagaagcugcagcaccaccuacaagggcguguacgagcugcagacccuggagcuggacauggccagccugaacaugaccaugccccugagcugcaccaagaacaacagccaccacuacaucauggugggcaacgagaccggccuggagcugacccugaccaacaccagcaucaucaaccacaaguucugcaaccugagcgacgcccacaagaagaaccuguacgaccacgcccugaugagcaucaucagcaccuuccaccugagcauccccaacuucaaccaguacgaggccaugagcugcgacuucaacggcggcaagaucagcgugcaguacaaccugagccacgccuacgccguggacgccgccaaccacugcggcaccaucgccaacggcgugcugcagaccuucaugagaauggccuggggcggcagcuacaucgcccuggacagcggcaagggcagcugggacugcaucaugaccagcuaccaguaccugaucauccagaacaccaccugggaggaccacugccaguucagcagacccagccccaucggcuaccugggccugcugagccagagaaccagagacaucuacaucagcagaagacugcugggcaccuucaccuggacccugagcgacagcgagggcaacgagacccccggcggcuacugccugaccagauggaugcugaucgaggccgagcugaagugcuucggcaacaccgccguggccaagugcaacgagaagcacgacgaggaguucugcgacaugcugagacuguucgacuucaacaagcaggccaucagaagacugaaggcccccgcccagaugagcauccagcugaucaacaaggccgugaacgcccugaucaacgaccagcugaucaugaagaaccaccugagagacaucaugggcauccccuacugcaacuacagcaaguacugcuaccugaaccacaccgugaccggcaagaccagccugcccagaugcugccuggugagcaacggcagcuaccugaacgagacccacuucagcgacgacaucgagcagcaggccgacaacaugaucaccgagcugcugcagaaggaguacaucgacagacagggcaagaccccccugggccugguggaccuguucguguucagcaccagcuucuaccugaucagcaucuuccugcaccuggugaagauccccacccacagacacgugaucggcaagcccugccccaagccccacagacugaaccacaugggcaucugcagcugcggccuguacaagcaccccggcgugcccgugaaguggaagagaugaggacuaguaauaaggaaacuguaugaaugucugugggcaggaagugaagagauccuucuguaaagguuuuuggaauuaugucugcugaauaauaaacuuuuuugaaauaauaaaucugguagaaaaaugagaucucaaaggcucuuuucagagccaccaaaaaaaaaaaaaaaaaaaaaaaaaaaaaaaaaaaaaaaaaaaaaaaaaaaaaaaaaaaaaaaaagaauu

SEQ ID NO: 32437 - RNA, 1778 nt, Artificial Sequence
  mRNA product Design b-4 (hSL-A64-N5) comprising derived and/or modified sequence from LASV(LASV1000-NIG-2009;Clade II)__AIT17782__GPCmut7 (opt4)
aggagagucccgcagucggcguccagcggcucugcuuguucgugugugugucguugcaggccuuauucaagcuuaccaugggccagaucaucaccuucuuccaggaggugccccacgugaucgaggaggugaugaacaucgugcugaucgcccugagccugcuggccauccugaagggcaucuacaacguggccaccugcggccuguucggccuggugagcuuccugcugcugugcggcagaagcugcagcaccaccuacaagggcguguacgagcugcagacccuggagcuggacauggccagccugaacaugaccaugccccugagcugcaccaagaacaacagccaccacuacaucauggugggcaacgagaccggccuggagcugacccugaccaacaccagcaucaucaaccacaaguucugcaaccugagcgacgcccacaagaagaaccuguacgaccacgcccugaugagcaucaucagcaccuuccaccugagcauccccaacuucaaccaguacgaggccaugagcugcgacuucaacggcggcaagaucagcgugcaguacaaccugagccacaccuacgccguggacgccgccaaccacugcggcaccaucgccaacggcgugcugcagaccuucaugagaauggccuggggcggcagcuacaucgcccuggacagcggcaagggcagcugggacugcaucaugaccagcuaccaguaccugaucauccagaacaccaccugggaggaccacugccaguucagcagacccagccccaucggcuaccugggccugcugagccagagaaccagagacaucuacaucagcagaagacugcugggcaccuucaccuggacccugagcgacagcgagggcaacgagacccccggcggcuacugccugaccagauggaugcugaucgaggccgagcugaagugcuucggcaacaccgccguggccaagugcaacgagaagcacgacgaggaguucugcgacaugcugagacuguucgacuucaacaagcaggccaucaagagacugaagacccccgcccagaugagcauccagcugaucaacaaggccgugaacgcccugaucaacgaccagcugaucaugaagaaccaccugagagacaucaugggcauccccuacugcaacuacagcaaguacugcuaccugaaccacaccgugaccggcaagaccagccugcccagaugcugccuggugagcaacggcagcuaccugaacgagacccacuucagcgacgacaucgagcagcaggccgacaacaugaucaccgagcugcugcagaaggaguacaucgacagacagggcaagaccccccugggccugguggaccuguucguguucagcaccagcuucuaccugaucagcaucuuccugcaccuggugaagauccccacccacagacacguggugggcaagcccugccccaagccccacagacugaaccacaugggcaucugcagcugcggccuguacaagcaccccggcgugcccgugaaguggaagagaugaggacuaguaauaaggaaacuguaugaaugucugugggcaggaagugaagagauccuucuguaaagguuuuuggaauuaugucugcugaauaauaaacuuuuuugaaauaauaaaucugguagaaaaaugagaucucaaaggcucuuuucagagccaccaaaaaaaaaaaaaaaaaaaaaaaaaaaaaaaaaaaaaaaaaaaaaaaaaaaaaaaaaaaaaaaaagaauu

SEQ ID NO: 32438 - RNA, 1778 nt, Artificial Sequence
  mRNA product Design b-4 (hSL-A64-N5) comprising derived and/or modified sequence from LASV(LASV221-NIG-2010;Clade II)__AIT17624__GPCmut7 (opt4)
aggagagucccgcagucggcguccagcggcucugcuuguucgugugugugucguugcaggccuuauucaagcuuaccaugggccagaucaucaccuucuuccaggaggugccccacgugaucgaggaggugaugaacaucgugcugaucgcccugagccugcuggccauccugaagggcaucuacaacguggccaccugcggccuguucggccuggugagcuuccugcugcugugcggcagaagcugcagcaccaccuacaagggcguguacgagcugcagacccuggagcuggacauggccagccugaacaugaccaugccccugagcugcaccaagaacaacagccaccacuacaucauggugggcaacgagaccggccuggagcugacccugaccaacaccagcaucaucaaccacaaguucugcaaccugagcgacgcccacaagaagaaccuguacgaccacgcccugaugagcaucaucagcaccuuccaccugagcauccccaacuucaaccaguacgaggccaugagcugcgacuucaacggcggcaagaucagcgugcaguacaaccugagccacaccuacgccaucgacgccgccaaccacugcggcaccaucgccaacggcgugcugcagaccuucaugagaauggccuggggcggcagcuacaucgcccuggacagcggcaagggcagcugggacugcaucaugaccagcuaccaguaccugaucauccagaacaccaccugggaggaccacugccaguucagcagacccagccccaucggcuaccugggccugcugagccagagaaccagagacaucuacaucagcagaagacugcugggcaccuucaccuggacccugagcgacagcgagggcaacgagacccccggcggcuacugccugaccagauggaugcugaucgaggccgagcugaagugcuucggcaacaccgccguggccaagugcaacgagaagcacgacgaggaguucugcgacaugcugagacuguucgacuucaacaagcaggccaucagaagacugaagacccccgcccagaugagcauccagcugaucaacaaggccgugaacgcccugaucaacgaccagcugaucaugaagaaccaccugagagacaucaugggcauccccuacugcaacuacagcaaguacugcuaccugaaccacaccgugaccggcaagaccagccugcccagaugcugccuggugagcaacggcagcuaccugaacgagacccacuucagcgacgacaucgagcagcaggccgacaacaugaucaccgagaugcugcagaaggaguacauggacagacagggcaagaccccccugggccugguggaccuguucguguucagcaccagcuucuaccugaucagcaucuuccugcaccuggugaagauccccacccacagacacgugaucggcaagcccugccccaagccccacagacugaaccacaugggcaucugcagcugcggccuguacaagcaccccggcgugcccgugaaguggaagagaugaggacuaguaauaaggaaacuguaugaaugucugugggcaggaagugaagagauccuucuguaaagguuuuuggaauuaugucugcugaauaauaaacuuuuuugaaauaauaaaucugguagaaaaaugagaucucaaaggcucuuuucagagccaccaaaaaaaaaaaaaaaaaaaaaaaaaaaaaaaaaaaaaaaaaaaaaaaaaaaaaaaaaaaaaaaaagaauu

SEQ ID NO: 32439 - RNA, 1778 nt, Artificial Sequence
  mRNA product Design b-4 (hSL-A64-N5) comprising derived and/or modified sequence from LASV(LASV237-NIG-2010;Clade II)__AIT17638__GPCmut7 (opt4)
aggagagucccgcagucggcguccagcggcucugcuuguucgugugugugucguugcaggccuuauucaagcuuaccaugggccagaucaucaccuucuuccaggaggugccccacgugaucgaggaggugaugaacaucgugcugaucgcccugagccugcuggccauccugaagggcaucuacaacguggccaccugcggccuguucggccuggugagcuuccugcugcugugcggcagaagcugcagcaccaccuacaagggcguguacgagcugcagacccuggagcuggacauggccagccugaacaugaccaugccccugagcugcaccaagaacaacagccaccacuacaucauggugggcaacgagaccggccuggagcugacccugaccaacaccagcaucaucaaccacaaguucugcaaccugagcgacgcccacaagaaggaccuguacgaccacgcccugaugagcaucaucagcaccuuccaccugagcauccccaacuucaaccaguacgaggccaugagcugcgacuucaacggcggcaagaucagcgugcaguacaaccugagccacaccuacgccguggacgccgccaaccacugcggcaccaucgccaacggcgugcugcagaccuucaugagaauggccuggggcggcagcuacaucgcccuggacagcggcaagggcagcugggacugcaucaugaccagcuaccaguaccugaucauccagaacaccaccugggaggaccacugccaguucagcagacccagccccaucggcuaccugggccugcugagccagagaaccagagacaucuacaucagcagaagacugcugggcaccuucaccuggacccugagcgacagcgagggcaacgagacccccggcggcuacugccugaccagauggaugcugaucgaggccgagcugaagugcuucggcaacaccgccguggccaagugcaacgagaagcacgacgaggaguucugcgacaugcugagacuguucgacuucaacaagcaggccaucagaagacugaagacccccgcccagaugagcauccagcugaucaacaaggccgugaacgcccugaucaacgaccagcugaucaugaagaaccaccugagagacaucaugggcauccccuacugcaacuacagcaaguacugcuaccugaaccacaccgugaccggcaagaccagccugcccagaugcugccuggugagcaacggcagcuaccugaacgagacccacuucagcgacgacaucgagcagcaggccgacaacaugaucaccgagcugcugcagaaggaguacauggacagacagggcaagaccccccugggccugguggaccuguucguguucagcaccagcuucuaccugaucagcaucuuccugcaccugaucaagauccccacccacagacacaucaccggcaagcccugccccaagccccacagacugaaccacaugggcaucugcagcugcggccuguacaagcaccccggcgugcccgugaaguggaagagaugaggacuaguaauaaggaaacuguaugaaugucugugggcaggaagugaagagauccuucuguaaagguuuuuggaauuaugucugcugaauaauaaacuuuuuugaaauaauaaaucugguagaaaaaugagaucucaaaggcucuuuucagagccaccaaaaaaaaaaaaaaaaaaaaaaaaaaaaaaaaaaaaaaaaaaaaaaaaaaaaaaaaaaaaaaaaagaauu

SEQ ID NO: 32440 - RNA, 1778 nt, Artificial Sequence
  mRNA product Design b-4 (hSL-A64-N5) comprising derived and/or modified sequence from LASV(LASV253-NIG-2011;Clade II)__AIT17670__GPCmut7 (opt4)
aggagagucccgcagucggcguccagcggcucugcuuguucgugugugugucguugcaggccuuauucaagcuuaccaugggccagaucaucaccuucuuccaggaggugccccacgugaucgaggaggugaugaacaucgugcugaucgcccugagccugcuggccauccugaagggcaucuacaacguggccaccugcggccuguucggccuggugagcuuccugcugcugugcggcagaagcugcagcaccaccuacaagggcguguacgagcugcagacccuggagcuggacauggccagccugaacaugaccaugccccugagcugcaccaagaacaacagccaccacuacaucauggugggcaacgagaccggccuggagcugacccugaccaacaccagcaucaucaaccacaaguucugcaaccugagcgacgcccacaagaagaaccuguacgaccacgcccugaugagcaucaucagcaccuuccaccugagcauccccaacuucaaccaguacgaggccaugagcugcgacuucaacggcggcaagaucagcgugcaguacaaccugagccacaccuacgccguggacgccgccaaccacugcggcaccaucgccaacggcgugcugcagaccuucaugagaauggccuggggcggcagcuacaucgcccuggacagcggcaagggcagcugggacugcaucaugaccagcuaccaguaccugaucauccagaacaccaccugggaggaccacugccaguucagcagacccagccccaucggcuaccugggccugcugagccagagaaccagagacaucuacaucagcagaagacugcugggcaccuucaccuggacccugagcgacagcgagggcaacgagacccccggcggcuacugccugaccagauggaugcugaucgaggccgagcugaagugcuucggcaacaccgccguggccaagugcaacgagaagcacgacgaggaguucugcgacaugcugagacuguucgacuucaacaagcaggccaucagaagacugaaggcccccgcccagaugagcauccagcugaucaacaaggccgugaacgcccugaucaacgaccagcugaucaugaagaaccaccugagagacaucaugggcauccccuacugcaacuacagcaaguacugcuaccugaaccacaccgugaccggcagaaccagccugcccagaugcugccuggugagcaacggcagcuaccugaacgagacccacuucagcgacgacaucgagcagcaggccgacaacaugaucaccgagcugcugcagaaggaguacaucgacagacagggcaagaccccccugggccugguggaccuguucguguucagcaccagcuucuaccugaucagcaucuuccugcaccuggugaagauccccacccacagacacaucaucggcaagcccugccccaagccccacagacugaaccacaugggcaucugcagcugcggccuguacaagcaccccggcgugcccgugaaguggaagagaugaggacuaguaauaaggaaacuguaugaaugucugugggcaggaagugaagagauccuucuguaaagguuuuuggaauuaugucugcugaauaauaaacuuuuuugaaauaauaaaucugguagaaaaaugagaucucaaaggcucuuuucagagccaccaaaaaaaaaaaaaaaaaaaaaaaaaaaaaaaaaaaaaaaaaaaaaaaaaaaaaaaaaaaaaaaaagaauu

SEQ ID NO: 32441 - RNA, 1778 nt, Artificial Sequence
  mRNA product Design b-4 (hSL-A64-N5) comprising derived and/or modified sequence from LASV(LASV254-NIG-2011;Clade II)__AIT17674__GPCmut7 (opt4)
aggagagucccgcagucggcguccagcggcucugcuuguucgugugugugucguugcaggccuuauucaagcuuaccaugggccagaucaucaccuucuuccaggaggugccccacgugaucgaggaggugaugaacaucgugcugaucgcccugagccugcuggccauccugaagggcaucuacaacguggccaccugcggccuguucggccuggugagcuuccugcugcugugcggcagaagcugcagcaccaccuacaagggcguguacgagcugcagacccuggagcuggacaugaccaaccugaacaugaccaugccccugagcugcaccaagaacaacagccaccacuacaucauggugggcaacgagaccggccuggagcugacccugaccaacaccagcaucaucaaccacaaguucugcaaccugagcgacgcccacaagaagaaccuguacaaccacgcccugaugagcaucaucagcaccuuccaccugagcauccccaacuucaaccaguacgaggccaugagcugcgacuucaacggcggcaagaucagcgugcaguacaaccugagccacagcuacgccguggacgccgccaaccacugcggcaccaucgccaacggcgugcugcagaccuucaugagaauggccuggggcggcagcuacaucgcccuggacagcggcaagggcaacugggacugcaucaugaccagcuaccaguaccugaucauccagaacaccaccugggaggaccacugccaguucagcagacccagccccaucggcuaccugggccugcugagccagagaaccagagacaucuacaucagcagaagacugcugggcaccuucaccuggacccugagcgacagcgagggcaacgagacccccggcggcuacugccugaccagauggaugcugaucgaggccgagcugaagugcuucggcaacaccgccguggccaagugcaacgagaagcacgacgaggaguucugcgacaugcugagacuguucgacuucaacaagcaggccaucagaagacugaagacccccgcccaggccaacauccagcugaucaacaaggccgugaacgcccugaucaacgaccagcugaucaugaagaaccaccugagagacaucaugggcauccccuacugcaacuacagcaaguacugcuaccugaaccacaccgugaccggcaagaccagccugcccagaugcugccuggugagcaacggcagcuaccugaacgagacccacuucagcgacgacaucgagcagcaggccgacaacaugaucaccgagcugcugcagaaggaguacauggacagacagggcaagaccccccugggccugguggaccuguucguguucagcaccagcuucuaccugaucagcaucuuccugcaccuggugaagauccccacccacagacacgugaucggcaagcccugccccaagccccacagacugaaccacaugggcaucugcagcugcggccuguacaagcaccccggcgugcccgugaaguggaagagaugaggacuaguaauaaggaaacuguaugaaugucugugggcaggaagugaagagauccuucuguaaagguuuuuggaauuaugucugcugaauaauaaacuuuuuugaaauaauaaaucugguagaaaaaugagaucucaaaggcucuuuucagagccaccaaaaaaaaaaaaaaaaaaaaaaaaaaaaaaaaaaaaaaaaaaaaaaaaaaaaaaaaaaaaaaaaagaauu

SEQ ID NO: 32442 - RNA, 1778 nt, Artificial Sequence
  mRNA product Design b-4 (hSL-A64-N5) comprising derived and/or modified sequence from LASV(Nig08-A19;Clade III)__ADU56618__GPCmut7 (opt4)
aggagagucccgcagucggcguccagcggcucugcuuguucgugugugugucguugcaggccuuauucaagcuuaccaugggccagaucgugaccuucuuccaggaggugccccacgugaucgaggaggugaugaacaucgugcugaucgcccugagcauccuggccauccugaagggccuguacaacaucgccaccugcggccugaucggccuggugaccuuccugcugcugagcggcagaagcugcagcaugaccuacaagggcguguacgagcugcagacccuggagcugaacaugaacacccugaacaugaccaugccccugagcugcaccaagaacaacagccaccacuacaucauggugggcaacgagaccggccuggagcugacccugaccaacaccagccugcugcaccacaaguucugcaaccugagcgacgcccacaagaagaaccuguacgaccacacccugaugagcaucaucagcaccuuccaccugagcauccccaacuucaaccaguacgaggccaugagcugcgacuucaacggcggcaagaucaccgugcaguacaaccugagccacagcuacgccaucgacgccgccaaccacugcggcaccguggccaacggcgugcugcagaccuucaugagaauggccuggggcggcagcuacaucgcccuggacagcggcagaggcaagugggacugcaucaugaccagcuaccaguaccugaucauccagaacaccaccugggaggaccacugccaguucagcagacccagccccaucggcuaccugggccugcugagccagagaaccagagacaucuacaucagcagaagacugcugggcaccuucaccuggacccugagcgacagcgagggcaacgagacccccggcggcuacugccugaccagauggaugcugaucgaggccgagcugaagugcuucggcaacaccgccguggccaagugcaacgagaagcacgacgaggaguucugcgacaugcugagacuguucgacuucaacaagcaggccaucagaagacugaaggcccccgcccagaugagcauccagcugaucaacaaggccgugaacgcccugaucaacgaccagcugaucaugaagaaccaccugagagacaucaugggcauccccuacugcaacuacagcaaguacugcuaccugaaccacaccagcaccggcagaaccagccugcccagaugcugccuggugagcaacggcagcuaccugaacgagacccacuucagcgacgacaucgagcagcaggccgacaacaugaucaccgagaugcugcagaaggaguaccuggacagacagggcaagaccccccugggccugguggaccuguucguguucagcaccagcuucuaccugaucagcaucuuccugcaccuggugaagauccccacccacagacacaucgugggcaagcccugccccaagccccacagacugaaccacaugggcaucugcagcugcggccuguacaagcagcccggcgugcccgugagauggaagagaugaggacuaguaauaaggaaacuguaugaaugucugugggcaggaagugaagagauccuucuguaaagguuuuuggaauuaugucugcugaauaauaaacuuuuuugaaauaauaaaucugguagaaaaaugagaucucaaaggcucuuuucagagccaccaaaaaaaaaaaaaaaaaaaaaaaaaaaaaaaaaaaaaaaaaaaaaaaaaaaaaaaaaaaaaaaaagaauu

SEQ ID NO: 32443 - RNA, 1781 nt, Artificial Sequence
  mRNA product Design b-4 (hSL-A64-N5) comprising derived and/or modified sequence from LASV(G1180-SLE-2010;Clade IV)__AIT17168__GPCmut7 (opt4)
aggagagucccgcagucggcguccagcggcucugcuuguucgugugugugucguugcaggccuuauucaagcuuaccaugggccagaucgugaccuucuuccaggaggugccccacgugaucgaggaggugaugaacaucgugcugaucgcccugagcauccuggccgugcugaagggccuguacaacuucgccaccugcggccuggugggccugcugaccuuccugcugcugugcggcagaagcugcaccgccagcagauacaagggcguguacgagcugcagacccuggagcugaacauggagacccugaacaugaccaugccccugagcugcaccaagaacaacagccaccacuacaucauggugggcaacgagaccggccuggagcugacccugaccaacaccagcaucaucaaccacaaguucugcaaccugagcgacgcccacaagaagaaccuguacgaccacgcccugaugagcaucaucagcaccuuccaccugagcauccccaacuucaaccaguacgaggccaugagcugcgacuucaacggcggcaagaucagcgugcaguacaaccugagccacagcuacgccggcgacgccgccaaccacugcggcaccguggccaacggcgugcugcagaccuucaugagaauggccuggggcggcagcuacaucgcccuggacagcggccacggcagcugggacugcaucaugaccagcuaccaguaccugaucauccagaacaccaccugggaggaccacugccaguucagcagacccagccccaucggcuaccugggccugcugagccagagaaccagagacaucuacaucagcagaagacugcugggcaccuucaccuggacccugagcgacagcgagggcaaggacacccccggcggcuacugccugaccagauggaugcugaucgaggccgagcugaagugcuucggcaacaccgccguggccaagugcaacgagaagcacgacgaggaguucugcgacaugcugagacuguucgacuucaacaagcaggccauccagagacugaaggcccccgcccagaugagcauccagcugaucaacaaggccgugaacgcccugaucaacgaccagcugaucaugaagaaccaccugagagacaucaugggcauccccuacugcaacuacagcaaguacugcuaccugaaccacaccaccaccggcaagaccagccugcccaagugcugccuggugagcaacggcagcuaccugaacgagacccacuucagcgacgacaucgagcagcaggccgacaacaugaucaccgagaugcugcagaaggaguacauggagagacagggcaagaccccccugggccugguggaccuguucguguucagcaccagcuucuaccugaucagcaucuuccugcaccuggugaagauccccacccacagacacaucgugggcaagagcugccccaagccccacagacugaaccacaugggcaucugcagcugcggccuguacaagcagcccggcgugcccgugaaguggaagagaugaggacuaguaauaaggaaacuguaugaaugucugugggcaggaagugaagagauccuucuguaaagguuuuuggaauuaugucugcugaauaauaaacuuuuuugaaauaauaaaucugguagaaaaaugagaucucaaaggcucuuuucagagccaccaaaaaaaaaaaaaaaaaaaaaaaaaaaaaaaaaaaaaaaaaaaaaaaaaaaaaaaaaaaaaaaaagaauu

SEQ ID NO: 32444 - RNA, 1781 nt, Artificial Sequence
  mRNA product Design b-4 (hSL-A64-N5) comprising derived and/or modified sequence from LASV(G1442-SLE-2011;Clade IV)__AIT17180__GPCmut7 (opt4)
aggagagucccgcagucggcguccagcggcucugcuuguucgugugugugucguugcaggccuuauucaagcuuaccaugggccagaucgugaccuucuuccaggaggugccccacgugaucgaggaggugaugaacaucgugcugaucgcccugagcauccuggccgugcugaagggccuguacaacguggccaccugcggccugaucggccuggugaccuuccugcugcugugcggcagaagcugcaccaccacccuguacaagggcguguacgagcugcagacccuggagcugaacauggagacccugaacaugaccaugccccugagcugcaccaagaacaacagccaccacuacaucagagugggcaacgagaccggccuggagcugacccugaccaacaccagcaucaucaaccacaaguucugcaaccugagcgacgcccacaagaagaaccuguacgaccacgcccugaugagcaucaucagcaccuuccaccugagcauccccaacuucaaccaguacgaggccaugagcugcgacuucaacggcggcaagaucagcgugcaguacaaccugagccacagcuacgccggcgacgccgccaaccacugcggcaccguggccaacggcgugcugcagaccuucaugagaauggccuggggcggcagcuacaucgcccuggacagcggcagaggcaacugggacugcaucaugaccagcuaccaguaccugaucauccagaacaccaccugggacgaccacugccaguucagcagacccagccccaucggcuaccugggccugcugagccagagaaccagagacguguacaucagcagaagacugcugggcaccuucaccuggacccugagcgacagcgagggcaaggacacccccggcggcuacugccugaccagauggaugcugaucgaggccgagcugaagugcuucggcaacaccgccguggccaagugcaacgagaagcacgacgaggaguucugcgacaugcugagacuguucgacuucaacaagcaggccauccagagacugaaggcccccgcccagaugagcauccagcugaucaacaaggccgugaacgcccugaucaacgaccagcugaucaugaagaaccaccugagagacaucaugggcauccccuacugcaacuacagcaaguacugcuaccugaacaacaccgccaccggcaagaccagccugcccaagugcugccugaucagcaacggcagcuaccugaacgagacccacuucagcgacgacaucgagcaggaggccgacaacaugaucaccgagaugcugcagaaggaguacauggagagacagggcaagaccccccugggccugguggaccuguucguguucagcaccagcuucuaccugaucagcaucuuccugcaccuggugaagauccccacccacagacacaucgugggcaagagcugccccaagccccacagacugaaccacaugggcaucugcagcugcggccuguacaagcagcccggcgugcccgugagauggaagagaugaggacuaguaauaaggaaacuguaugaaugucugugggcaggaagugaagagauccuucuguaaagguuuuuggaauuaugucugcugaauaauaaacuuuuuugaaauaauaaaucugguagaaaaaugagaucucaaaggcucuuuucagagccaccaaaaaaaaaaaaaaaaaaaaaaaaaaaaaaaaaaaaaaaaaaaaaaaaaaaaaaaaaaaaaaaaagaauu

SEQ ID NO: 32445 - RNA, 1781 nt, Artificial Sequence
  mRNA product Design b-4 (hSL-A64-N5) comprising derived and/or modified sequence from LASV(G3010-SLE-2013;Clade IV)__AIT17344__GPCmut7 (opt4)
aggagagucccgcagucggcguccagcggcucugcuuguucgugugugugucguugcaggccuuauucaagcuuaccaugggccagaucgugaccuucuuccaggaggugccccacgugaucgaggaggugaugaacaucgugcugaucgcccugagcauccuggccgugcugaagggccuguacaacuucgccaccugcggccuggugggccuggugaccuuccugcugcugugcggcagaagcugcaccaccagccuguacaagggcguguacgagcugcagacccuggagcugaacauggagacccugaacaugaccaugccccugagcugcaccaagaacaacagccaccacuacaucauggugggcaacgagaccggccuggagcugacccugaccaacaccagcaucaucaaccacaaguucugcaaccugagcgacgcccacaagaagaaccuguacaaccacgcccugaugagcaucaucagcaccuuccaccugagcauccccaacuucaaccaguacgaggccaugagcugcgacuucaacggcggcaagaucagcgugcaguacaaccugagccacagcuacgccggcgacgccgccagccacugcggcaccguggccaacggcgugcugcagaccuucaugagaauggccuggggcggcagcuacaucgcccuggacagcggcuacggcaagugggacugcaucaugaccagcuaccaguaccugaucauccagaacaccaccugggaggaccacugccaguucagcagacccagccccaucggcuaccugggccugcugagccagagaaccagagacaucuacaucagcagaagacugcugggcaccuucaccuggacccugagcgacagcgagggcaaggacacccccggcggcuacugccugaccagauggaugcugaucgaggccgagcugaagugcuucggcaacaccgccguggccaagugcaacgagaagcacgacgaggaguucugcgacaugcugagacuguucgacuucaacaagcaggccauccagagacugaagacccccgcccagaugagcauccagcugaucaacaaggccgugaacgcccugaucaacgaccagcugaucaugaagaaccaccugagagacaucaugggcauccccuacugcaacuacagcaaguacugcuaccugaaccacaccaccaccggcaagaccagccugcccaagugcugccuggugagcaacggcagcuaccugaacgagacccacuucagcgacgacaucgagcagcaggccgacaacaugaucaccgagaugcugcagaaggaguacauggagagacagggcaagaccccccugggccugguggaccuguucguguucagcaccagcuucuaccugaucagcaucuuccugcaccuggugaagauccccacccacagacacaucgugggcaagagcugccccaagccccacagacugaaccacaugggcaucugcagcugcggccuguacaagcagcccggcgugcccgugagauggaagagaugaggacuaguaauaaggaaacuguaugaaugucugugggcaggaagugaagagauccuucuguaaagguuuuuggaauuaugucugcugaauaauaaacuuuuuugaaauaauaaaucugguagaaaaaugagaucucaaaggcucuuuucagagccaccaaaaaaaaaaaaaaaaaaaaaaaaaaaaaaaaaaaaaaaaaaaaaaaaaaaaaaaaaaaaaaaaagaauu

SEQ ID NO: 32446 - RNA, 1781 nt, Artificial Sequence
  mRNA product Design b-4 (hSL-A64-N5) comprising derived and/or modified sequence from LASV(G502-SLE-2009;Clade IV)__AIT17126__GPCmut7 (opt4)
aggagagucccgcagucggcguccagcggcucugcuuguucgugugugugucguugcaggccuuauucaagcuuaccaugggccagaucgugaccuucuuccaggaggugccccacgugaucgaggaggugaugaacaucgugcugaucgcccugagcauccuggccgugcugaagggccuguacaacuucgccaccugcggccuggugggccugcugaccuuccugcugcugugcggcagaagcugcaccaccggccuguacaagggcguguacgagcugcagacccuggagcugaacauggagacccugaacaugaccaugccccugagcugcaccaagaacaacagccaccacuacaucauggugggcaacgagaccggccuggagcugacccugaccaacaccagcaucaucaaccacaaguucugcaaccugagcgacgcccacaagaagaaccuguacgaccacgcccugaugagcaucaucagcaccuuccaccugagcauccccaacuucaaccaguacgaggccaugagcugcgacuucaacggcggcaagaucagcgugcaguacaaccugagccacagcuacgccggcgacgccgccgaccacugcggcaccguggccaacggcgugcugcagaccuucaugagaauggccuggggcggcagcuacaucgcccuggacagcggcagaggcagaugggacugcaucaugaccagcuaccaguaccugaucauccagaacaccaccugggaggaccacugccaguucagcagacccagccccaucggcuaccugggccugcugagccagagaaccagagacaucuacaucagcagaagacugcugggcaccuucaccuggacccugagcgacagcgagggcaaggacacccccggcggcuacugccugaccagauggaugcugaucgaggccgagcugaagugcuucggcaacaccgccguggccaagugcaacgagaagcacgacgaggaguucugcgacaugcugagacuguucgacuucaacaagcaggccauccagagacugaaggcccccgcccagaugagcauccagcugaucaacaaggccgugaacgcccugaucaacgaccagcuggugaugaagaaccaccugagagacaucaugggcauccccuacugcaacuacagcagauacugcuaccugaaccacaccaccaccggcagaaccagccugcccaagugcugccuggugagcaacggcagcuaccugaacgagacccacuucagcgacgacaucgagcagcaggccgacaacaugaucaccgagaugcugcagaaggaguacauggagagacagggcaagaccccccugggccugguggaccuguucguguucagcaccagcuucuaccugaucagcaucuuccugcaccuggugaagauccccacccacagacacaucgugggcaagagcugccccaagccccacagacugaaccacaugggcaucugcagcugcggccuguacaagcagcccggcgugcccgugaaguggaagagaugaggacuaguaauaaggaaacuguaugaaugucugugggcaggaagugaagagauccuucuguaaagguuuuuggaauuaugucugcugaauaauaaacuuuuuugaaauaauaaaucugguagaaaaaugagaucucaaaggcucuuuucagagccaccaaaaaaaaaaaaaaaaaaaaaaaaaaaaaaaaaaaaaaaaaaaaaaaaaaaaaaaaaaaaaaaaagaauu

SEQ ID NO: 32447 - RNA, 1781 nt, Artificial Sequence
  mRNA product Design b-4 (hSL-A64-N5) comprising derived and/or modified sequence from LASV(G733-SLE-2010;Clade IV)__AIT17154__GPCmut7 (opt4)
aggagagucccgcagucggcguccagcggcucugcuuguucgugugugugucguugcaggccuuauucaagcuuaccaugggccagaucgugaccuucuuccaggaggugccccacgugaucgaggaggugaugaacaucgugcugaucgcccugagcauccuggccgugcugaagggccuguacaacuucgccaccugcggcaucgugggccuggugagcuuccugcugcugugcggcagaagcugcaccaccagccuguacaagggcguguacgagcugcagacccuggagcugaacauggagacccugaacaugaccaugccccugagcugcaccaagaacaacagccaccacuacaucauggugggcaacgagaccggccuggagcugacccugaccaacaccagcaucaucaaccacaaguucugcaaccugagcgacgcccacaagaagaaccuguacgaccacgcccugaugagcaucaucagcaccuuccaccugagcauccccaacuucaaccaguacgaggccaugagcugcgacuucaacggcggcaagaucagcgugcaguacaaccugagccacagcuacgccggcgacgccgccaaccacugcggcaccaucgccaacggcgugcugcagaccuucaugagaauggccuggggcggcagcuacaucgcccuggacagcggcagagacagaugggacugcaucaugaccagcuaccaguaccugaucauccagaacaccaccugggaggaccacugccaguucagcagacccagccccaucggcuaccugggccugcugagccagagaaccagagacaucuacaucagcagaagacugcugggcaccuucaccuggacccugagcgacagcgagggcaaggacacccccggcggcuacugccugaccagauggaugcugaucgaggccgagcugaagugcuucggcaacaccgccguggccaagugcaacgagaagcacgacgaggaguucugcgacaugcugagacuguucgacuucaacaagcaggccauccagagacugaaggcccccgcccagaugagcauccagcugaucaacaaggccgugaacgcccugaucaacgaccagcugaucaugaagaaccaccugagagacaucaugggcauccccuacugcaacuacagcaaguacugcuaccugaaccacaccaccaccggcaagaccagccugcccaagugcugccuggugagcaacggcagcuaccugaacgagacccacuucagcgacgacaucgagcagcaggccgacaacaugaucaccgagaugcugcagaaggaguacauggagagacagggcaagaccccccugggccugguggaccuguucguguucagcaccagcuucuaccugaucagcaucuuccugcaccuggugaagauccccacccacagacacguggugggcaagagcugccccaagccccacagacugaaccacaugggcaucugcagcugcggccuguacggccagcccggcgugcccgugaaguggaagagaugaggacuaguaauaaggaaacuguaugaaugucugugggcaggaagugaagagauccuucuguaaagguuuuuggaauuaugucugcugaauaauaaacuuuuuugaaauaauaaaucugguagaaaaaugagaucucaaaggcucuuuucagagccaccaaaaaaaaaaaaaaaaaaaaaaaaaaaaaaaaaaaaaaaaaaaaaaaaaaaaaaaaaaaaaaaaagaauu

SEQ ID NO: 32448 - RNA, 1781 nt, Artificial Sequence
  mRNA product Design b-4 (hSL-A64-N5) comprising derived and/or modified sequence from MOPV/LASV reassortant(IGS-1;Clade IV)__AFY05576__GPCmut7 (opt4)
aggagagucccgcagucggcguccagcggcucugcuuguucgugugugugucguugcaggccuuauucaagcuuaccaugggccagaucgugaccuucuuccaggaggugccccacgugaucgaggaggugaugaacaucgugcugaucgcccugagcgugcuggccgugcugaagggccuguacaacuucgccaccugcggccuggugggccuggugaccuuccugcugcugugcggcagaagcugcaccaccagccuguacaagggcguguacgagcugcagacccuggagcugaacauggagacccugaacaugaccaugccccugagcugcaccaagaacaacagccaccacuacaucauggugggcaacgagaccggccuggagcugacccugaccaacaccagcaucaucaaccacaaguucugcaaccugagcgacgcccacaagaagaaccuguacgaccacgcccugaugagcaucaucagcaccuuccaccugagcauccccaacuucaaccaguacgaggccaugagcugcgacuucaacggcggcaagaucagcgugcaguacaaccugagccacagcuacgccggcgacgccgccaaccacugcggcaccguggccaacggcgugcugcagaccuucaugagaauggccuggggcggcagcuacaucgcccuggacagcggcagaggcaacugggacugcaucaugaccagcuaccaguaccugaucauccagaacaccaccugggaggaccacugccaguucagcagacccagccccaucggcuaccugggccugcugagccagagaaccagagacaucuacaucagcagaagacugcugggcaccuucaccuggacccugagcgacagcgagggcgaggacacccccggcggcuacugccugaccagauggaugcugaucgaggccgagcugaagugcuucggcaacaccgccguggccaagugcaacgagaagcacgacgaggaguucugcgacaugcugagacuguucgacuucaacaagcaggccauccagagacugaaggcccccgcccagaugagcauccagcugaucaacaaggccgugaacgcccugaucaacgaccagcugaucaugaagaaccaccugagagacaucaugggcauccccuacugcaacuacagcaaguacugcuaccugaaccacaccaccaccggcagaaccagccugcccaagugcugccuggugagcaacggcagcuaccugaacgagacccacuucagcgacgacaucgagcagcaggccgacaacaugaucaccgagaugcugcagaaggaguacauggagagacagggcaagaccccccugggccugguggaccuguucguguucagcaccagcuucuaccugaucagcaucuuccugcaccuggugaagauccccacccacagacacaucgugggcaagagcugccccaagccccacagacugaaccacaugggcaucugcagcugcggccuguacaagcagcccggcgugcccgugaaguggaagagaugaggacuaguaauaaggaaacuguaugaaugucugugggcaggaagugaagagauccuucuguaaagguuuuuggaauuaugucugcugaauaauaaacuuuuuugaaauaauaaaucugguagaaaaaugagaucucaaaggcucuuuucagagccaccaaaaaaaaaaaaaaaaaaaaaaaaaaaaaaaaaaaaaaaaaaaaaaaaaaaaaaaaaaaaaaaaagaauu

SEQ ID NO: 32449 - RNA, 1781 nt, Artificial Sequence
  mRNA product Design b-4 (hSL-A64-N5) comprising derived and/or modified sequence from LASV(LM765-SLE-2012;Clade IV)__AIT17814__GPCmut7 (opt4)
aggagagucccgcagucggcguccagcggcucugcuuguucgugugugugucguugcaggccuuauucaagcuuaccaugggccagaucgugaccuucuuccaggaggugccccacgugaucgaggaggugaugaacaucgugcugaucgcccugagcauccuggccgugcugaagggccuguacaacuucgccaccugcggccuggugggccuggugaccuuccugcugcugugcggcagaagcugcaccaccagccuguacaagggcguguacgagcugcagacccuggagcugaacauggagacccugaacaugaccaugccccugagcugcaccaagaacaacagccaccacuacaucauggugggcaacgagaccggccuggagcugacccugaccaacaccagcaucaucgaccacaaguucugcaaccugagcgacgcccacagaaagaaccuguacgaccacgcccugaugagcaucaucagcaccuuccaccugagcauccccaacuucaaccaguacgaggccaugagcugcgacuucaacggcggcaagaucagcgugcaguacaaccugagccacagcuacgccaaggacgccgccgaccacugcggcaccguggccaacggcgugcugcagaccuucaugagaauggccuggggcggcagcuacaucgcccuggacagcggcagaggcagaugggacugcaucaugaccagcuaccaguaccugaucauccagaacaccaccugggaggaccacugccaguucagcagacccagccccaucggcuaccugggccugcugagccagagaaccagagacaucuacaucagcagaagacugcugggcaccuucaccuggacccugagcgacagcgagggcaaggacacccccggcggcuacugccugaccagauggaugcugaucgaggccgagcugaagugcuucggcaacaccgccguggccaagugcaacgagaagcacgacgaggaguucugcgacaugcugagacuguucgacuucaacaagcaggccauccagagacugaaggcccccgcccagaugagcauccagcugaucaacaaggccgugaacgcccugaucaacgaccagcugaucaugaagaaccaccugagagacaucaugggcauccccuacugcaacuacagcaaguacugcuaccugaaccacaccaccaccggcaagaccagccugcccaagugcugccuggugagcaacggcagcuaccugaacgagacccacuucagcgacgacaucgagcagcaggccgacaacaugaucaccgagaugcugcagaaggaguacauggagagacagggcaagaccccccugggccugguggaccuguucguguucagcaccagcuucuaccugaucagcaucuuccugcaccuggugaagauccccacccacagacacaucgugggcaagcccugccccaagccccacagacugaaccacaugggcaucugcagcugcggccuguacaagcagcccggcgugcccgugaaguggaagagaugaggacuaguaauaaggaaacuguaugaaugucugugggcaggaagugaagagauccuucuguaaagguuuuuggaauuaugucugcugaauaauaaacuuuuuugaaauaauaaaucugguagaaaaaugagaucucaaaggcucuuuucagagccaccaaaaaaaaaaaaaaaaaaaaaaaaaaaaaaaaaaaaaaaaaaaaaaaaaaaaaaaaaaaaaaaaagaauu

SEQ ID NO: 32450 - RNA, 1781 nt, Artificial Sequence
  mRNA product Design b-4 (hSL-A64-N5) comprising derived and/or modified sequence from LASV(LM776-SLE-2012;Clade IV)__AIT17824__GPCmut7 (opt4)
aggagagucccgcagucggcguccagcggcucugcuuguucgugugugugucguugcaggccuuauucaagcuuaccaugggccagaucgugaccuucuuccaggaggugccccacgugaucgaggaggugaugaacaucgugcugaucgcccugagcauccuggccgugcugaagggccuguacaacuucgccaccugcggccuggugggccuggugaccuuccugcugcugugcggcagaagcugcaccaccagcguguacaagggcguguacgagcugcagacccuggagcugaacauggagacccugaacaugaccaugccccugagcugcaccaagaacaacagccaccacuacaucauggugggcaacgagaccggccuggagcugacccugaccaacaccagcaucaucaaccacaaguucugcaaccugagcgacgcccacaagaagaaccuguacgaccacgcccugaugagcaucaucagcaccuuccaccugagcauccccaacuucaaccaguacgaggccaugagcugcgacuucaacggcggcaagaucagcgugcaguacaaccugagccacagcuacgccggcgacgccgccaaccacugcggcaccguggccaacggcgugcugcagaccuucaugagaauggccuggggcggcagcuacaucgcccuggacagcggccacggcaagugggacugcaucaugaccagcuaccaguaccugaucauccagaacaccaccugggaggaccacugccaguucagcagacccagccccaucggcuaccugggccugcugagccagagaaccagagacaucuacaucagcagaagacugcugggcaccuucaccuggacccugagcgacagcgagggcaaggacacccccggcggcuacugccugaccagauggaugcugaucgaggccgagcugaagugcuucggcaacaccgccguggccaagugcaacgagaagcacgacgaggaguucugcgacaugcugagacuguucgacuucaacaagcaggccauccagagacugaaggcccccgcccagaugagcauccagcugaucaacaaggccgugaacgcccugaucaacgaccagcugaucaugaagaaccaccugagagacaucaugggcauccccuacugcaacuacagcaaguacugcuaccugaaccacaccaccaccggcaagaccagccugcccaagugcugccuggugagcaacggcagcuaccugaacgagacccacuucagcgacgacaucgagcagcaggccgacaacaugaucaccgagaugcugcagaaggaguacauggagagacagggcaagaccccccugggccugguggaccuguucguguucagcaccagcuucuaccugaucagcaucuuccugcaccuggugaagauccccacccacagacacaucgugggcaagagcugccccaagccccacagacugaaccacaugggcaucugcagcugcggccuguacaagcagcccggcgugcccgugagauggaagagaugaggacuaguaauaaggaaacuguaugaaugucugugggcaggaagugaagagauccuucuguaaagguuuuuggaauuaugucugcugaauaauaaacuuuuuugaaauaauaaaucugguagaaaaaugagaucucaaaggcucuuuucagagccaccaaaaaaaaaaaaaaaaaaaaaaaaaaaaaaaaaaaaaaaaaaaaaaaaaaaaaaaaaaaaaaaaagaauu

SEQ ID NO: 32451 - RNA, 1781 nt, Artificial Sequence
  mRNA product Design b-4 (hSL-A64-N5) comprising derived and/or modified sequence from LASV(Mad39;Clade IV)__ANH09722__GPCmut7 (opt4)
aggagagucccgcagucggcguccagcggcucugcuuguucgugugugugucguugcaggccuuauucaagcuuaccaugggccagaucgugaccuucuuccaggaggugccccacgugaucgaggaggugaugaacaucgugcugaucgcccugagcauccuggccgugcugaagggccuguacaacguggccaccugcggccugaucggccuggugaccuuccugcugcugugcggcagaagcugcaccaccacccuguacaagggcguguacgagcugcaggcccuggagcugaacauggagacccugaacaugaccaugccccugagcugcaccaagaacaacagccaccacuacaucagagugggcaacgagaccggccuggagcugacccugaccaacaccagccugaucaaccacaaguucugcaaccugagcgacgcccacaagaagaaccuguacgaccacgcccugaugagcaucaucagcaccuuccaccugagcauccccaacuucaaccaguacgaggccaugagcugcgacuucaacgacggcaagaucagcgugcaguacaaccugagccacaccuacgccggcgacaccgccaaccacugcggcaccguggccaacggcgugcugcagaccuucaugagaauggccuggggcggcagcuacaucgcccuggacagcggcagaggcggcugggacugcaucaugaccagcuaccaguaccugaucauccagaacaccaccugggaggaccacugccaguucagcagacccagccccaucggcuaccugggccugcugagccagagaaccagagacaucuacaucagcagaagacugcugggcaccuucaccuggacccugagcgacagcgagggcaaggacacccccggcggcuacugccugaccagauggaugcugaucgaggccgagcugaagugcuucggcaacaccgccguggccaagugcaacgagaagcacgacgaggaguucugcgacaugcugagacuguucgacuucaacaagcaggccauccagagacugaaggcccccgcccagaugagcauccagcugaucaacaaggccgugaacgcccugaucaacgaccagcugaucaugaagaaccaccugagagacaucaugggcauccccuacugcaacuacagcaaguacugcuaccugaaccacaccgugaccggcaagaccagccugcccaagugcugccuggugagcaacggcagcuaccugaacgagacccacuucagcgacgacaucgagcagcaggccgacaacaugaucaccgagaugcugcagaaggaguacauggagagacagggcaagaccccccugggccugguggaccuguucguguucagcaccagcuucuaccugaucagcaucuuccugcaccuggugaagauccccacccacagacacguggugggcaagcccugccccaagccccacagacugaaccacaugggcaucugcagcugcggcuucuacaagcagcccggcgugcccgugagauggaagagaugaggacuaguaauaaggaaacuguaugaaugucugugggcaggaagugaagagauccuucuguaaagguuuuuggaauuaugucugcugaauaauaaacuuuuuugaaauaauaaaucugguagaaaaaugagaucucaaaggcucuuuucagagccaccaaaaaaaaaaaaaaaaaaaaaaaaaaaaaaaaaaaaaaaaaaaaaaaaaaaaaaaaaaaaaaaaagaauu

SEQ ID NO: 32452 - RNA, 1781 nt, Artificial Sequence
  mRNA product Design b-4 (hSL-A64-N5) comprising derived and/or modified sequence from LASV(Z0947-SLE-2011;Clade IV)__AIT17840__GPCmut7 (opt4)
aggagagucccgcagucggcguccagcggcucugcuuguucgugugugugucguugcaggccuuauucaagcuuaccaugggccagaucgugaccuucuuccaggaggugccccacgugaucgaggaggugaugaacaucgugcugaucgcccugagcauccuggccgugcugaagggccuguacaacuucgccaccugcggccuggugggccuggugaccuuccugcugcugugcggcagaagcugcaccaucagccuguacaagggcguguacgagcugcagacccuggagcugaacauggagacccugaacaugaccaugccccugagcugcaccaagaacaacagccaccacuacaucauggugggcaacgagaccggccuggagcugacccugaccaacaccagcaucaucaaccacaaguucugcaaccugagcgacgcccacaagaagaaccuguacgaccacgcccugaugagcaucaucagcaccuuccaccugagcauccccaacuucaaccaguacgaggccaugagcugcgacuucaacggcggcaagaucagcgugcaguacaaccugagccacagcuacgccggcgacgccgccaaccacugcggcaccguggccaacggcgugcugcagaccuucaugagaauggccuggggcggcagcuacaucgcccuggacagcggcagagacagaugggacugcaucaugaccagcuaccaguaccugaucauccagaacaccaccugggaggaccacugccaguucagcagacccagccccaucggcuaccugggccugcugagccagagaaccagagacaucuacaucagcagaagacugcugggcaccuucaccuggacccugagcgacagcgagggcaaggacacccccggcggcuacugccugaccagauggaugcugaucgaggccgagcugaagugcuucggcaacaccgccguggccaagugcaacgagaagcacgacgaggaguucugcgacaugcugagacuguucgacuucaacaagcaggccauccagagacugaaggcccccgcccagaugagcauccagcugaucaacaaggccgugaacgcccugaucaacgaccagcugaucaugaagaaccaccugagagacaucaugggcauccccuacugcaacuacagcaaguacugcuaccugaaccacaccaccaccggcaagaccagccugcccaagugcugccuggugagcaacggcagcuaccugaacgagacccacuucagcgacgacaucgagcagcaggccgacaacaugaucaccgagaugcugcagaaggaguacauggagagacagggcaagaccccccugggccugguggaccuguucguguucagcaccagcuucuaccugaucagcaucuuccugcaccuggugaagauccccacccacagacacaucgugggcaagcccugccccaagccccacagacugaaccacaugggcaucugcagcugcggccuguacaagcagcccggcgugcccgugaaguggaagagaugaggacuaguaauaaggaaacuguaugaaugucugugggcaggaagugaagagauccuucuguaaagguuuuuggaauuaugucugcugaauaauaaacuuuuuugaaauaauaaaucugguagaaaaaugagaucucaaaggcucuuuucagagccaccaaaaaaaaaaaaaaaaaaaaaaaaaaaaaaaaaaaaaaaaaaaaaaaaaaaaaaaaaaaaaaaaagaauu

SEQ ID NO: 32453 - RNA, 1781 nt, Artificial Sequence
  mRNA product Design b-4 (hSL-A64-N5) comprising derived and/or modified sequence from LASV(Josiah;Clade IV)__NP_694870__GPCmut7 (opt5)
aggagagucccgcagucggcguccagcggcucugcuuguucgugugugugucguugcaggccuuauucaagcuuaccaugggccagaucgugaccuucuuucaagaggucccccacguuauugaagaggugaugaacaucgugcugauugcccucagcguccuggcugugcuuaaggggcuguacaauuucgccacaugcggacucguuggccuggugacguuucuucugcucugugggagauccugcaccacaucucuguauaaaggagucuacgaacugcagacccucgagcugaacauggaaacacuuaauaugaccaugccucugagcuguacaaagaacaauucccaucacuauaucauggugggcaacgagaccgggcucgagcugacgcuuaccaauacaucuauuaucaaccauaaauucugcaaucugagcgacgcgcacaagaaaaaccucuacgaucaugcucugauguccaucauuucuaccuuucaccugagcaucccgaauuucaaccaguaugaagccauguccugugacuuuaauggaggcaagauuagcguucaguacaaccucucucacuccuaugccggcgaugcugccaaucauugcgggacaguggcuaacggaguccugcaaaccuucaugcggauggccuggggcgggagcuacaucgcgcuugacucuggacgcggcaacugggauuguauuaugacguccuaccaguaucugaucauucagaauacaaccugggaggaccacugccaguuuagcagacccucuccuaucggguaccucggacugcuuucccaacggacacgcgauaucuauauuagcagacggcugcucggcaccuucaccuggacacuguccgacucugaaggcaaggauacgcccgggggauacugucugacccgcuggaugcucaucgaggccgagcugaaaugcuuuggcaacacagcuguggccaaguguaaugaaaaacaugacgaggaguucugcgauaugcuuagacuguuugacuucaacaagcaggcuauucagcggcucaaagccccugcgcagaugagcauccaacugauuaauaaggccgugaacgcucuuaucaaugaucagcugaucaugaagaaccaccuccgcgacauuauggggauccccuauugcaauuacuccaaauauuguuaccugaaccacaccacaaccggaagaacgagccugccuaagugcugucucgucucuaauggcuccuaccugaacgaaacacauuucagcgacgauauugaacagcaagccgacaauaugaucaccgagaugcuucagaaagaguauauggaacggcaggggaagaccccgcugggacucguugaucuguuuguguucucuaccagcuuuuaccugauuuccaucuuccuucaccucgugaaaauccccacacaucgccacauugucggcaagucuugcccuaaaccccauagacugaaccacaugggcaucuguagcugcgggcuguauaagcagccuggagugcccguuaaguggaaacggugaggacuaguaauaaggaaacuguaugaaugucugugggcaggaagugaagagauccuucuguaaagguuuuuggaauuaugucugcugaauaauaaacuuuuuugaaauaauaaaucugguagaaaaaugagaucucaaaggcucuuuucagagccaccaaaaaaaaaaaaaaaaaaaaaaaaaaaaaaaaaaaaaaaaaaaaaaaaaaaaaaaaaaaaaaaaagaauu

SEQ ID NO: 32454 - RNA, 1778 nt, Artificial Sequence
  mRNA product Design b-4 (hSL-A64-N5) comprising derived and/or modified sequence from LASV(LP;Clade I)__AAF86701__GPCmut7 (opt5)
aggagagucccgcagucggcguccagcggcucugcuuguucgugugugugucguugcaggccuuauucaagcuuaccaugggccagaucauuaccuucuuucaagaggugccccacgucaucgaagagguuaugaacauugugcugaucgcccucagccugcuugcuauucugaaggggcucuacaauaucgccacaugcggaaucauuggccugguggcguuccuuuuucugugugggaaauccugcucucucacgcugaagggaggcuaugaacugcagacccucgagcugaacauggaaacacuuaauaugaccaugccucugagcuguaccaaaaacuccucucaucacuacaucagagucgggaaugagacaggacucgagcugacacuuaccaacacgagcauuaucaaucauaaguucugcaaccuguccgacgcucacaaaaagaaucucuaugaucaugcccugaugucuauuaucagcaccuuucaccuguccauuccgaacuucaaucaguacgaagccaugagcugugacuuuaacggcggcaagaucucugugcaguauaaucucucccacagcuacgcuggggaugccgcugagcauugcggaacaguugccaacggcgugcugcaaaccuucaugcggauggcguggggagggcgcuauaucgcccuugacucuggcaaagggaauugggauuguauuaugacauccuaccaguaccugaucauucagaacaccacgugggaagaccacugccaguuuagcagacccucuccuaucggauaucucggccugcuuucccaacggacacgcgauauuuacaucagcagacggcugcucggcaccuucacauggacccuguccgacucugaggggaacgagacccccggaggcuauugucugacacgcuggaugcucaucgaagcugagcugaagugcuuugggaauacggccgucgcuaaauguaacgaaaagcaugaugaggaguucugcgacaugcuuagacuguuugauuucaauaaacaggccauucggcgccucaaggcgccugcccagaugagcauccagcugauuaacaaggcugugaaugcccuuaucaacgaccaacugauuaugaaaaaucaccucagagauaucaugggaauccccuacugcaacuauuccaaguacuguuaucugaaucacaccagcucuggccggacaucccugccuaaaugcugucucauuagcaacgggucuuaccugaaugaaacccaguucagcgacgacaucgagcagcaagcugauaacaugauuacagaaaugcuucagaaggaguacaucgaacgccagggaaaaaccccgcugggccucguugacauuuuuaucuucuccacgucuuuuuaucugauuagcaucuuccugcaucuuaucaagauucccacacacagacauaucgugggcaaaccuugccccaagccucaccggcucaaucauaugggggucuguuccugcggacuguacaagcaccccggcgugccgaccaaauggaagcgcugaggacuaguaauaaggaaacuguaugaaugucugugggcaggaagugaagagauccuucuguaaagguuuuuggaauuaugucugcugaauaauaaacuuuuuugaaauaauaaaucugguagaaaaaugagaucucaaaggcucuuuucagagccaccaaaaaaaaaaaaaaaaaaaaaaaaaaaaaaaaaaaaaaaaaaaaaaaaaaaaaaaaaaaaaaaaagaauu

SEQ ID NO: 32455 - RNA, 1778 nt, Artificial Sequence
  mRNA product Design b-4 (hSL-A64-N5) comprising derived and/or modified sequence from LASV(803213;Clade II)__AAF86703__GPCmut7 (opt5)
aggagagucccgcagucggcguccagcggcucugcuuguucgugugugugucguugcaggccuuauucaagcuuaccaugggccagaucauuaccuucuuucaagaggugccccacgucaucgaagagguuaugaacauugugcugaucgcccucagccugcuugcuauucugaaggggaucuacaauguggccacaugcggacucuucggccugaucuccuuucuucugcucugugggagaucuugcagcgucacguauaaaggaguguacgaacugcagacccuggagcucaacauggcgaaucugaacaugacaaugccucuuuccuguaccaagaauaacucucaucacuauauuaugguuggcaaugaaacagggcuggagcucacccugacaaacaccagcaucauuaaucauaaauucugcaaccuuuccgacgcucacaagaaaaaucuguacgaucaugcccucaugucuaucauuagcacguuucaccuguccaucccgaacuucaaucaguaugaggccaugagcugugacuuuaacggaggcaagauuucugugcaguacaaucugucccacagcuucgcugucgaugccgcuaaccauugcggcaccaucgccaacggggugcuccaaacauuuaugcggauggcguggggaggcucuuauaucgcccuggacuccgggaagggaaauugggauuguauuaugaccagcuaccaguaccuuaucauucagaacacaaccugggaagaccacugccaguucucucgccccuccccuaucggcuaucuggggcuccugagccaaagaacgcgggauauuuacaucucccgcagacuucugggaacauuuaccuggacacucucugacagcgagggcaaugaagcucccggcggguauugucugacccgguggaugcugaucgaggccgagcucaaaugcuucggaaacaccgcuguugccaaguguaaugaaaaacaugaugaggaauuuugcgacaugcugcgccuuuucgauuucaacaagcaggcgauuaaaagacugaagacgccugcccagauguccauccagcucauuaauaaggcugugaacgcccugaucaaugaccaacuuauuaugaaaaaccaucugcgggauaucaugggcauccccuacugcaauuauagccgcuacuguuaucucaaccacacagucaccgggaagacaucucugccuagaugcugucugguguccaauggaagcuaccucaacgagacccacuuuucugacgacauugaacagcaggcugauaauaugaucacagagaugcugcaaaaagaguacauggaccggcagggcaagaccccgcuugggcugguggaucucuucgucuuuagcacguccuucuaucugauuucuaucuuucugcaccuuguuaaaauucccacacaucgccacaucgugggaaagccuugccccaaaccucauagacucaaccacaugggcauuuguagcugcggccuguacaagcaccccggggugccggucaaguggaaacggugaggacuaguaauaaggaaacuguaugaaugucugugggcaggaagugaagagauccuucuguaaagguuuuuggaauuaugucugcugaauaauaaacuuuuuugaaauaauaaaucugguagaaaaaugagaucucaaaggcucuuuucagagccaccaaaaaaaaaaaaaaaaaaaaaaaaaaaaaaaaaaaaaaaaaaaaaaaaaaaaaaaaaaaaaaaaagaauu

SEQ ID NO: 32456 - RNA, 1778 nt, Artificial Sequence
  mRNA product Design b-4 (hSL-A64-N5) comprising derived and/or modified sequence from LASV(GA391;Clade III)__CAA36645__GPCmut7 (opt5)
aggagagucccgcagucggcguccagcggcucugcuuguucgugugugugucguugcaggccuuauucaagcuuaccaugggccagaucgugaccuucuuucaagaggucccccacguuauugaagaggugaugaacaucgugcugauugcccucagcauccuggcuauucuuaaggggcuguacaaugucgccacaugcggacucaucggccuggugacguuccuucugcucuccgggagaucuuguagccugaucuauaaaggaaccuacgaacugcagacacucgagcugaacauggaaacccuuaauaugacaaugccucuguccugcaccaagaacaauucucaucacuauauucggguuggcaacgagacagggcucgagcugacccuuacgaauaccagcauccugaaccauaaauuuuguaaucucuccgacgcgcacaagcgcaaccuguacgaucauucucugaugagcauuaucuccacauuccaccucagcauuccgaauuuuaaccaguaugaagcuaugucuugcgacuucaauggaggcaaaaucaccgugcaguacaaccugucccacagcuuugccgucgaugccgcuggccauugugggacacuugccaauggagugcugcaaaccuucaugagaauggcuuggggcgggucuuauauugcccucgacuccggacggggcaacugggauugcaucaugacgagcuaccaguaccugaucauucagaacacaaccugggacgaucacugucaguuuucucgccccuccccuaucggguaucuuggacugcucagccaaagaacacgggacauuuacaucucccgcagacugcugggcaccuucaccuggacacucucugauagcgagggcaaugaaacgcccgggggauauugccugacccgguggaugcuuauugaggcggagcugaaguguuuuggcaacacagccguugcuaagugcaaugaaaaacaugacgaggaguucugugauaugcuccgccuguuugacuucaacaagcaggccaucagacggcuuaaaaccccugcucagauguccauccagcugauuaauaaggccgugaacgcgcucaucaaugaucaacugauuaugaaaaaccaucugcgcgacaucauggggauucccuacugcaauuauagcagauacugcuaucucaaccacacaucuaccggaaagacgucccugccucgguguugccuuaucagcaauggcucuuaccugaacgaaacaaaguucagcgacgauaucgaacagcaggccgacaauaugauuaccgagaugcuccaaaaagaguacaucgaucgccaggggaagaccccgcugggacuggucgaccuuuuuguguucuccacaucuuuuuaucucauuagcaucuuccugcaccuggugaaaauucccacccacagacauaucgucggcaagccuugucccaaaccucaccggcucaaccauaugggcauuugcuccugugggcuguacaagcagcccggaguuccggugagauggaaacgcugaggacuaguaauaaggaaacuguaugaaugucugugggcaggaagugaagagauccuucuguaaagguuuuuggaauuaugucugcugaauaauaaacuuuuuugaaauaauaaaucugguagaaaaaugagaucucaaaggcucuuuucagagccaccaaaaaaaaaaaaaaaaaaaaaaaaaaaaaaaaaaaaaaaaaaaaaaaaaaaaaaaaaaaaaaaaagaauu

SEQ ID NO: 32457 - RNA, 1781 nt, Artificial Sequence
  mRNA product Design b-4 (hSL-A64-N5) comprising derived and/or modified sequence from LASV(AV;Clade V)__CCA30314__GPCmut7 (opt5)
aggagagucccgcagucggcguccagcggcucugcuuguucgugugugugucguugcaggccuuauucaagcuuaccaugggccagaucgugaccuucuuucaagaggucccccacguuauugaagaggugaugaacaucgugcugauugcccucagcauccuggcuguccuuaaggggcuguacaauauugccacaugcggacucaucggccugaucacguuccuucugcucugugggagauccugcucuagcaaccuguauaaaggaguguacgaacugcagucccucgaccugaauauggagacccuuaacaugacaaugccucugucuuguaccaagaauaacagccaucacuauauucggguuggcaaugauacagggcucgaacugacccuuacaaacaccuccauccugaaucauaaauuuugcaaccucucugacgcgcacaagaaagaucuguacgaccaugcucugaugagcauuaucuccacguuccaccucagcauuccgaauuuuaaccaguaugaggccaugucuugugauuucaauggaggcaagaucuccgugcaguacaaccugagccacucuuaugccauugacgcugccaaucauugcggcaccgucgcuaacgggauccuucaaacauuuaugcgcauggccuggggaggcuccuacaucgcgcuggauagcgggagaggaaacugggacuguauuaugaccucuuaccaguaucucaucauucagaauacaaccugggagaaccacugccaguucucccggcccagcccuaucggcuaccuggggcuucugucccaacgcacgagagauauuuauaucucucggcgccuccugggaacauuuaccuggacacugagcgacuccgaaggcaaugccacccccggcggguacugucucaccagauggaugcugaucgaggcugaacuuaagugcuucggaaacacagccguggcuaaauguaaugagaagcaugaugaggaauuuugcgacaugcugcgccucuucgauuuuaacaaacaggccauuagccggcugaagucuccugcgcagauguccauccagcuuauuaauaaagccguuaacgcucugaucaaugaccaacucauuaugaagaaccaccugagagacaucaugggcauccccuauugcaauuacagcaaguauuguuaccugaaccacacgauuaccgggaaaacaucucucccuaagugcugucuggugagcaauggauccuaccuuaacgagacccauuucucugaugacaucgaacagcaggccgauaauaugauuacagagaugcugcaaaaagaauauauggagcggcagggcaagaccccgcucgggcuggucgaccuguucguguuuagcacguccuucuaccuuaucagcauuuuucuccgccuggugaaaauccccacacacagacauauugucggaaagccuugccccaaaccucaccggcugaaccauaugggcaucuguucuugcggccucuauaagcagcccgggguuccggugcgcuggaagagaugaggacuaguaauaaggaaacuguaugaaugucugugggcaggaagugaagagauccuucuguaaagguuuuuggaauuaugucugcugaauaauaaacuuuuuugaaauaauaaaucugguagaaaaaugagaucucaaaggcucuuuucagagccaccaaaaaaaaaaaaaaaaaaaaaaaaaaaaaaaaaaaaaaaaaaaaaaaaaaaaaaaaaaaaaaaaagaauu

SEQ ID NO: 32458 - RNA, 1778 nt, Artificial Sequence
  mRNA product Design b-4 (hSL-A64-N5) comprising derived and/or modified sequence from LASV(Togo/2016/7082;Clade VI)__AMR44577__GPCmut7 (opt5)
aggagagucccgcagucggcguccagcggcucugcuuguucgugugugugucguugcaggccuuauucaagcuuaccaugggccagaucauuaccuucuuucaagaggugccccacgucaucgaagagguuaugaacauugugcugaucgcccucagccugcuugcuauucugaaggggguguacaaugucgccacaugcggaaucaucggccucgugacguuccuguuucuuugugggagauccugcucucugauuuauaaaggaagcuacgaacuccagacccuggagcugaacauggaaacacucaauaugaccaugccucuguccuguacaaagaacucuagccaucacuauauccggguuggcaaugagaccgggcuugagcugacacucaccaacacguccauuaucaaucauaaauucugcaaccugucugacgcgcacaagcgcaaucuuuacgaucaugcucugaugagcauucucuccaccuuucaccugagcaucccgaacuucaaucaguaugaagccaugucuugugacuuuaacggaggcaaaauuuccgugcaguacaaucugagccacgccuaugcugucgaugccgcugagcauugcggcacaguggccaacgggguucuccaaaccuucaugagaauggcguggggaggcucuuacaucgcccuggacuccgggcggggaaauugggauuguaucaugacaagcuaccaguaucuuauuauccagaacaccacgugggaagaccacugccaguuuucucgccccuccccuauuggcuaccuggggcuccugagccaaagaacacgggauaucuauauuucccgcagacuucugggaaccuucacauggacccucucugacagcgagggcaacgagacccccggcggguacugucugacacgguggaugcugaucgaagcugagcucaagugcuuuggaaauacggccguggcuaaguguaacgaaaaacaugaugaggaguucugcgacaugcugcgccuuuuugauuucaauaagcaggccauccagagacugaaauccccugcgcagaugagcauucaacucaucaacaaggccgucaaugcucugauuaacgaccagcuuaucaugaaaaaucaucugcgggauaugaugggcauucccuauugcaacuacucuaaguauuguuaccucaaucacaccuccagcgggcgcacaucucugccuaagugcugucuggugagcaacggauccuaccucaaugaaacccacuucucugacgacaucgagcagcaagccgauaacaugaucacagaaaugcugcagaaagaguauauugacagacagggcaagaccccgcuugggcugguggaucucuuugucuucagcacguccuuuuaccugaucagcauuuuccugcaccuuaucaaaauucccacacaucggcacaucguuggaaagccuugccccaaaccucaucgccucaaucacaugggcauuuguucuugcggccuguauaagcagcccggggugccgaccagauggaaacggugaggacuaguaauaaggaaacuguaugaaugucugugggcaggaagugaagagauccuucuguaaagguuuuuggaauuaugucugcugaauaauaaacuuuuuugaaauaauaaaucugguagaaaaaugagaucucaaaggcucuuuucagagccaccaaaaaaaaaaaaaaaaaaaaaaaaaaaaaaaaaaaaaaaaaaaaaaaaaaaaaaaaaaaaaaaaagaauu

SEQ ID NO: 32459 - RNA, 1778 nt, Artificial Sequence
  mRNA product Design b-4 (hSL-A64-N5) comprising derived and/or modified sequence from LASV(KAK-428;Clade n.d. (VII))__ANH09740__GPCmut7 (opt5)
aggagagucccgcagucggcguccagcggcucugcuuguucgugugugugucguugcaggccuuauucaagcuuaccaugggccagaucgugaccuucuuucaagaggucccccacguuauugaagaggugaugaacaucgugcugauugcccucagccugcuugcuauccugaaggggcucuacaauuucgccacaugcggagucauuggccugaucacguuucuucugcucugugggagauccugcucugcgaccuauaaaggacaguacgaacugcagacacuggagcucaacauggaaagccugaauaugaccaugccucuuuccuguacaaagaacaauucucaucacuauauccgggcuggcaacaauaccgggcuggagcucacacugaccaacacgagcauuaucucccauaaauucugcaaucuuucugacgcccacaagaaaaaccuguacgaucauacccucaugagcauuaucacaaccuuucaccuguccauuccgaauuucaaccaguaugaggccaugagcugugacuuuaauggaggcaagaucucuauucaauacaaccugucccacagcuaugcuggcgaugccgcucagcauugcgggacaguggccaauggaguucuccagaccuucaugcgcauggcguggggcgggucuuaccuggcccuugacuccggaagacggggcugggauuguaucaucagcucuuaccaguaucugauuauccaaaacacgacaugggacgaucacugccaguuuucccgccccagcccuauuggguaccucggauucgugucccagaagaccagagacaucuauauuucucggcgccugcuuggcacauuuaccuggacccugagcgauuccgaaggccaugacaugcccgggggauacugucucacaagauggaugcugaucgaggcugaucugaaaugcuucggcaacacggccgucgcuaaguguaaugaaaaacacgacgaggaguuuugcgauauguggcgccucuucgacuucaacaagcaggccauccaacggcugaaagcgccugcccagaugaauauucagcuuaucaacaaggcugugaaugcccugauuaacgaccaacucaugaugaagaaucaccugagagauaucauggggauucccuauugcaacuacagcaaauuuuguuaucuuaauaacaccacaaccggacggacaucucugccucgcugcugucucaucuccaauggcagcuaccugaacgaaacccauuucucugacgauaucgagcagcaggcugacaauaugauuacggaaaugcugcagaaggaguacauggauagacaagggaaaacaccgcucggacugguugaccuuuuuguguucagcaccuccuuuuaucugaucaccauuuuccuccaccuggucaagauccccacacaucggcacauugugggcaaaccuugccccaagccucaucgccugaaccacaugggcaucuguucuugcgggcuuuacaaacagcccggagugccggucagauggaagcggugaggacuaguaauaaggaaacuguaugaaugucugugggcaggaagugaagagauccuucuguaaagguuuuuggaauuaugucugcugaauaauaaacuuuuuugaaauaauaaaucugguagaaaaaugagaucucaaaggcucuuuucagagccaccaaaaaaaaaaaaaaaaaaaaaaaaaaaaaaaaaaaaaaaaaaaaaaaaaaaaaaaaaaaaaaaaagaauu

SEQ ID NO: 32460 - RNA, 1778 nt, Artificial Sequence; identical to SEQ ID NO: 32454
  mRNA product Design b-4 (hSL-A64-N5) comprising derived and/or modified sequence from LASV(Pinneo-NIG-1969;Clade I)__AIT17836__GPCmut7 (opt5)

SEQ ID NO: 32461 - RNA, 1778 nt, Artificial Sequence
  mRNA product Design b-4 (hSL-A64-N5) comprising derived and/or modified sequence from LASV(ISTH0009-NIG-2011;Clade II)__AIT17404__GPCmut7 (opt5)
aggagagucccgcagucggcguccagcggcucugcuuguucgugugugugucguugcaggccuuauucaagcuuaccaugggccagaucauuaccuucuuucaagaggugccccacgucaucgaagagguuaugaacauugugcugaucgcccucagccugcuugcuauucugaaggggaucuacaauguggccacaugcggacucuucggccuggucuccuuucuucugcucugugggagaucuugcagcacgaccuauaaaggaguguacgaacugcagacacuggagcucgacauggcgucccugaacaugaccaugccucuuucuuguacaaagaauaacagccaucacuauaucaugguuggcaaugaaaccgggcuggagcucacacugaccaacacguccauuaucaaucauaaauucugcaaccuuucugaugcucacaagaaaaaucuguacgaccaugcccucaugagcauuaucuccaccuuucaccugagcauuccgaacuucaaucaguaugaggccaugucuugugauuuuaacggaggcaagaucuccgugcaguacaaucugagccacgcuuaugccgucgacgcugccaaccauugcggcacaauugcgaauggggugcuccaaaccuucaugcggauggccuggggaggcucuuacaucgcucuggauuccgggaagggaagcugggacuguaucaugacaucuuaccaguaucuuauuauccagaacaccacgugggaagaucacugccaguuuucccgccccagcccuauuggcuaccuggggcuccugucccaaagaacacgggacaucuauauuucucgcagacuucugggaaccuucacauggacccucagcgauuccgagggcaacgaaacccccggcggguacugucugacacgguggaugcugaucgaggccgagcucaaaugcuuuggaaauacggcuguugccaaguguaacgaaaaacaugacgaggaguucugcgauaugcugcgccuuuuugacuucaauaagcaggcgaucagacggcugaaaaccccugcccagaugagcauucagcucaucaacaaggcugugaaugcccugauuaacgaucaacuuaucaugaagaaucaucugcgcgacauuaugggcauccccuauugcaacuacucuaaauauuguuaccucaaucacacagucaccgggaagacaucccugccuagaugcugucuggugagcaacggaucuuaccucaaugaaacccacuucagcgacgauaucgaacagcaggcugacaacaugauuacggagcugcuucaaaaagaguauauggaucggcagggcaagacaccgcuggggcucguggaccuguuugucuucuccaccucuuuuuaccugaucagcauuuuccuucaccucaucaaaauucccacccaucgccacaucacaggaaagccuugccccaaaccucauagacugaaucacaugggcauuuguuccugcggccuguauaagcaccccgggguuccggugaaguggaaacggugaggacuaguaauaaggaaacuguaugaaugucugugggcaggaagugaagagauccuucuguaaagguuuuuggaauuaugucugcugaauaauaaacuuuuuugaaauaauaaaucugguagaaaaaugagaucucaaaggcucuuuucagagccaccaaaaaaaaaaaaaaaaaaaaaaaaaaaaaaaaaaaaaaaaaaaaaaaaaaaaaaaaaaaaaaaaagaauu

SEQ ID NO: 32462 - RNA, 1778 nt, Artificial Sequence
  mRNA product Design b-4 (hSL-A64-N5) comprising derived and/or modified sequence from LASV(ISTH2010-NIG-2012;Clade II)__AIT17482__GPCmut7 (opt5)
aggagagucccgcagucggcguccagcggcucugcuuguucgugugugugucguugcaggccuuauucaagcuuaccaugggccagaucauuaccuucuuucaagaggugccccacgucaucgaagagguuaugaacauugugcugaucgcccucagccugcuugcuauucugaaggggaucuacaauguggccacaugcggacucuucggccuggucuccuuucuucugcucugugggagaucuugcagcacgaccuauaaaggaguguacgaacugcagacacuggagcucgacauggcgucccugaacaugaccaugccucuuucuuguacaaagaauaacagccaucacuauaucaugguuggcaaugaaaccgggcuggagcucacacugaccaacacguccauuaucaaucauaaauucugcaaccuuucugaugcucacaagaaaaaucuguacgaccaugcccucaugagcauuaucuccaccuuucaccugagcauuccgaacuucaaucaguaugaggccaugucuugugauuuuaacggaggcaagaucuccgugcaguacaaucugagccacgcuuaugccgucgacgcugccaaccauugcggcacaauugcgaauggggugcuccaaaccuucaugcggauggccuggggaggcucuuacaucgcucuggauuccgggaagggaagcugggacuguaucaugacaucuuaccaguaucuuauuauccagaacauuaccugggaagaucacugccaguuuucccgccccagcccuaucggcuaccuggggcuccugucccaaagaacgcgggacauuuauaucucucgcagacuucugggaacauucaccuggacacucagcgauuccgagggcaacgaaacccccggcggguacugucugacccgguggaugcugaucgaggccgagcucaaaugcuuuggaaauacagcuguugccaaguguaacgaaaaacaugacgaggaguucugcgauaugcugcgccuuuuugacuucaauaagcaggcgauuagacggcugaaaacgccugcccagaugagcauccagcucauuaacaaggcugugaaugcccugaucaacgaucaacuuauuaugaagaaucaucugcgcgacaucaugggcauccccuauugcaacuacucuaaauauuguuaccucaaucacaccgucacagggaagaccucccugccuagaugcugucuggugagcaacggaucuuaccucaaugaaacacacuucagcgacgauauugaacagcaggcugacaacaugaucaccgagcugcuucaaaaagaguauauugaucggcagggcaagacgccgcuggggcucguggaccuguuugucuucuccacaucuuuuuaccugaucagcauuuuccuucaccucguuaaaauccccacccaucgccacguggugggaaagccuugccccaaaccucauagacugaaucacaugggcauuuguuccugcggccuguauaagcaccccggggucccggugaaguggaaacggugaggacuaguaauaaggaaacuguaugaaugucugugggcaggaagugaagagauccuucuguaaagguuuuuggaauuaugucugcugaauaauaaacuuuuuugaaauaauaaaucugguagaaaaaugagaucucaaaggcucuuuucagagccaccaaaaaaaaaaaaaaaaaaaaaaaaaaaaaaaaaaaaaaaaaaaaaaaaaaaaaaaaaaaaaaaaagaauu

SEQ ID NO: 32463 - RNA, 1778 nt, Artificial Sequence
  mRNA product Design b-4 (hSL-A64-N5) comprising derived and/or modified sequence from LASV(Lassa virus/H.sapiens-wt/NGA/2015/ISTH_0543;Clade II)__AVO03639__GPCmut7 (opt5)
aggagagucccgcagucggcguccagcggcucugcuuguucgugugugugucguugcaggccuuauucaagcuuaccaugggccagaucauuaccuucuuucaagaggugccccacgucaucgaagagguuaugaacauugugcugaucgcccucagccugcuugcuauucugaaggggaucuacaauguggccacaugcggacucuucggccuggucuccuuucuucugcucugugggagaucuugcagcacgaccuauaaaggaguguacgaacugcagacacuggagcucgacauggcgaaccugaauaugaccaugccucuuuccuguacaaagaacaauucucaucacuauaucaugguuggcaacgaaaccgggcuggagcucacacugaccaauacgagcauuaucaaccauaaauucugcaaucuuuccgaugcucacaagaaaaaccuguacgaccaugcccucaugucuauuaucagcaccuuucaccuguccauuccgaauuucaaccaguaugaggccaugagcugugauuuuaauggaggcaagaucucugugcaguacaaccugucccacacauaugcugucgacgccgcuaaucauugcggcaccauugccaacggggugcuccaaacauucaugcggauggcguggggaggcagcuacaucgcccuggauucugggaagggauccugggacuguaucaugaccagcuaccaguaucuuguuauucagaacacgacaugggaagaucacugccaguuuucucgccccuccccuaucggcuaccuggggcuccugagccaaagaacccgggacauuuauaucucccgcagacuucugggaacauucaccuggacccucucugauagcgagggcaaugaaacacccggcggguacugucugacgcgguggaugcugauugaggcugagcucaaaugcuuuggaaacaccgccguggcuaaguguaaugaaaaacaugacgaggaguucugcgauaugcugcgccuuuuugacuucaacaagcaggccaucagacggcugaaaaccccugcgcagauguccauccagcucauuaauaaggccgucaacgcucugaucaaugaucaacuuauuaugaagaaccaucugcgcgacaucaugggcauucccuauugcaauuacagcaaauauuguuaccucaaccacacagugacagggaagaccucucugccuagaugcugucugguguccaauggaagcuaccucaacgaaacgcacuucucugacgauaucgaacagcaggccgacaauaugaucacagagcugcuucaaaaagaguauauugaucggcagggcaagaccccgcuggggcucgucgaccuguuuguuuucagcaccuccuuuuaccugaucucuauuuuccuucaccucgugaaaauccccacacaucgccacauuaccggaaagccuugccccaaaccucauagacugaaccacaugggcaucuguagcugcggccuguauaagcaccccggggugccggucaaguggaaacggugaggacuaguaauaaggaaacuguaugaaugucugugggcaggaagugaagagauccuucuguaaagguuuuuggaauuaugucugcugaauaauaaacuuuuuugaaauaauaaaucugguagaaaaaugagaucucaaaggcucuuuucagagccaccaaaaaaaaaaaaaaaaaaaaaaaaaaaaaaaaaaaaaaaaaaaaaaaaaaaaaaaaaaaaaaaaagaauu

SEQ ID NO: 32464 - RNA, 1778 nt, Artificial Sequence
  mRNA product Design b-4 (hSL-A64-N5) comprising derived and/or modified sequence from LASV(Lassa virus/H.sapiens-wt/NGA/2016/ISTH_0009;Clade II)__AVO03571__GPCmut7 (opt5)
aggagagucccgcagucggcguccagcggcucugcuuguucgugugugugucguugcaggccuuauucaagcuuaccaugggccagaucauuaccuucuuucaagaggugccccacgucaucgaagagguuaugaacauugugcugaucgcccucagccugcuugcuauucugaaggggaucuacaauguggccacaugcggacuccugggccuugucuccuuccugcuccugugugggagaucuugcagcacgaccuauaaaggaguguacgaacugcagacacucgagcuggacauggcgucccuuaacaugaccaugccucugucuuguacaaagaauaacagccaucacuauaucaugguuggcaaugaaaccgggcucgagcugacacuuaccaacacguccauuaucaaucauaaauuuugcaaccugucugaugcucacaagaaaaaucucuacgaccaugcccugaugagcauuaucuccaccuuccaccugagcauuccgaacuuuaaucaguaugaggccaugucuugugauuucaacggaggccggaucuccgugcaguacaaucucagccacucuuaugcugucgacgccgcuaaccauugcggcacaauugccaauggggugcugcaaaccuuuaugcgcauggcguggggaggcuccuacaucgcccuugauagcgggaagggaucuugggacuguaucaugacauccuaccaguaucugauuauccagaacaccacgugggaagaucacugccaguucagcagacccuccccuauuggcuaccucgggcugcuuucucaacggacacgcgacaucuauauuagcagacggcugcucggaaccuuuacauggacccuguccgauagcgagggcaacgaaacccccggcggguacugucugacacgcuggaugcucaucgaggcugagcugaagugcuucggaaauacggccguugcuaaauguaacgaaaagcaugacgaggaauuuugcgauaugcuuagacuguucgacuuuaauaaacaggccauccggcgccucaagaccccugcgcagaugucuauucagcugaucaacaaagccgugaaugcucuuauuaacgaucaacugaucaugaagaaucaccucagagacauuaugggcauccccuauugcaacuacuccaaguauuguuaccugaaucacacagucaccgggaaaacaagccugccucggugcugucucgugucuaacggaagcuaccugaaugagacccauuucuccgacgauaucgaacagcaggccgacaacaugauuacggagcuucugcaaaaggaguauaucgaucgccagggcaaaacaccgcucgggcugguggaccuguucgucuuuucuaccagcuucuaccuuauuuccaucuuucuccaccugguuaagauucccacccauagacacaucacaggaaaaccuugccccaagccucaucggcugaaucacaugggcauuuguagcugcggccucuauaaccaccccggggugccggugaaauggaagcgcugaggacuaguaauaaggaaacuguaugaaugucugugggcaggaagugaagagauccuucuguaaagguuuuuggaauuaugucugcugaauaauaaacuuuuuugaaauaauaaaucugguagaaaaaugagaucucaaaggcucuuuucagagccaccaaaaaaaaaaaaaaaaaaaaaaaaaaaaaaaaaaaaaaaaaaaaaaaaaaaaaaaaaaaaaaaaagaauu

SEQ ID NO: 32465 - RNA, 1778 nt, Artificial Sequence
  mRNA product Design b-4 (hSL-A64-N5) comprising derived and/or modified sequence from LASV(Lassa virus/H.sapiens-wt/NGA/2016/ISTH_0017;Clade II)__AVO03567__GPCmut7 (opt5)
aggagagucccgcagucggcguccagcggcucugcuuguucgugugugugucguugcaggccuuauucaagcuuaccaugggccagaucauuaccuucuuucaagaggugccccacgucaucgaagagguuaugaacauugugcugaucgcccucagccugcuugcuauucugaaggggaucuacaauguggccacaugcggacucuucggccuggucuccuuucuucugcucugugggagaucuugcagcacgaccuauaaaggaguguacgaacugcagacacuggagcucgacauggcgucccugaacaugaccaugccucuuucuuguacaaagaauaacagccaucacuauaucaugguuggcaaugaaaccgggcuggagcucacacugaccaacacguccauuaucaaucauaaauucugcaaccuuucugaugcucacaagaaaaaucuguacgaccaugcccucaugagcauuaucuccaccuuucaccugagcauuccgaacuucaaucaguaugaggccaugucuugugauuuuaacggaggcaagaucuccgugcaguacaaucugagccacacauaugcuauugacgccgcuaaccauugcggcaccaucgccaaugggguccuccaaacauucaugcggauggcguggggaggcucuuacaucgcccuggauuccgggaagggaagcugggacuguauuaugaccucuuaccaguaucuuaucauucagaacacgacaugggaagaucacugccaguuuucccgccccagcccuaucggcuaccuggggcuccugucccaaagaacccgggacauuuauaucucucgcagacuucugggaacauucaccuggacccucagcgauuccgagggcaacgaaacacccggcggguacugucugacgcgguggaugcugaucgaggcugagcucaaaugcuuuggaaauaccgccguggcuaaguguaacgaaaaacaugacgaggaguucugcgauaugcugcgccuuuuugacuucaauaagcaggccauuagacggcugaaaaccccugcgcagaugagcauccagcucauuaacaaggccguuaaugcucugaucaacgaucaacuuauuaugaagaaucaucugcgcgacaucaugggcauccccuauugcaacuacucuaaauauuguuaccucaaucacacagugacagggaagaccucccugccuagaugcugucuggucagcaacggaucuuaccucaaugaaacgcacuucagcgacgauauugaacagcaggccgacaacaugaucacagagcugcuucaaaaagaguauauggaucggcagggcaagaccccgcuggggcucguggaccuguuuguguucuccaccucuuuuuaccugauuagcaucuuccuucaccucguccgcauucccacacauagacacguuaucggaaaaccuugccccaagccucaucggcugaaucacaugggcauuuguuccugcggccuguauaaacaccccggggugccggugaaguggaagcgcugaggacuaguaauaaggaaacuguaugaaugucugugggcaggaagugaagagauccuucuguaaagguuuuuggaauuaugucugcugaauaauaaacuuuuuugaaauaauaaaucugguagaaaaaugagaucucaaaggcucuuuucagagccaccaaaaaaaaaaaaaaaaaaaaaaaaaaaaaaaaaaaaaaaaaaaaaaaaaaaaaaaaaaaaaaaaagaauu

SEQ ID NO: 32466 - RNA, 1778 nt, Artificial Sequence
  mRNA product Design b-4 (hSL-A64-N5) comprising derived and/or modified sequence from LASV(Lassa virus/H.sapiens-wt/NGA/2018/ISTH_0959;Clade II)__AVV65099__GPCmut7 (opt5)
aggagagucccgcagucggcguccagcggcucugcuuguucgugugugugucguugcaggccuuauucaagcuuaccaugggccagaucauuaccuucuuucaagaggugccccacgucaucgaagagguuaugaacauugugcugaucgcccucagccugcuugcuauucugaaggggaucuacaauguggucacaugcggacucuucggccugguguccuuucuucugcucugugggagaucuugcagcacgaccuauaaaggaguuuacgaacugcagacacuggagcucgacauggccucccugaacaugaccaugccucuuucuuguacaaagaauaacagccaucacuauaucauggugggcaaugaaaccgggcuggagcucacacugaccaacacguccauuaucaaucauaaauucugcaaccuuucugaugcgcacaagaaaaaucuguacgaccaugcucucaugagcauuaucuccaccuuucaccugagcauuccgaacuucaaucaguaugaggccaugucuugugauuuuaacggaggcaagaucuccguccaguacaaucugagccacgccuaugcuauugacgccgcuaaccauugcggcacaaucgccaauggggugcuccaaaccuucaugcggauggcguggggaggcucuuacaucgcccuggauuccgggaagggaagcugggacuguauuaugacaucuuaccaguaucuuaucauucagaacaccacgugggaagaucacugccaguuuucccgccccagcccuaucggcuaccuggggcuccugucccaaagaacacgggacauuuauaucucucgcagacuucugggaaccuucacauggacccucagcgauuccgagggcaacgaaacccccggcggguacugucugacacgguggaugcugaucgaggcugagcucaaaugcuuuggaaauacggccguugcuaaguguaacgaaaaacaugacgaggaguucugcgauaugcugcgccuuuuugacuucaauaagcaggccauuagacggcugaaaaccccugcgcagaugagcauccagcucauuaacaaggccgugaaugcucugaucaacgaucaacuuauuaugaagaaucaucugcgcgacaucaugggcauccccuauugcaacuacucuaaauauuguuaccucaaucacacagucaccgggaagacaucccugccuagaugcugucuggugagcaacggaucuuaccucaaugaaacccacuucagcgacgauauugaacagcaggccgacaacaugaucacggagcugcuucaaaaagaguauauugaucggcagggcaagacaccgcuggggcucguggaccuguuugucuucuccaccucuuuuuaccugaucagcauuuuccuucaccucguuaaaauccccacccaucgccacgugauuggaaagccuugccccaaaccucauagacugaaucacaugggcaucuguuccugcggccuguauaagcaccccggggugccggucaaguggaaacggugaggacuaguaauaaggaaacuguaugaaugucugugggcaggaagugaagagauccuucuguaaagguuuuuggaauuaugucugcugaauaauaaacuuuuuugaaauaauaaaucugguagaaaaaugagaucucaaaggcucuuuucagagccaccaaaaaaaaaaaaaaaaaaaaaaaaaaaaaaaaaaaaaaaaaaaaaaaaaaaaaaaaaaaaaaaaagaauu

SEQ ID NO: 32467 - RNA, 1778 nt, Artificial Sequence
  mRNA product Design b-4 (hSL-A64-N5) comprising derived and/or modified sequence from LASV(LASV003-NIG-2008;Clade II)__AIT17580__GPCmut7 (opt5)
aggagagucccgcagucggcguccagcggcucugcuuguucgugugugugucguugcaggccuuauucaagcuuaccaugggccagaucauuaccuucuuucaagaggugccccacgucaucgaagagguuaugaacauugugcugaucgcccucagccugcuugcuauucugaaggggaucuacaauguggccacaugcggacucuucggccuggucuccuuucuucugcucugugggagaucuugcagcacgaccuauaaaggaguguacgaacugcagacacuggagcucgacauggcgucccugaacaugaccaugccucuuucuuguacaaagaauaacagccaucacuauaucaugguuggcaaugaaaccgggcuggagcucacacugaccaacacguccauuaucaaucauaaauucugcaaccuuucugaugcucacaagaaaaaucuguacgaccaugcccucaugagcauuaucuccaccuuucaccugagcauuccgaacuucaaucaguaugaggccaugucuugugauuuuaacggaggcaagaucuccgugcaguacaaucugagccacacauaugcugucgacgccgcuaaccauugcggcaccauugccaauggggugcuccaaacauucaugcggauggcguggggaggcucuuacaucgcccuggauuccgggaagggaagcugggacuguaucaugaccucuuaccaguaucuuauuauccagaacacgacaugggaagaucacugccaguuuucccgccccagcccuauuggcuaccuggggcuccugucccaaagaacccgggacaucuauauuucucgcagacuucugggaacauucaccuggacccucagcgauuccgagagcaacgaaacacccggcggcuacugucugacgcgguggaugcugaucgaggcugagcucaaaugcuuugggaauaccgccguugcuaaguguaacgaaaaacaugacgaggaguucugcgauaugcugcgccuuuuugacuucaauaagcaggccaucagacggcugaaagcgccugcccagaugucuauucagcucaucaacaaggcugugaaugcccugauuaacgaucaacuuaucaugaagaaucaucugcgcgacauuaugggaauccccuauugcaacuacuccaaauauuguuaccucaaucacacagucaccggcagaacaagccugccucggugcugucuggugucuaacgggagcuaccucaaugaaacccacuucuccgacgauaucgaacagcaggcugacaacaugauuacggagcugcuucaaaaggaguauauggaucgccagggaaaaacaccgcugggccucguggaccuguuugucuucucuaccagcuuuuaccugaucuccauuuuccuucaccucguuaagauccccacccauagacacgugauugggaaaccuugccccaagccucaucggcugaaucacaugggaaucuguagcugcggccuguauaaacaccccggcgugccggucaaguggaagcgcugaggacuaguaauaaggaaacuguaugaaugucugugggcaggaagugaagagauccuucuguaaagguuuuuggaauuaugucugcugaauaauaaacuuuuuugaaauaauaaaucugguagaaaaaugagaucucaaaggcucuuuucagagccaccaaaaaaaaaaaaaaaaaaaaaaaaaaaaaaaaaaaaaaaaaaaaaaaaaaaaaaaaaaaaaaaaagaauu

SEQ ID NO: 32468 - RNA, 1778 nt, Artificial Sequence
  mRNA product Design b-4 (hSL-A64-N5) comprising derived and/or modified sequence from LASV(LASV035-NIG-2009;Clade II)__AIT17588__GPCmut7 (opt5)
aggagagucccgcagucggcguccagcggcucugcuuguucgugugugugucguugcaggccuuauucaagcuuaccaugggccagaucauuaccuucuuucaagaggugccccacgucaucgaagagguuaugaacauugugcugaucgcccucagccugcuugcuauucugaaggggaucuacaauguggccacaugcggacucuucggccuggucuccuuucuucugcucugugggagaucuugcagcacgaccuauaaaggaguguacgaacugcagacacuggagcucgacauggcgucccugaacaugaccaugccucuuucuuguacaaagaauaacagccaucacuauaucaugguuggcaaugaaaccgggcuggagcucacacugaccaacacguccauuaucaaucauaaauucugcaaccuuucugaugcucacaagaaaaaucuguacgaccaugcccucaugagcauuaucuccaccuuucaccugagcauuccgaacuucaaucaguaugaggccaugucuugugauuuuaacggaggcaagaucuccgugcaguacaaucugagccacgcuuaugccgucgacgcugccaaccauugcggcacaauugcgaauggggugcuccaaaccuucaugcggauggccuggggaggcucuuacaucgcucuggauuccgggaagggaagcugggacuguaucaugacaucuuaccaguaucuuauuauccagaacaccacgugggaagaucacugccaguuuucccgccccagcccuauuggcuaccuggggcuccugucccaaagaacacgggacaucuauauuucucgcagacuucugggaaccuucacauggacccucagcgauuccgagggcaacgaaacccccggcggguacugucugacacgguggaugcugaucgaggccgagcucaaaugcuuuggaaauacggcuguugccaaguguaacgaaaaacaugacgaggaguucugcgauaugcugcgccuuuuugacuucaauaagcaggcgaucagacggcugaaagccccugcucagaugagcauucagcucaucaacaaggccgugaaugcucugauuaacgaucaacuuaucaugaagaaucaucugcgcgacauuaugggcauccccuauugcaacuacucuaaauauuguuaccucaaucacaccgucacagggaagaccucccugccuagaugcugucuggugagcaacggaucuuaccucaaugaaacacacuucagcgacgauaucgaacagcaggccgacaacaugauuaccgagcugcuucaaaaagaguauaucgaucggcagggcaagacgccgcuggggcucguggaccuguuugucuucuccacaucuuuuuaccugauuagcaucuuccuucaccucguuaaaauucccacccaucgccacgugaucggaaagccuugccccaaaccucauagacugaaucacaugggcauuuguuccugcggccuguauaagcaccccggggugccggucaaguggaaacggugaggacuaguaauaaggaaacuguaugaaugucugugggcaggaagugaagagauccuucuguaaagguuuuuggaauuaugucugcugaauaauaaacuuuuuugaaauaauaaaucugguagaaaaaugagaucucaaaggcucuuuucagagccaccaaaaaaaaaaaaaaaaaaaaaaaaaaaaaaaaaaaaaaaaaaaaaaaaaaaaaaaaaaaaaaaaagaauu

SEQ ID NO: 32469 - RNA, 1778 nt, Artificial Sequence
  mRNA product Design b-4 (hSL-A64-N5) comprising derived and/or modified sequence from LASV(LASV1000-NIG-2009;Clade II)__AIT17782__GPCmut7 (opt5)
aggagagucccgcagucggcguccagcggcucugcuuguucgugugugugucguugcaggccuuauucaagcuuaccaugggccagaucauuaccuucuuucaagaggugccccacgucaucgaagagguuaugaacauugugcugaucgcccucagccugcuugcuauucugaaggggaucuacaauguggccacaugcggacucuucggccuggucuccuuucuucugcucugugggagaucuugcagcacgaccuauaaaggaguguacgaacugcagacacuggagcucgacauggcgucccugaacaugaccaugccucuuucuuguacaaagaauaacagccaucacuauaucaugguuggcaaugaaaccgggcuggagcucacacugaccaacacguccauuaucaaucauaaauucugcaaccuuucugaugcucacaagaaaaaucuguacgaccaugcccucaugagcauuaucuccaccuuucaccugagcauuccgaacuucaaucaguaugaggccaugucuugugauuuuaacggaggcaagaucuccgugcaguacaaucugagccacacauaugcugucgacgccgcuaaccauugcggcaccauugccaauggggugcuccaaacauucaugcggauggcguggggaggcucuuacaucgcccuggauuccgggaagggaagcugggacuguaucaugaccucuuaccaguaucuuauuauccagaacacgacaugggaagaucacugccaguuuucccgccccagcccuauuggcuaccuggggcuccugucccaaagaacccgggacaucuauauuucucgcagacuucugggaacauucaccuggacccucagcgauuccgagggcaacgaaacacccggcggguacugucugacgcgguggaugcugaucgaggcugagcucaaaugcuuuggaaauaccgccguugcuaaguguaacgaaaaacaugacgaggaguucugcgauaugcugcgccuuuuugacuucaauaagcaggccaucaaaagacugaagaccccugcgcagaugagcauucagcucaucaacaaggccgugaaugcucugauuaacgaucaacuuaucaugaaaaaucaucugcgggacauuaugggcauccccuauugcaacuacucuaaguauuguuaccucaaucacacagucacagggaaaaccucccugccucgcugcugucuggugagcaacggaucuuaccucaaugaaacgcacuucagcgacgauaucgaacagcaggccgacaacaugauuacagagcugcuucaaaaggaguauaucgauagacagggcaaaaccccgcuggggcucguggaccuguuugucuucuccaccucuuuuuaccugauuagcaucuuccuucaccucguuaagauucccacacaucggcacguggugggaaaaccuugccccaagccucaucgccugaaucacaugggcaucuguuccugcggccuguauaagcaccccggggucccggugaaauggaagagaugaggacuaguaauaaggaaacuguaugaaugucugugggcaggaagugaagagauccuucuguaaagguuuuuggaauuaugucugcugaauaauaaacuuuuuugaaauaauaaaucugguagaaaaaugagaucucaaaggcucuuuucagagccaccaaaaaaaaaaaaaaaaaaaaaaaaaaaaaaaaaaaaaaaaaaaaaaaaaaaaaaaaaaaaaaaaagaauu

SEQ ID NO: 32470 - RNA, 1778 nt, Artificial Sequence
  mRNA product Design b-4 (hSL-A64-N5) comprising derived and/or modified sequence from LASV(LASV221-NIG-2010;Clade II)__AIT17624__GPCmut7 (opt5)
aggagagucccgcagucggcguccagcggcucugcuuguucgugugugugucguugcaggccuuauucaagcuuaccaugggccagaucauuaccuucuuucaagaggugccccacgucaucgaagagguuaugaacauugugcugaucgcccucagccugcuugcuauucugaaggggaucuacaauguggccacaugcggacucuucggccuggucuccuuucuucugcucugugggagaucuugcagcacgaccuauaaaggaguguacgaacugcagacacuggagcucgacauggcgucccugaacaugaccaugccucuuucuuguacaaagaauaacagccaucacuauaucaugguuggcaaugaaaccgggcuggagcucacacugaccaacacguccauuaucaaucauaaauucugcaaccuuucugaugcucacaagaaaaaucuguacgaccaugcccucaugagcauuaucuccaccuuucaccugagcauuccgaacuucaaucaguaugaggccaugucuugugauuuuaacggaggcaagaucuccgugcaguacaaucugagccacacauaugcuauugacgccgcuaaccauugcggcaccaucgccaaugggguccuccaaacauucaugcggauggcguggggaggcucuuacaucgcccuggauuccgggaagggaagcugggacuguauuaugaccucuuaccaguaucuuaucauucagaacacgacaugggaagaucacugccaguuuucccgccccagcccuaucggcuaccuggggcuccugucccaaagaacccgggacauuuauaucucucgcagacuucugggaacauucaccuggacccucagcgauuccgagggcaacgaaacacccggcggguacugucugacgcgguggaugcugaucgaggcugagcucaaaugcuuuggaaauaccgccguggcuaaguguaacgaaaaacaugacgaggaguucugcgauaugcugcgccuuuuugacuucaauaagcaggccauuagacggcugaaaaccccugcgcagaugagcauccagcucauuaacaaggccguuaaugcucugaucaacgaucaacuuauuaugaagaaucaucugcgcgacaucaugggcauccccuauugcaacuacucuaaauauuguuaccucaaucacacagugacagggaagaccucccugccuagaugcugucuggucagcaacggaucuuaccucaaugaaacgcacuucagcgacgauauugaacagcaggccgacaacaugaucacagagaugcugcaaaaagaguauauggaucggcagggcaagaccccgcuugggcugguggaccucuuuguguucuccaccucuuuuuaccugauuagcaucuuccugcaccuugucaaaauucccacacaucgccacguuaucggaaagccuugccccaaaccucauagacucaaucacaugggcauuuguuccugcggccuguauaagcaccccggggugccggugaaguggaaacggugaggacuaguaauaaggaaacuguaugaaugucugugggcaggaagugaagagauccuucuguaaagguuuuuggaauuaugucugcugaauaauaaacuuuuuugaaauaauaaaucugguagaaaaaugagaucucaaaggcucuuuucagagccaccaaaaaaaaaaaaaaaaaaaaaaaaaaaaaaaaaaaaaaaaaaaaaaaaaaaaaaaaaaaaaaaaagaauu

SEQ ID NO: 32471 - RNA, 1778 nt, Artificial Sequence
  mRNA product Design b-4 (hSL-A64-N5) comprising derived and/or modified sequence from LASV(LASV237-NIG-2010;Clade II)__AIT17638__GPCmut7 (opt5)
aggagagucccgcagucggcguccagcggcucugcuuguucgugugugugucguugcaggccuuauucaagcuuaccaugggccagaucauuaccuucuuucaagaggugccccacgucaucgaagagguuaugaacauugugcugaucgcccucagccugcuugcuauucugaaggggaucuacaauguggccacaugcggacucuucggccuggucuccuuucuucugcucugugggagaucuugcagcacgaccuauaaaggaguguacgaacugcagacacuggagcucgacauggcgucccugaacaugaccaugccucuuucuuguacaaagaauaacagccaucacuauaucaugguuggcaaugaaaccgggcuggagcucacacugaccaacacguccauuaucaaucauaaauucugcaaccuuucugaugcucacaagaaagaccuguacgaucaugcccucaugagcauuaucuccaccuuucaccugagcauuccgaauuucaaccaguaugaggccaugucuugugacuuuaauggaggcaagaucuccgugcaguacaaccugagccacacauaugcugucgaugccgcuaaucauugcggcaccauugccaacggggugcuccaaacauucaugcggauggcguggggaggcucuuacaucgcccuggacuccgggaagggaagcugggauuguaucaugaccucuuaccaguaucuuauuauccagaauacgacaugggaagaccacugccaguuuucccgccccagcccuauuggcuaccuggggcuccugucccaaagaacccgggauaucuauauuucucgcagacuucugggaacauucaccuggacccucagcgacuccgagggcaacgaaacacccggcggguacugucugacgcgguggaugcugaucgaggcugagcucaaaugcuuuggaaacaccgccguugcuaaguguaaugaaaaacaugaugaggaguucugcgacaugcugcgccuuuuugauuucaacaagcaggccaucagacggcugaaaaccccugcgcagaugagcauucagcucaucaauaaggccgugaacgcucugauuaaugaccaacuuaucaugaagaaccaucugcgcgacauuaugggcauccccuauugcaauuacucuaaauauuguuaccucaaccacacagucacagggaagaccucccugccuagaugcugucuggugagcaauggaucuuaccucaacgaaacgcacuucagcgaugacaucgaacagcaggccgauaauaugauuacagagcugcuucaaaaagaguauauggaccggcagggcaagaccccgcuggggcucguggaucuguuugucuucuccaccucuuuuuaccugaucagcauuuuccuucaccucaucaaaauucccacacaucgccacaucaccggaaagccuugccccaaaccucauagacugaaccacaugggcauuuguuccugcggccuguauaagcaccccgggguuccggugaaguggaaacggugaggacuaguaauaaggaaacuguaugaaugucugugggcaggaagugaagagauccuucuguaaagguuuuuggaauuaugucugcugaauaauaaacuuuuuugaaauaauaaaucugguagaaaaaugagaucucaaaggcucuuuucagagccaccaaaaaaaaaaaaaaaaaaaaaaaaaaaaaaaaaaaaaaaaaaaaaaaaaaaaaaaaaaaaaaaaagaauu

SEQ ID NO: 32472 - RNA, 1778 nt, Artificial Sequence
  mRNA product Design b-4 (hSL-A64-N5) comprising derived and/or modified sequence from LASV(LASV253-NIG-2011;Clade II)__AIT17670__GPCmut7 (opt5)
aggagagucccgcagucggcguccagcggcucugcuuguucgugugugugucguugcaggccuuauucaagcuuaccaugggccagaucauuaccuucuuucaagaggugccccacgucaucgaagagguuaugaacauugugcugaucgcccucagccugcuugcuauucugaaggggaucuacaauguggccacaugcggacucuucggccuggucuccuuucuucugcucugugggagaucuugcagcacgaccuauaaaggaguguacgaacugcagacacuggagcucgacauggcgucccugaacaugaccaugccucuuucuuguacaaagaauaacagccaucacuauaucaugguuggcaaugaaaccgggcuggagcucacacugaccaacacguccauuaucaaucauaaauucugcaaccuuucugaugcucacaagaaaaaucuguacgaccaugcccucaugagcauuaucuccaccuuucaccugagcauuccgaacuucaaucaguaugaggccaugucuugugauuuuaacggaggcaagaucuccgugcaguacaaucugagccacacauaugcugucgacgccgcuaaccauugcggcaccauugccaauggggugcuccaaacauucaugcggauggcguggggaggcucuuacaucgcccuggauuccgggaagggaagcugggacuguaucaugaccucuuaccaguaucuuauuauccagaacacgacaugggaagaucacugccaguuuucccgccccagcccuauuggcuaccuggggcuccugucccaaagaacccgggacaucuauauuucucgcagacuucugggaacauucaccuggacccucagcgauuccgagggcaacgaaacacccggcggguacugucugacgcgguggaugcugaucgaggcugagcucaaaugcuuuggaaauaccgccguugcuaaguguaacgaaaaacaugacgaggaguucugcgauaugcugcgccuuuuugacuucaauaagcaggccaucagacggcugaaagcgccugcccagaugagcauucagcucaucaacaaggcugugaaugcccugauuaacgaucaacuuaucaugaagaaucaucugcgcgacauuaugggcauccccuauugcaacuacucuaaauauuguuaccucaaucacacagucaccgggagaacaucccugccucggugcugucuggugagcaacggaucuuaccucaaugaaacccacuucagcgacgauaucgaacagcaggcugacaacaugauuacggagcugcuucaaaaggaguauaucgaucgccagggcaaaacaccgcuggggcucguggaccuguuugucuucuccaccucuuuuuaccugauuagcaucuuccuucaccucguuaagauucccacccauagacacaucauuggaaaaccuugccccaagccucaucggcugaaucacaugggcaucuguuccugcggccuguauaaacaccccggggugccggugaaguggaagcgcugaggacuaguaauaaggaaacuguaugaaugucugugggcaggaagugaagagauccuucuguaaagguuuuuggaauuaugucugcugaauaauaaacuuuuuugaaauaauaaaucugguagaaaaaugagaucucaaaggcucuuuucagagccaccaaaaaaaaaaaaaaaaaaaaaaaaaaaaaaaaaaaaaaaaaaaaaaaaaaaaaaaaaaaaaaaaagaauu

SEQ ID NO: 32473 - RNA, 1778 nt, Artificial Sequence
  mRNA product Design b-4 (hSL-A64-N5) comprising derived and/or modified sequence from LASV(LASV254-NIG-2011;Clade II)__AIT17674__GPCmut7 (opt5)
aggagagucccgcagucggcguccagcggcucugcuuguucgugugugugucguugcaggccuuauucaagcuuaccaugggccagaucauuaccuucuuucaagaggugccccacgucaucgaagagguuaugaacauugugcugaucgcccucagccugcuugcuauucugaaggggaucuacaauguggccacaugcggacucuucggccuggucuccuuucuucugcucugugggagaucuugcagcacgaccuauaaaggaguguacgaacugcagacacuggagcucgacaugaccaaccugaauaugacaaugccucuuuccuguaccaagaacaauucucaucacuauaucaugguuggcaacgaaacagggcuggagcucacccugacgaauaccagcauuaucaaccauaaauucugcaaucuuuccgaugcgcacaagaaaaaccuguacaaucaugcucucaugucuauuaucagcacauuucaccuguccauuccgaacuucaaucaguaugaggccaugagcugugacuuuaacggaggcaagaucucugugcaguacaaucugucccacagcuaugccgucgaugcugccaaccauugcggcaccauugcuaacggggugcuccaaacauucaugcggauggccuggggaggcucuuacaucgcgcuggacuccgggaagggaaauugggauuguaucaugaccagcuaccaguaucuuauuauccagaacacgacaugggaagaccacugccaguuuucucgccccuccccuauuggcuaccuggggcuccugagccaaagaacccgggauaucuauauuucccgcagacuucugggaacauucaccuggacccucucugacagcgagggcaaugaaacacccggcggguacugucugacgcgguggaugcugaucgaggccgagcucaaaugcuuuggaaacaccgcuguugccaaguguaaugaaaaacaugaugaggaguucugcgacaugcugcgccuuuuugauuucaacaagcaggcuaucagacggcugaaaaccccugcccaggcgaauauucagcucaucaacaaggccgugaaugcucugauuaacgaccaacuuaucaugaagaaucaucugcgcgauauuaugggcauccccuauugcaacuacuccaaauauuguuaccucaaucacacagucacagggaagaccagccugccuagaugcugucuggugucuaacggauccuaccucaaugaaacgcacuucagcgacgacaucgaacagcaggccgauaacaugauuacagagcugcuucaaaaagaguauauggaccggcagggcaagaccccgcuggggcucguggaucuguuugucuucucuaccagcuuuuaccugaucuccauuuuccuucaccucguuaaaauccccacacaucgccacgugauuggaaagccuugccccaaaccucauagacugaaccacaugggcaucuguucuugcggccuguauaagcaccccggggugccggucaaguggaaacggugaggacuaguaauaaggaaacuguaugaaugucugugggcaggaagugaagagauccuucuguaaagguuuuuggaauuaugucugcugaauaauaaacuuuuuugaaauaauaaaucugguagaaaaaugagaucucaaaggcucuuuucagagccaccaaaaaaaaaaaaaaaaaaaaaaaaaaaaaaaaaaaaaaaaaaaaaaaaaaaaaaaaaaaaaaaaagaauu

SEQ ID NO: 32474 - RNA, 1778 nt, Artificial Sequence
  mRNA product Design b-4 (hSL-A64-N5) comprising derived and/or modified sequence from LASV(Nig08-A19;Clade III)__ADU56618__GPCmut7 (opt5)
aggagagucccgcagucggcguccagcggcucugcuuguucgugugugugucguugcaggccuuauucaagcuuaccaugggccagaucgugaccuucuuucaagaggucccccacguuauugaagaggugaugaacaucgugcugauugcccucagcauccuggcuauucuuaaggggcuguacaauaucgccacaugcggacucaucggccuggucacguuccuucugcucuccgggagaucuuguagcaugaccuauaaaggaguguacgaacugcagacacuggagcucaacaugaauacccugaacaugacaaugccucuuuccugcaccaagaauaacucucaucacuauauuaugguuggcaaugaaacagggcuggagcucacccugacgaacaccagccuucugcaucacaaauuuuguaaucucuccgacgcgcauaagaaaaaccuguacgaucacacacugaugucuaucauuagcaccuuccaccucuccaucccgaauuuuaaccaguaugaggcuaugagcugcgacuucaauggaggcaagauuacagugcaguacaaccugucucauuccuaugccaucgaugccgcuaaucacuguggcaccgucgccaacggggugcuucaaacguuuaugcggauggcuuggggaggcagcuacauugcccuggacucugggcgcggaaagugggauugcaucaugacauccuaccaguaucucaucauucagaacaccacaugggaagaccauugucaguucagcagacccucuccuaucggcuaccuggggcuucugucccaacggacccgcgauauuuauaucagcagacggcuccugggaaccuuuacauggacgcuguccgacucugagggcaaugaaacccccggcggguacugccucacacgcuggaugcugauugaggcggagcuuaaauguuucggaaacaccgccguugcuaagugcaaugaaaaacacgaugaggaauuuugugacaugcugagacucuucgauuuuaacaagcaggccauccggcgccugaaagcuccugcccagaugagcauccagcuuauuaauaaggcggugaacgcccugaucaaugaccaacucauuaugaagaaccaccugagagauaucaugggcauucccuauugcaauuacuccaaauauugcuaccugaaccauacaagcaccgggcggacgucucucccucgcuguugccuggucuccaauggaagcuaccuuaacgagacacacuucucugacgacaucgaacagcaggcugauaauaugaucaccgagaugcugcaaaaggaguaucucgacagacagggcaaaaccccgcuggggcugguggaucuuuucguguuuagcacauccuucuaccucauuucuaucuuucugcaucuggucaagauucccacccaccggcauaucguuggaaaaccuugucccaagccucaccgccucaaccacaugggcauuugcagcuguggccuguauaaacagcccggggugccggugagauggaagcggugaggacuaguaauaaggaaacuguaugaaugucugugggcaggaagugaagagauccuucuguaaagguuuuuggaauuaugucugcugaauaauaaacuuuuuugaaauaauaaaucugguagaaaaaugagaucucaaaggcucuuuucagagccaccaaaaaaaaaaaaaaaaaaaaaaaaaaaaaaaaaaaaaaaaaaaaaaaaaaaaaaaaaaaaaaaaagaauu

SEQ ID NO: 32475 - RNA, 1781 nt, Artificial Sequence
  mRNA product Design b-4 (hSL-A64-N5) comprising derived and/or modified sequence from LASV(G1180-SLE-2010;Clade IV)__AIT17168__GPCmut7 (opt5)
aggagagucccgcagucggcguccagcggcucugcuuguucgugugugugucguugcaggccuuauucaagcuuaccaugggccagaucgugaccuucuuucaagaggucccccacguuauugaagaggugaugaacaucgugcugauugcccucagcauccuggcuguccuuaaggggcuguacaauuucgccacaugcggacucgugggccugcuuacguuucugcuccugugugggagauccugcaccgcgucucgguauaaaggaguuuacgaacugcagacacucgagcugaacauggaaacccuuaauaugacaaugccucugagcuguaccaagaacaauucccaucacuauauuauggugggcaacgagacagggcucgagcugacccuuacgaauaccucuaucaucaaccauaaauucugcaaucugagcgacgcucacaagaaaaaccucuacgaucaugcccugauguccauuaucucuacauuucaccugagcauuccgaauuucaaccaguaugaagccauguccugugacuuuaauggaggcaagaucagcguccaguacaaccucucucacuccuaugcuggcgaugccgcuaaucauugcgggaccguggccaacggaguucugcaaacauucaugcgcauggcguggggcgggagcuacauugcccuugacucuggacacggcuccugggauuguaucaugaccagcuaccaguaucugauuauccagaacacgacaugggaggaccauugccaguuuucuagacccuccccuaucggguaccucggacugcuuagccaacggacccgcgauauuuauaucuccagacggcugcucggcacauucaccuggacccugucugacagcgaaggcaaggauacacccgggggauacugucugacgcgcuggaugcucauugaggcugagcugaaaugcuuuggcaauaccgccguggcuaaguguaacgaaaaacacgacgaggaguucugcgauaugcuuagacuguuugacuucaauaagcaggccauccagcggcucaaagcgccugcccagauguccauucaacugaucaacaaggcugucaaugcccuuaucaacgaucagcugauuaugaagaaucaccuccgcgacaucauggggauucccuauugcaacuacagcaaauauuguuaccugaaucauacaaccacaggaaagaccucucugccuaaaugcugucucguguccaacggcagcuaccugaaugaaacgcacuucucugacgauaucgaacagcaagcugacaacaugauuacagagaugcuucagaaggaguauauggaaagacaggggaaaaccccgcugggacucguggaucuguuugucuucagcaccuccuuuuaccugaucucuaucuuccuucaucucguuaagauucccacacaccggcauaucgugggcaaaagcugcccuaagccccaccgccugaaucacaugggcauuuguuccugcgggcuguauaagcagccuggagugcccgucaaauggaagagaugaggacuaguaauaaggaaacuguaugaaugucugugggcaggaagugaagagauccuucuguaaagguuuuuggaauuaugucugcugaauaauaaacuuuuuugaaauaauaaaucugguagaaaaaugagaucucaaaggcucuuuucagagccaccaaaaaaaaaaaaaaaaaaaaaaaaaaaaaaaaaaaaaaaaaaaaaaaaaaaaaaaaaaaaaaaaagaauu

SEQ ID NO: 32476 - RNA, 1781 nt, Artificial Sequence
  mRNA product Design b-4 (hSL-A64-N5) comprising derived and/or modified sequence from LASV(G1442-SLE-2011;Clade IV)__AIT17180__GPCmut7 (opt5)
aggagagucccgcagucggcguccagcggcucugcuuguucgugugugugucguugcaggccuuauucaagcuuaccaugggccagaucgugaccuucuuucaagaggucccccacguuauugaagaggugaugaacaucgugcugauugcccucagcauccuggcuguccuuaaggggcuguacaauguggccacaugcggacucauuggccugguuacguuccuucugcucugugggagauccugcaccacaacccuguauaaaggaguguacgaacugcagacacucgagcugaacauggaaacccuuaauaugacaaugccucugucuuguaccaagaacaauagccaucacuauauccgggucggcaacgagacggggcucgagcugacccuuacaaauaccuccaucauuaaccauaaauuuugcaaucugucugacgcgcacaagaaaaaccucuacgaucaugcucugaugagcaucauuuccacauuccaccugucuaucccgaauuuuaaccaguaugaagccaugagcugugacuucaauggaggcaagauuuccgugcaguacaaccucagccacucuuaugccggcgaugcugccaaucauugcgggaccguugcuaacggagugcugcaaacguuuaugcgcauggccuggggcggguccuacaucgcgcuugacagcggaagaggcaacugggauuguauuaugacaucuuaccaguaucugaucauccagaauaccacaugggacgaucacugccaguucucccggcccagcccuauuggguaccucggacugcuuucucaacgcaccagagacgucuauaucucccggcgccugcucggcaccuuuacauggacgcugagcgauuccgagggcaaggacacccccgggggauacugucugacaagauggaugcucauugaagccgagcugaaaugcuucggcaacaccgcuguggccaaguguaaugagaaacaugaugaagaguuuugcgacaugcuucggcuguucgauuuuaacaagcaggcuauccagcgccucaaagccccugcgcagaugucuauucaacugaucaauaaggccgugaacgcucuuaucaaugaccagcugauuaugaagaaccaccucagagacaucauggggauucccuauugcaauuacagcaaauauuguuaccugaacaauacagccaccggaaagacgucccugccuaaaugcugucucaucagcaacggcucuuaccugaaugaaacacacuucuccgaugacauugagcaggaagcugauaacaugaucaccgagaugcuucaaaaggaguauauggaacggcaggggaaaaccccgcugggacucgucgaccuguucguuuuuagcacaucuuucuaccugaucagcauuuuucuucaucucgugaagauccccacccaccgccauauugugggcaaauccugcccuaagccccacagacugaaucauaugggcaucuguucuugcgggcuguauaagcagccuggaguccccgugcgguggaaacgcugaggacuaguaauaaggaaacuguaugaaugucugugggcaggaagugaagagauccuucuguaaagguuuuuggaauuaugucugcugaauaauaaacuuuuuugaaauaauaaaucugguagaaaaaugagaucucaaaggcucuuuucagagccaccaaaaaaaaaaaaaaaaaaaaaaaaaaaaaaaaaaaaaaaaaaaaaaaaaaaaaaaaaaaaaaaaagaauu

SEQ ID NO: 32477 - RNA, 1781 nt, Artificial Sequence
  mRNA product Design b-4 (hSL-A64-N5) comprising derived and/or modified sequence from LASV(G3010-SLE-2013;Clade IV)__AIT17344__GPCmut7 (opt5)
aggagagucccgcagucggcguccagcggcucugcuuguucgugugugugucguugcaggccuuauucaagcuuaccaugggccagaucgugaccuucuuucaagaggucccccacguuauugaagaggugaugaacaucgugcugauugcccucagcauccuggcuguccuuaaggggcuguacaauuucgccacaugcggacucgugggccugguuacguuucuucugcucugugggagauccugcaccacaucucuguauaaaggaguguacgaacugcagacccucgagcugaacauggaaacacuuaauaugaccaugccucugagcuguacaaagaacaauucccaucacuauauuauggucggcaacgagaccgggcucgagcugacgcuuaccaauacaucuaucaucaaccauaaauucugcaaucugagcgacgcgcacaagaaaaaccucuacaaucaugcucugauguccauuaucucuaccuuucaccugagcauuccgaacuucaaucaguaugaagccauguccugugauuuuaacggaggcaagaucagcgugcaguacaaucucucucacuccuaugccggcgacgcugccagccauugcgggacaguugcuaacggagugcugcaaaccuucaugcggauggccuggggcgggucuuacauugcgcuugauuccggauacggcaagugggacuguaucaugacgagcuaucaguaccugauuauccagaacacaaccugggaggaucacugccaguuuucucgccccuccccuaucggguaucucggacugcuuagccaaagaacacgggacauuuacaucucccgcagacugcucggcaccuucaccuggacacugucugauagcgaaggcaaagacacgcccgggggauauugucugacccgguggaugcucauugaggccgagcugaagugcuuuggcaauacagcugucgccaaauguaacgaaaagcaugaugaggaguucugcgacaugcuucgccuguuugauuucaauaaacaggcuauccagagacucaagaccccugcccagauguccauucaacugaucaacaaggcggugaaugcccuuaucaacgaccagcugauuaugaaaaaucaccuccgggauaucauggggauucccuacugcaacuauagcaaguacuguuaccugaaucacacaaccacgggaaaaacaucucugccuaagugcugucucguguccaacggcagcuaucugaaugaaacccauuucucugacgacaucgaacagcaagcugauaacaugauuaccgagaugcuucagaaagaguacauggaacgccaggggaagacaccgcugggacucgucgaccuguuuguuuucagcaccuccuuuuaucugaucucuaucuuccuucaccucgugaaaauucccacacauagacacaucgugggcaagagcugcccuaagccccaucggcugaaucacaugggcauuuguuccugcgggcuguacaaacagccuggaguccccgugcgcuggaagagaugaggacuaguaauaaggaaacuguaugaaugucugugggcaggaagugaagagauccuucuguaaagguuuuuggaauuaugucugcugaauaauaaacuuuuuugaaauaauaaaucugguagaaaaaugagaucucaaaggcucuuuucagagccaccaaaaaaaaaaaaaaaaaaaaaaaaaaaaaaaaaaaaaaaaaaaaaaaaaaaaaaaaaaaaaaaaagaauu

SEQ ID NO: 32478 - RNA, 1781 nt, Artificial Sequence
  mRNA product Design b-4 (hSL-A64-N5) comprising derived and/or modified sequence from LASV(G502-SLE-2009;Clade IV)__AIT17126__GPCmut7 (opt5)
aggagagucccgcagucggcguccagcggcucugcuuguucgugugugugucguugcaggccuuauucaagcuuaccaugggccagaucgugaccuucuuucaagaggucccccacguuauugaagaggugaugaacaucgugcugauugcccucagcauccuggcuguccuuaaggggcuguacaauuucgccacaugcggacucgugggccugcuuacguuucugcuccugugugggagauccugcaccacaggacuguauaaaggcguuuacgaacuccagacccuggagcuuaacauggaaacacugaauaugaccaugccucucucuuguacaaagaacaauagccaucacuauauuaugguggggaacgagaccggacuggagcuuacgcugaccaauacauccaucaucaaccauaaauucugcaaucucucugacgcgcacaagaaaaaccuguacgaucaugcucugaugagcauuaucuccaccuuucaccucucuauuccgaauuucaaccaguaugaagccaugagcugugacuuuaauggcggcaagaucuccguccaguacaaccugagccacucuuaugccggggaugcugccgaccauugcggaacaguggcuaauggcguucuucaaaccuucaugcggauggccuggggaggguccuacauugcgcuggauagcggccgcgggagaugggacuguaucaugacgucuuaccaguaucucauuauccagaacacaaccugggaggaucacugccaguuuucccggcccagcccuaucggauaccugggccuucugucucaacgcacaagagacauuuauaucucccggcgccuccugggcaccuucaccuggacacugagcgauuccgaagggaaggacacgcccggaggcuacugucucaccagauggaugcugauugaggccgagcuuaaaugcuuugggaacacagcuguggccaaguguaaugaaaaacaugaugaggaguucugcgacaugcugcggcucuuugauuucaacaagcaggcuauccagcgccugaaagccccugcgcagaugucuauucaacuuaucaauaaggccgucaacgcucugaucaaugaccagcucgugaugaagaaccaccugagagacauuaugggaauccccuauugcaauuacagccgguauuguuaccugaaccacaccacaaccggccgcacgucccucccuaaaugcugucuggugagcaaugggucuuaccuuaacgaaacacauuucuccgaugacauugaacagcaagccgauaauaugaucaccgagaugcugcagaaggaguauauggaaagacagggaaaaaccccgcucggccuggucgaccuguuuguuuucagcacaucuuuuuaccuuauuagcaucuuccuccaccuggugaagauccccacccaucggcacauugugggcaaauccugcccuaagccccaucgccugaaccacauggggaucuguucuugcggacucuauaaacagccuggcguccccgugaaguggaagagaugaggacuaguaauaaggaaacuguaugaaugucugugggcaggaagugaagagauccuucuguaaagguuuuuggaauuaugucugcugaauaauaaacuuuuuugaaauaauaaaucugguagaaaaaugagaucucaaaggcucuuuucagagccaccaaaaaaaaaaaaaaaaaaaaaaaaaaaaaaaaaaaaaaaaaaaaaaaaaaaaaaaaaaaaaaaaagaauu

SEQ ID NO: 32479 - RNA, 1781 nt, Artificial Sequence
  mRNA product Design b-4 (hSL-A64-N5) comprising derived and/or modified sequence from LASV(G733-SLE-2010;Clade IV)__AIT17154__GPCmut7 (opt5)
aggagagucccgcagucggcguccagcggcucugcuuguucgugugugugucguugcaggccuuauucaagcuuaccaugggccagaucgugaccuucuuucaagaggucccccacguuauugaagaggugaugaacaucgugcugauugcccucagcauccuggcuguccuuaaggggcuguacaauuucgccacaugcggaauugugggccucguuuccuuucugcuucugugugggagaucuugcacgaccagccucuauaaaggaguguacgaacugcagacacuggagcucaacauggaaacccugaauaugacaaugccucuuuccuguaccaagaacaauucucaucacuauaucauggucggcaacgagacagggcuggagcucacccugacgaauaccagcaucauuaaccauaaauucugcaaucuuuccgacgcgcacaagaaaaaccuguacgaucaugcucucaugucuaucauuagcacauuucaccuguccaucccgaauuucaaccaguaugaagccaugagcugugacuuuaauggaggcaagauuucugugcaguacaaccugucccacagcuaugccggcgaugcugccaaucauugcgggaccaucgcuaacggaguucuccaaacauucaugcggauggccuggggcgggucuuacauugcgcuggacuccggacgcgauagaugggacuguaucaugaccagcuaccaguaucuuaucauucagaacacgacaugggaggaucacugccaguuuucucggcccuccccuaucggcuaccuggggcuccugagccaacgcaccagagacauuuauaucucccggcgccuucugggaacauucaccuggacccucucugauagcgaaggcaaggacacacccggcggguacugucugacgagauggaugcugauugaggccgagcucaaaugcuuuggaaauaccgcuguggccaaguguaacgaaaaacaugaugaggaguucugcgacaugcugcggcuuuuugauuucaauaagcaggcuauccagcgccugaaagccccugcgcagauguccauccaacucauuaacaaggccgucaaugcucugaucaacgaccagcuuauuaugaagaaucaccugagagacaucaugggcauucccuauugcaacuacagcaaauauuguuaccucaaucacacaaccacagggaagaccucucugccuaaaugcugucugguguccaacggaagcuaccucaaugaaacgcauuucucugaugacaucgaacagcaagccgauaacaugaucacagagaugcugcagaaggaguauauggaacggcagggcaaaaccccgcuugggcugguggaccucuuugucuucagcaccuccuuuuaccugauuucuaucuuccugcaccuuguuaagauucccacacaucgccacguggugggaaaaagcugcccuaagccccauagacucaaucacaugggcaucuguuccugcggccuguaugggcagccuggaguccccgugaaguggaaacggugaggacuaguaauaaggaaacuguaugaaugucugugggcaggaagugaagagauccuucuguaaagguuuuuggaauuaugucugcugaauaauaaacuuuuuugaaauaauaaaucugguagaaaaaugagaucucaaaggcucuuuucagagccaccaaaaaaaaaaaaaaaaaaaaaaaaaaaaaaaaaaaaaaaaaaaaaaaaaaaaaaaaaaaaaaaaagaauu

SEQ ID NO: 32480 - RNA, 1781 nt, Artificial Sequence
  mRNA product Design b-4 (hSL-A64-N5) comprising derived and/or modified sequence from MOPV/LASV reassortant(IGS-1;Clade IV)__AFY05576__GPCmut7 (opt5)
aggagagucccgcagucggcguccagcggcucugcuuguucgugugugugucguugcaggccuuauucaagcuuaccaugggccagaucgugaccuucuuucaagaggucccccacguuauugaagaggugaugaacaucgugcugauugcccucagcguccuggcugugcuuaaggggcuguacaauuucgccacaugcggacucguuggccuggugacguuucuucugcucugugggagauccugcaccacaucucuguauaaaggagucuacgaacugcagacccucgagcugaacauggaaacacuuaauaugaccaugccucugagcuguacaaagaacaauucccaucacuauaucauggugggcaacgagaccgggcucgagcugacgcuuaccaauacaucuauuaucaaccauaaauucugcaaucugagcgacgcgcacaagaaaaaccucuacgaucaugcucugauguccaucauuucuaccuuucaccugagcaucccgaauuucaaccaguaugaagccauguccugugacuuuaauggaggcaagauuagcguucaguacaaccucucucacuccuaugccggcgaugcugccaaucauugcgggacaguggcuaacggaguccugcaaaccuucaugcggauggccuggggcgggagcuacaucgcgcuugacucuggacgcggcaacugggauuguauuaugacguccuaccaguaucugaucauucagaauacaaccugggaggaccacugccaguuuagcagacccucuccuaucggguaccucggacugcuuucccaacggacacgcgauaucuauauuagcagacggcugcucggcaccuucaccuggacacuguccgacucugaaggcgaggauacgcccgggggauacugucugacccgcuggaugcucaucgaggccgaacugaagugcuuuggcaacacagcuguggccaaauguaaugagaagcaugacgaagaguucugcgauaugcuuagacuguuugacuucaacaaacaggcuauucagcggcucaaggccccugcgcagaugagcauccaacugauuaauaaagccgugaacgcucuuaucaaugaucagcugaucaugaagaaccaccuccgcgacauuauggggauccccuauugcaauuacuccaaguauuguuaccugaaccacaccacaaccggaagaacgagccugccuaaaugcugucucgucucuaauggcuccuaccugaacgaaacacauuucagcgacgauauugagcagcaagccgacaauaugaucaccgagaugcuucagaaggaauauauggagcggcaggggaaaaccccgcugggacucguugaucuguuuguguucucuaccagcuuuuaccugauuuccaucuuccuucaccucgugaagauccccacacaucgccacauugucggcaaaucuugcccuaagccccauagacugaaccacaugggcaucuguagcugcgggcuguauaaacagccuggagugcccguuaaguggaagcggugaggacuaguaauaaggaaacuguaugaaugucugugggcaggaagugaagagauccuucuguaaagguuuuuggaauuaugucugcugaauaauaaacuuuuuugaaauaauaaaucugguagaaaaaugagaucucaaaggcucuuuucagagccaccaaaaaaaaaaaaaaaaaaaaaaaaaaaaaaaaaaaaaaaaaaaaaaaaaaaaaaaaaaaaaaaaagaauu

SEQ ID NO: 32481 - RNA, 1781 nt, Artificial Sequence
  mRNA product Design b-4 (hSL-A64-N5) comprising derived and/or modified sequence from LASV(LM765-SLE-2012;Clade IV)__AIT17814__GPCmut7 (opt5)
aggagagucccgcagucggcguccagcggcucugcuuguucgugugugugucguugcaggccuuauucaagcuuaccaugggccagaucgugaccuucuuucaagaggucccccacguuauugaagaggugaugaacaucgugcugauugcccucagcauccuggcuguccuuaaggggcuguacaauuucgccacaugcggacucgugggccugguuacguuucuucugcucugugggagauccugcaccacaucucuguauaaaggaguguacgaacugcagacccucgagcugaacauggaaacacuuaauaugaccaugccucugagcuguacaaagaacaauucccaucacuauauuauggucggcaacgagaccgggcucgagcugacgcuuaccaauacaucuaucaucgaccauaaauucugcaaccugagcgaugcgcaccggaagaaucucuacgaccaugcucugauguccauuaucucuaccuuucaccugagcauuccgaacuucaaucaguaugaagccauguccugugauuuuaacggaggcaaaaucagcgugcaguacaaucucucucacuccuaugccaaggacgcugccgaucauugcggcacaguugcuaacggggugcugcaaaccuucaugcgcauggccuggggaggcagcuacauugcgcuugacucugggagaggacggugggauuguaucaugacguccuaccaguaucugauuauccagaauacaaccugggaggaccacugccaguuuagccgccccucuccuaucggcuaccucgggcugcuuucccaaagaacacgggauauuuauaucagccgcagacugcucggaaccuucaccuggacacuguccgacucugaaggcaaggauacgcccggcggguacugucugacccgguggaugcucauugaggccgagcugaaaugcuuuggaaacacagcugucgccaaguguaacgaaaaacaugacgaggaguucugcgauaugcuucgccuguuugacuucaauaagcaggcuauccagagacucaaagccccugcgcagaugagcauucaacugaucaacaaggccgugaaugcucuuaucaacgaccagcugauuaugaagaaucaccuccgggauaucaugggcauucccuauugcaacuacuccaaauauuguuaccugaaucacaccacaaccgggaagacgagccugccuaaaugcugucucgugucuaacggauccuaccugaaugaaacacauuucagcgacgauaucgaacagcaagccgacaacaugauuaccgagaugcuucagaaggaguauauggaacgccagggcaaaaccccgcuggggcucgucgaucuguuuguuuucucuaccagcuuuuaccugaucuccaucuuccuucaccucgugaagauucccacacauagacacaucgugggaaaaccuugccccaagccucaucggcugaaucacaugggcauuuguucuugcggccuguauaagcagcccggggucccggugaaauggaagcgcugaggacuaguaauaaggaaacuguaugaaugucugugggcaggaagugaagagauccuucuguaaagguuuuuggaauuaugucugcugaauaauaaacuuuuuugaaauaauaaaucugguagaaaaaugagaucucaaaggcucuuuucagagccaccaaaaaaaaaaaaaaaaaaaaaaaaaaaaaaaaaaaaaaaaaaaaaaaaaaaaaaaaaaaaaaaaagaauu

SEQ ID NO: 32482 - RNA, 1781 nt, Artificial Sequence
  mRNA product Design b-4 (hSL-A64-N5) comprising derived and/or modified sequence from LASV(LM776-SLE-2012;Clade IV)__AIT17824__GPCmut7 (opt5)
aggagagucccgcagucggcguccagcggcucugcuuguucgugugugugucguugcaggccuuauucaagcuuaccaugggccagaucgugaccuucuuucaagaggucccccacguuauugaagaggugaugaacaucgugcugauugcccucagcauccuggcuguccuuaaggggcuguacaauuucgccacaugcggacucgugggccugguuacguuucuucugcucugugggagauccugcaccacaucuguguauaaaggagucuacgaacugcagacccuggagcucaacauggaaacacugaauaugaccaugccucuuagcuguacaaagaacaauucccaucacuauauuauggugggcaacgagaccgggcuggagcucacgcugaccaauacaucuaucaucaaccauaaauucugcaaucuuagcgacgcgcacaagaaaaaccuguacgaucaugcucucauguccauuaucucuaccuuucaccugagcauuccgaauuucaaccaguaugaagccauguccugugacuuuaauggaggcaagaucagcguucaguacaaccugucucacuccuaugccggcgaugcugccaaucauugcgggacaguggcuaacggaguccuccaaaccuucaugcggauggccuggggcgggagcuacauugcgcuggacucuggacacggcaagugggauuguaucaugacguccuaccaguaucuuauuauccagaacacaaccugggaggaccauugccaguuuagccgccccucuccuaucggguaccugggacuccugucccaaagaacacgggauauuuauaucagccgcagacuucugggcaccuucaccuggacacucuccgacucugaaggcaaagauacgcccgggggauacugucugacccgguggaugcugauugaggccgagcucaagugcuuuggcaauacagcuguggccaaauguaacgaaaagcacgacgaggaguucugcgauaugcugcgccuuuuugacuucaauaaacaggcuauccagagacugaaggccccugcgcagaugagcauucaacucaucaacaaggccgugaaugcucugaucaacgaucagcuuauuaugaaaaaucaucugcgggacaucauggggauucccuauugcaacuacuccaaguauuguuaccucaaucacaccacaaccggaaaaacgagccugccuaagugcugucuggucucuaacggcuccuaccucaaugaaacacacuucagcgacgauaucgaacagcaagccgacaacaugauuaccgagaugcugcagaaagaguauauggaacgccaggggaagaccccgcuuggacugguugaucucuuuguguucucuaccagcuuuuaccugaucuccaucuuccugcaucuugugaaaauucccacacacagacauaucgucggcaagucuugcccuaagccccaccggcucaaucacaugggcauuuguagcugcgggcuguauaaacagccuggagugcccguucgcuggaagagaugaggacuaguaauaaggaaacuguaugaaugucugugggcaggaagugaagagauccuucuguaaagguuuuuggaauuaugucugcugaauaauaaacuuuuuugaaauaauaaaucugguagaaaaaugagaucucaaaggcucuuuucagagccaccaaaaaaaaaaaaaaaaaaaaaaaaaaaaaaaaaaaaaaaaaaaaaaaaaaaaaaaaaaaaaaaaagaauu

SEQ ID NO: 32483 - RNA, 1781 nt, Artificial Sequence
  mRNA product Design b-4 (hSL-A64-N5) comprising derived and/or modified sequence from LASV(Mad39;Clade IV)__ANH09722__GPCmut7 (opt5)
aggagagucccgcagucggcguccagcggcucugcuuguucgugugugugucguugcaggccuuauucaagcuuaccaugggccagaucgugaccuucuuucaagaggucccccacguuauugaagaggugaugaacaucgugcugauugcccucagcauccuggcuguccuuaaggggcuguacaauguggccacaugcggacucauuggccugguuacguuccuucugcucugugggagauccugcaccacaacccuguauaaaggaguguacgaacugcaggcgcucgagcugaacauggaaacacuuaauaugaccaugccucugucuuguacaaagaacaauagccaucacuauauccgggucggcaacgagaccgggcucgagcugacgcuuaccaauacaucccugaucaaccauaaauuuugcaaucucucugacgcucacaagaaaaaccuguacgaucaugcccugaugagcauuaucuccaccuuccaccucucuauuccgaauuuuaaccaguaugaagccaugagcugugacuucaaugauggaaagaucuccgugcaguacaaccugagccacacauaugcuggcgacaccgccaaucauugcggcacgguugcuaacggggugcuucaaacauuuaugcgcauggccuggggaggcucuuacauugcgcuggauuccgggagaggaggcugggacuguaucaugaccagcuaccaguaucucauuauccagaacacaaccugggaggaucacugccaguucucucggcccuccccuaucggguaccugggacuucugagccaacgcaccagagacauuuauaucucucggcgccuccugggcacauuuacguggacccuguccgauagcgaaggcaaggacacacccgggggauacugucucaccagauggaugcugauugaggccgagcuuaaaugcuucggcaauacagcugucgccaaguguaacgaaaaacaugaugaggaauuuugcgacaugcugcgccucuucgauuuuaauaagcaggcuauccagcggcugaaagccccugcgcagauguccauucaacuuaucaacaaggccgugaaugcucugaucaacgaccagcucauuaugaagaaucaccugagagacaucauggggauucccuauugcaacuacucuaaauauuguuaccugaaucacaccgugacgggaaagacaagccucccuaaaugcugucuggucuccaacggcagcuaccuuaaugagacccauuucucugaugacaucgaacagcaagccgauaacaugauuaccgagaugcugcagaaggaguauauggaacggcaggggaaaacaccgcucggacugguugaccuguucguguuuuccaccagcuucuaccuuaucucuaucuuucuccaccuggugaagauucccacacaucgccacgucgugggcaaaccuugccccaagccucauagacugaaucacaugggcaucuguagcugcggguucuauaagcagcccggaguuccggugcgguggaaacgcugaggacuaguaauaaggaaacuguaugaaugucugugggcaggaagugaagagauccuucuguaaagguuuuuggaauuaugucugcugaauaauaaacuuuuuugaaauaauaaaucugguagaaaaaugagaucucaaaggcucuuuucagagccaccaaaaaaaaaaaaaaaaaaaaaaaaaaaaaaaaaaaaaaaaaaaaaaaaaaaaaaaaaaaaaaaaagaauu

SEQ ID NO: 32484 - RNA, 1781 nt, Artificial Sequence
  mRNA product Design b-4 (hSL-A64-N5) comprising derived and/or modified sequence from LASV(Z0947-SLE-2011;Clade IV)__AIT17840__GPCmut7 (opt5)
aggagagucccgcagucggcguccagcggcucugcuuguucgugugugugucguugcaggccuuauucaagcuuaccaugggccagaucgugaccuucuuucaagaggucccccacguuauugaagaggugaugaacaucgugcugauugcccucagcauccuggcuguccuuaaggggcuguacaauuucgccacaugcggacucgugggccugguuacguuucuucugcucugugggagauccugcaccauuucucuguauaaaggaguguacgaacugcagacacucgagcugaacauggaaacccuuaauaugacaaugccucugagcuguaccaagaacaauucccaucacuauaucauggucggcaacgagacagggcucgagcugacccuuacgaauaccucuaucauuaaccauaaauucugcaaucugagcgacgcgcacaagaaaaaccucuacgaucaugcucugauguccaucauuucuacauuucaccugagcaucccgaauuucaaccaguaugaagccauguccugugacuuuaauggaggcaagauuagcgugcaguacaaccucucucacuccuaugccggcgaugcugccaaucauugcgggaccguugcuaacggagugcugcaaacauucaugcggauggccuggggcgggagcuacaucgcgcuugacucuggacgcgauagaugggacuguauuaugaccuccuaccaguaucugaucauccagaacacgacaugggaggaucacugccaguuuagccggcccucuccuauuggcuaccucgggcugcuuucccaacgcaccagagacaucuauauuagccggcgccugcucggaacauucaccuggacccuguccgauucugaaggcaaggacacacccggcggguacugucugacgagauggaugcucaucgaggccgagcugaaaugcuuuggaaauaccgcugucgccaaguguaacgaaaaacaugaugaggaguucugcgacaugcuucggcuguuugauuucaauaagcaggcuauucagcgccucaaagccccugcgcagaugagcauccaacugaucaacaaggccgugaaugcucuuauuaacgaccagcugaucaugaagaaucaccucagagacauuaugggcauccccuauugcaacuacuccaaauauuguuaccugaaucacacaaccacagggaagaccagccugccuaaaugcugucucgugucuaacggauccuaccugaaugaaacgcauuucagcgaugacauugaacagcaagccgauaacaugaucacagagaugcuucagaaggaguauauggaacggcagggcaaaaccccgcuggggcucgucgaccuguuuguuuucucuaccagcuuuuaccugaucuccauuuuccuucaccucgugaagauccccacacaucgccacauugugggaaaaccuugccccaagccucauagacugaaucacaugggcaucuguucuugcggccuguauaagcagcccggggucccggugaaauggaagcggugaggacuaguaauaaggaaacuguaugaaugucugugggcaggaagugaagagauccuucuguaaagguuuuuggaauuaugucugcugaauaauaaacuuuuuugaaauaauaaaucugguagaaaaaugagaucucaaaggcucuuuucagagccaccaaaaaaaaaaaaaaaaaaaaaaaaaaaaaaaaaaaaaaaaaaaaaaaaaaaaaaaaaaaaaaaaagaauu

SEQ ID NO: 32485 - RNA, 1812 nt, Artificial Sequence
  mRNA product Design b-4 (hSL-A100) comprising derived and/or modified sequence from LASV(Josiah;Clade IV)__NP_694870__GPCmut7 (opt1)
aggagagucccgcagucggcguccagcggcucugcuuguucgugugugugucguugcaggccuuauucaagcuuaccaugggccagaucgugaccuucuuccaggaggucccccacgugaucgaggaggugaugaacaucguccugaucgcccucagcgugcuggccgugcugaaggggcucuacaacuucgcgaccugcggccuggucgggcuggugacguuccuccugcugugcggccgcuccugcaccaccagccucuacaaggggguguacgagcugcagacccuggagcucaacauggagacgcugaacaugaccaugccgcuguccugcaccaagaacaacagccaccacuacaucauggucggcaacgagaccggccucgagcugacgcugaccaacaccuccaucaucaaccacaaguucugcaaccucagcgacgcccacaagaagaaccuguacgaccacgcccugauguccaucaucagcaccuuccaccucuccauccccaacuucaaccaguacgaggccaugagcugcgacuucaacgggggcaagaucuccgugcaguacaaccugagccacuccuacgccggggacgcggccaaccacugcggcacgguggccaacgggguccugcagaccuucaugcggauggccuggggcggcagcuacaucgcgcucgacuccgggcgcggcaacugggacugcaucaugaccagcuaccaguaccugaucauccagaacaccacgugggaggaccacugccaguucucccggcccagccccaucggguaccugggccuccugucccagcgcacccgggacaucuacaucagccgccggcugcucggcaccuucaccuggacgcugagcgacuccgaggggaaggacaccccgggcggguacugccugacccgcuggaugcucaucgaggccgagcugaagugcuucggcaacaccgccguggccaagugcaacgagaagcacgacgaggaguucugcgacaugcugcggcuguucgacuucaacaagcaggccauccagcgccugaaggcgcccgcccagaugagcauccagcugaucaacaaggccgugaacgcccucaucaacgaccagcugaucaugaagaaccaccuccgggacaucauggggauccccuacugcaacuacuccaaguacugcuaccucaaccacacgaccaccggccgcaccagccugcccaagugcugccuggucuccaacggcagcuaccucaacgagacgcacuucuccgacgacaucgagcagcaggccgacaacaugaucaccgagaugcugcagaaggaguacauggagcggcaggggaagacgccccugggccucguggaccuguucguguucagcaccuccuucuaccugaucagcaucuuccugcaccucgucaagaucccgacccaccgccacaucguggggaaguccugccccaagccccaccggcugaaccacaugggcaucugcagcugcgggcuguacaagcagcccggcgugccggucaaguggaagcgcugaggacuaguaauaaggaaacuguaugaaugucugugggcaggaagugaagagauccuucuguaaagguuuuuggaauuaugucugcugaauaauaaacuuuuuugaaauaauaaaucugguagaaaaaugagaucucaaaggcucuuuucagagccaccaaaaaaaaaaaaaaaaaaaaaaaaaaaaaaaaaaaaaaaaaaaaaaaaaaaaaaaaaaaaaaaaaaaaaaaaaaaaaaaaaaaaaaaaaaaaaaaaaaaaa

SEQ ID NO: 32486 - RNA, 1809 nt, Artificial Sequence
  mRNA product Design b-4 (hSL-A100) comprising derived and/or modified sequence from LASV(LP;Clade I)__AAF86701__GPCmut7 (opt1)
aggagagucccgcagucggcguccagcggcucugcuuguucgugugugugucguugcaggccuuauucaagcuuaccaugggccagaucaucaccuucuuccaggaggugccccacgucaucgaggaggugaugaacaucgugcugaucgcccucagccugcuggccauccucaaggggcuguacaacaucgcgaccugcggcaucaucgggcuggucgccuuccucuuccugugcggcaaguccugcagccugacgcucaagggcggguacgagcugcagacccuggagcucaacauggagacccugaacaugaccaugccgcuguccugcacgaagaacagcucccaccacuacauccgcgugggcaacgagaccgggcucgagcugacccugaccaacacgagcaucaucaaccacaaguucugcaaccucuccgacgcccacaagaagaaccuguacgaccacgcccugaugagcaucaucuccaccuuccaccucagcauccccaacuucaaccaguacgaggccauguccugcgacuucaacggcgggaagaucagcgugcaguacaaccugucccacagcuacgcgggcgacgccgccgagcacugcgggaccgucgccaacggcgugcugcagaccuucaugcggauggcguggggcgggcgcuacaucgcccucgacuccggcaaggggaacugggacugcaucaugacgagcuaccaguaccugaucauccagaacaccaccugggaggaccacugccaguucucccggcccagccccaucggcuaccugggccuccugucccagcgcacccgggacaucuacaucagccgccggcugcucgggacguucaccuggacccugagcgacuccgagggcaacgagacccccgggggcuacugccugacgcgcuggaugcucaucgaggccgagcugaagugcuucgggaacaccgccguggccaagugcaacgagaagcacgacgaggaguucugcgacaugcugcggcuguucgacuucaacaagcaggcgauccgccggcugaaggcccccgcccagaugagcauccagcugaucaacaaggccgucaacgcccucaucaacgaccagcugaucaugaagaaccaccuccgcgacaucaugggcauccccuacugcaacuacuccaaguacugcuaccucaaccacaccagcuccggccggaccagccugcccaagugcugccugaucuccaacgggagcuaccucaacgagacgcaguucuccgacgacaucgagcagcaggcggacaacaugaucaccgagaugcugcagaaggaguacaucgagcgccagggcaagaccccgcuggggcucguggacaucuucaucuucagcaccuccuucuaccugaucagcaucuuccugcaccugaucaagaucccgacgcaccggcacaucgugggcaagcccugccccaagccccaccgccucaaccacaugggggucugcuccugcggccuguacaagcacccgggcgugcccaccaaguggaagcggugaggacuaguaauaaggaaacuguaugaaugucugugggcaggaagugaagagauccuucuguaaagguuuuuggaauuaugucugcugaauaauaaacuuuuuugaaauaauaaaucugguagaaaaaugagaucucaaaggcucuuuucagagccaccaaaaaaaaaaaaaaaaaaaaaaaaaaaaaaaaaaaaaaaaaaaaaaaaaaaaaaaaaaaaaaaaaaaaaaaaaaaaaaaaaaaaaaaaaaaaaaaaaaaaa

SEQ ID NO: 32487 - RNA, 1809 nt, Artificial Sequence
  mRNA product Design b-4 (hSL-A100) comprising derived and/or modified sequence from LASV(803213;Clade II)__AAF86703__GPCmut7 (opt1)
aggagagucccgcagucggcguccagcggcucugcuuguucgugugugugucguugcaggccuuauucaagcuuaccaugggccagaucaucaccuucuuccaggaggugccccacgucaucgaggaggugaugaacaucgugcugaucgcccucagccugcuggccauccucaaggggaucuacaacgucgcgaccugcggccuguucgggcugaucuccuuccuccugcugugcggccgcagcugcuccgugacguacaaggggguguacgagcuccagacccuggagcugaacauggccaaccucaacaugaccaugccgcugagcugcaccaagaacaacucccaccacuacaucauggucggcaacgagacgggccuggagcucacccugaccaacaccagcaucaucaaccacaaguucugcaaccuguccgacgcccacaagaagaaccucuacgaccacgcccugaugagcaucaucuccacguuccaccugagcauccccaacuucaaccaguacgaggccauguccugcgacuucaacgggggcaagaucagcgugcaguacaaccucucccacagcuucgcgguggacgccgccaaccacugcgggaccaucgccaacggcguccugcagaccuucaugcggauggcguggggcggguccuacaucgcccuggacagcggcaaggggaacugggacugcaucaugaccuccuaccaguaccucaucauccagaacacgaccugggaggaccacugccaguucagccgccccucccccaucggcuaccuggggcugcucagccagcggacccgcgacaucuacaucagccggcgccugcugggcaccuucacguggacccucuccgacagcgagggcaacgaggcccccgggggcuacugccugacccgguggaugcugaucgaggccgagcucaagugcuucgggaacaccgccguggcgaagugcaacgagaagcacgacgaggaguucugcgacaugcugcgccuguucgacuucaacaagcaggccaucaagcggcucaagacgcccgcccagauguccauccagcugaucaacaaggccgugaacgcccugaucaacgaccagcucaucaugaagaaccaccuccgcgacaucaugggcauccccuacugcaacuacagccgguacugcuaccugaaccacaccgucaccgggaagaccucccugccccgcugcugccuggugagcaacggcuccuaccugaacgagacgcacuucagcgacgacaucgagcagcaggcggacaacaugaucaccgagaugcuccagaaggaguacauggaccggcagggcaagaccccgcuggggcugguggaccucuucgucuucuccaccagcuucuaccugaucuccaucuuccugcaccuggugaagaucccgacgcaccgccacaucgugggcaagcccugccccaagccccaccggcucaaccacauggggaucugcagcugcggccuguacaagcacccggggguccccgugaaguggaagcgcugaggacuaguaauaaggaaacuguaugaaugucugugggcaggaagugaagagauccuucuguaaagguuuuuggaauuaugucugcugaauaauaaacuuuuuugaaauaauaaaucugguagaaaaaugagaucucaaaggcucuuuucagagccaccaaaaaaaaaaaaaaaaaaaaaaaaaaaaaaaaaaaaaaaaaaaaaaaaaaaaaaaaaaaaaaaaaaaaaaaaaaaaaaaaaaaaaaaaaaaaaaaaaaaaa

SEQ ID NO: 32488 - RNA, 1809 nt, Artificial Sequence
  mRNA product Design b-4 (hSL-A100) comprising derived and/or modified sequence from LASV(GA391;Clade III)__CAA36645__GPCmut7 (opt1)
aggagagucccgcagucggcguccagcggcucugcuuguucgugugugugucguugcaggccuuauucaagcuuaccaugggccagaucgugaccuucuuccaggaggucccccacgugaucgaggaggugaugaacaucguccugaucgcccucagcauccuggccauccugaaggggcucuacaacguggcgaccugcggccugaucgggcuggugacguuccuccugcuguccggccgcagcugcucccucaucuacaaggggaccuacgagcugcagacccuggagcucaacauggagacccugaacaugacgaugccgcugagcugcaccaagaacaacucccaccacuacauccgggucggcaacgagaccggccucgagcugacccugacgaacaccagcauccucaaccacaaguucugcaaccuguccgacgcccacaagcgcaaccuguacgaccacagccucauguccaucaucagcaccuuccaccuguccauccccaacuucaaccaguacgaggccaugagcugcgacuucaacgggggcaagaucaccgugcaguacaaccugucccacagcuucgccguggacgccgcggggcacugcggcacgcucgccaacgggguccugcagaccuucaugcggauggccuggggcggcuccuacaucgcccuggacagcgggcgcggcaacugggacugcaucaugaccuccuaccaguaccucaucauccagaacaccacgugggacgaccacugccaguucagccggcccucccccaucggguaccugggccugcucagccagcgcacccgggacaucuacaucagccgccggcugcugggcaccuucaccuggacgcucuccgacagcgaggggaacgagaccccgggcggguacugccugacccgcuggaugcugaucgaggcggagcucaagugcuucggcaacaccgccguggccaagugcaacgagaagcacgacgaggaguucugcgacaugcugcggcuguucgacuucaacaagcaggccauccgccggcucaagacgcccgcccagauguccauccagcugaucaacaaggcggugaacgcccugaucaacgaccagcucaucaugaagaaccaccuccgcgacaucauggggauccccuacugcaacuacagccgguacugcuaccugaaccacaccuccaccggcaagaccagccugccccgcugcugccugaucuccaacggcagcuaccugaacgagacgaaguucuccgacgacaucgagcagcaggccgacaacaugaucaccgagaugcuccagaaggaguacaucgaccggcaggggaagacgccccugggccuggucgaccuguucguguucagcaccuccuucuaccucaucagcaucuuccugcaccuggugaagaucccgacccaccgccacaucgucgggaagcccugccccaagccccaccggcucaaccacaugggcaucugcuccugcgggcuguacaagcagccgggcgugcccgugcgcuggaagcggugaggacuaguaauaaggaaacuguaugaaugucugugggcaggaagugaagagauccuucuguaaagguuuuuggaauuaugucugcugaauaauaaacuuuuuugaaauaauaaaucugguagaaaaaugagaucucaaaggcucuuuucagagccaccaaaaaaaaaaaaaaaaaaaaaaaaaaaaaaaaaaaaaaaaaaaaaaaaaaaaaaaaaaaaaaaaaaaaaaaaaaaaaaaaaaaaaaaaaaaaaaaaaaaaa

SEQ ID NO: 32489 - RNA, 1812 nt, Artificial Sequence
  mRNA product Design b-4 (hSL-A100) comprising derived and/or modified sequence from LASV(AV;Clade V)__CCA30314__GPCmut7 (opt1)
aggagagucccgcagucggcguccagcggcucugcuuguucgugugugugucguugcaggccuuauucaagcuuaccaugggccagaucgugaccuucuuccaggaggucccccacgugaucgaggaggugaugaacaucguccugaucgcccucagcauccuggccgugcugaaggggcucuacaacaucgcgaccugcggccugaucgggcugaucacguuccuccugcugugcggccgcuccugcagcuccaaccucuacaaggggguguacgagcugcagagccuggaccucaacauggagacccugaacaugaccaugccgcuguccugcaccaagaacaacagccaccacuacauccgggucggcaacgacacgggccucgagcugacccugaccaacaccuccauccucaaccacaaguucugcaaccugagcgacgcccacaagaaggaccuguacgaccacgcccucauguccaucaucagcacguuccaccuguccauccccaacuucaaccaguacgaggccaugagcugcgacuucaacgggggcaagaucuccgugcaguacaaccugagccacuccuacgccaucgacgcggccaaccacugcgggaccguggccaacggcauccuccagaccuucaugcgcauggccuggggcgggagcuacaucgcgcuggacuccggccgggggaacugggacugcaucaugaccagcuaccaguaccugaucauccagaacacgaccugggagaaccacugccaguucucccgccccagccccaucggcuaccucgggcugcugagccagcggacccgcgacaucuacaucucccggcgccuccugggcaccuucacguggacccugagcgacuccgagggcaacgccacccccgggggcuacugccucacccgguggaugcugaucgaggccgagcugaagugcuucgggaacacggccgucgccaagugcaacgagaagcacgacgaggaguucugcgacaugcuccgccuguucgacuucaacaagcaggcgaucagccggcugaagucccccgcccagaugagcauccagcucaucaacaaggccgugaacgcccugaucaacgaccagcugaucaugaagaaccaccuccgcgacaucaugggcauccccuacugcaacuacuccaaguacugcuaccugaaccacaccaucaccgggaagaccagccugcccaagugcugccucguguccaacggcagcuaccugaacgagacgcacuucuccgacgacaucgagcagcaggccgacaacaugaucaccgagaugcugcagaaggaguacauggagcggcagggcaagaccccgcucgggcuggucgaccuguucguguucagcaccuccuucuaccugaucagcaucuuccuccgccuggugaagaucccgacgcaccggcacaucgucggcaagcccugccccaagccccaccgccugaaccacauggggaucugcuccugcggccucuacaagcagccgggggugcccgugcgguggaagcgcugaggacuaguaauaaggaaacuguaugaaugucugugggcaggaagugaagagauccuucuguaaagguuuuuggaauuaugucugcugaauaauaaacuuuuuugaaauaauaaaucugguagaaaaaugagaucucaaaggcucuuuucagagccaccaaaaaaaaaaaaaaaaaaaaaaaaaaaaaaaaaaaaaaaaaaaaaaaaaaaaaaaaaaaaaaaaaaaaaaaaaaaaaaaaaaaaaaaaaaaaaaaaaaaaa

SEQ ID NO: 32490 - RNA, 1809 nt, Artificial Sequence
  mRNA product Design b-4 (hSL-A100) comprising derived and/or modified sequence from LASV(Togo/2016/7082;Clade VI)__AMR44577__GPCmut7 (opt1)
aggagagucccgcagucggcguccagcggcucugcuuguucgugugugugucguugcaggccuuauucaagcuuaccaugggccagaucaucaccuucuuccaggaggugccccacgucaucgaggaggugaugaacaucgugcugaucgcccucagccugcuggccauccucaagggggucuacaacguggcgaccugcggcaucaucgggcuggugacguuccuguuccucugcggccgcuccugcagccugaucuacaagggguccuacgagcugcagacccucgagcugaacauggagacccugaacaugaccaugccgcucagcugcacgaagaacuccagccaccacuacauccgggucggcaacgagaccggccuggagcugacccucaccaacacguccaucaucaaccacaaguucugcaaccugagcgacgcccacaagcgcaaccuguacgaccacgcccucauguccauccugagcaccuuccaccuguccauccccaacuucaaccaguacgaggccaugagcugcgacuucaacgggggcaagaucuccgugcaguacaaccucagccacgccuacgcgguggacgccgccgagcacugcgggaccgucgccaacggcgugcugcagaccuucaugcggauggcguggggcggguccuacaucgcccuggacagcggccgcgggaacugggacugcaucaugacguccuaccaguaccucaucauccagaacaccaccugggaggaccacugccaguucagccggcccucccccaucggcuaccuggggcugcucagccagcgcacccgggacaucuacaucagccgccggcugcugggcacguucaccuggacccucuccgacagcgagggcaacgagacccccgggggcuacugccugacgcgcuggaugcugaucgaggccgagcucaagugcuucgggaacaccgccguggccaagugcaacgagaagcacgacgaggaguucugcgacaugcugcggcuguucgacuucaacaagcaggcgauccagcgccucaagucccccgcccagaugagcauccagcugaucaacaaggccgucaacgcccugaucaacgaccagcucaucaugaagaaccaccuccgggacaugaugggcauccccuacugcaacuacuccaaguacugcuaccugaaccacaccagcuccgggcgcaccagccugcccaagugcugccugguguccaacggcagcuaccugaacgagacgcacuucuccgacgacaucgagcagcaggccgacaacaugaucaccgagaugcuccagaaggaguacaucgaccggcagggcaagaccccgcuggggcugguggaccucuucgucuucagcaccuccuucuaccugaucagcaucuuccugcaccugaucaagaucccgacgcaccgccacaucgugggcaagcccugccccaagccccaccggcucaaccacauggggaucugcuccugcggccuguacaagcagccgggggugcccacccgcuggaagcggugaggacuaguaauaaggaaacuguaugaaugucugugggcaggaagugaagagauccuucuguaaagguuuuuggaauuaugucugcugaauaauaaacuuuuuugaaauaauaaaucugguagaaaaaugagaucucaaaggcucuuuucagagccaccaaaaaaaaaaaaaaaaaaaaaaaaaaaaaaaaaaaaaaaaaaaaaaaaaaaaaaaaaaaaaaaaaaaaaaaaaaaaaaaaaaaaaaaaaaaaaaaaaaaaa

SEQ ID NO: 32491 - RNA, 1809 nt, Artificial Sequence
  mRNA product Design b-4 (hSL-A100) comprising derived and/or modified sequence from LASV(KAK-428;Clade n.d. (VII))__ANH09740__GPCmut7 (opt1)
aggagagucccgcagucggcguccagcggcucugcuuguucgugugugugucguugcaggccuuauucaagcuuaccaugggccagaucgugaccuucuuccaggaggucccccacgugaucgaggaggugaugaacaucguccugaucgcccucagccugcuggccauccucaaggggcuguacaacuucgcgaccugcggcgugaucgggcugaucacguuccuccugcugugcggccgcuccugcagcgccaccuacaaggggcaguacgagcuccagacccuggagcugaacauggagucccucaacaugaccaugccgcugagcugcacgaagaacaacucccaccacuacauccgggccggcaacaacaccggccuggagcucacccugaccaacacgagcaucaucucccacaaguucugcaaccugagcgacgcccacaagaagaaccucuacgaccacacccugauguccaucaucaccaccuuccaccugagcauccccaacuucaaccaguacgaggccauguccugcgacuucaacgggggcaagaucagcauccaguacaaccucucccacagcuacgcgggggacgccgcccagcacugcggcacgguggccaacgggguccugcagaccuucaugcgcauggcguggggcggcuccuaccuggcccucgacagcgggcggcgcggcugggacugcaucaucuccagcuaccaguaccugaucauccagaacaccaccugggacgaccacugccaguucucccggcccagccccaucggguaccugggcuucgugagccagaagacgcgcgacaucuacaucucccggcgccuccugggcaccuucaccuggacccugagcgacuccgaggggcacgacaugccgggcggguacugccucacgcgguggaugcugaucgaggccgaccugaagugcuucggcaacaccgccguggccaagugcaacgagaagcacgacgaggaguucugcgacauguggcgccucuucgacuucaacaagcaggcgauccagcggcugaaggcccccgcccagaugaacauccagcugaucaacaaggccgucaacgcccucaucaacgaccagcugaugaugaagaaccaccuccgcgacaucauggggauccccuacugcaacuacagcaaguucugcuaccugaacaacaccaccacgggccggaccucccugccccgcugcugccugaucagcaacggcuccuaccucaacgagacccacuucagcgacgacaucgagcagcaggcggacaacaugaucaccgagaugcugcagaaggaguacauggaccggcaggggaagacgccccugggccucguggaccuguucguguucuccaccagcuucuaccugaucaccaucuuccuccaccuggucaagaucccgacccaccgccacaucguggggaagcccugccccaagccccaccggcugaaccacaugggcaucugcuccugcgggcuguacaagcagccgggcgugcccguccgcuggaagcggugaggacuaguaauaaggaaacuguaugaaugucugugggcaggaagugaagagauccuucuguaaagguuuuuggaauuaugucugcugaauaauaaacuuuuuugaaauaauaaaucugguagaaaaaugagaucucaaaggcucuuuucagagccaccaaaaaaaaaaaaaaaaaaaaaaaaaaaaaaaaaaaaaaaaaaaaaaaaaaaaaaaaaaaaaaaaaaaaaaaaaaaaaaaaaaaaaaaaaaaaaaaaaaaaa

SEQ ID NO: 32492 - RNA, 1809 nt, Artificial Sequence; identical to SEQ ID NO: 32486
  mRNA product Design b-4 (hSL-A100) comprising derived and/or modified sequence from LASV(Pinneo-NIG-1969;Clade I)__AIT17836__GPCmut7 (opt1)

SEQ ID NO: 32493 - RNA, 1809 nt, Artificial Sequence
  mRNA product Design b-4 (hSL-A100) comprising derived and/or modified sequence from LASV(ISTH0009-NIG-2011;Clade II)__AIT17404__GPCmut7 (opt1)
aggagagucccgcagucggcguccagcggcucugcuuguucgugugugugucguugcaggccuuauucaagcuuaccaugggccagaucaucaccuucuuccaggaggugccccacgucaucgaggaggugaugaacaucgugcugaucgcccucagccugcuggccauccucaaggggaucuacaacgucgcgaccugcggccuguucgggcugguguccuuccuccugcugugcggccgcagcugcuccacgaccuacaaggggguguacgagcuccagacccuggagcuggacauggccagccucaacaugaccaugccgcuguccugcacgaagaacaacagccaccacuacaucauggucggcaacgagaccggccuggagcucacccugaccaacacguccaucaucaaccacaaguucugcaaccugagcgacgcccacaagaagaaccucuacgaccacgcccugauguccaucaucagcaccuuccaccuguccauccccaacuucaaccaguacgaggccaugagcugcgacuucaacgggggcaagaucuccgugcaguacaaccucagccacgcguacgccguggacgccgccaaccacugcgggaccaucgcgaacggcguccugcagaccuucaugcggauggccuggggcggguccuacaucgcccuggacagcggcaagggguccugggacugcaucaugacgagcuaccaguaccucaucauccagaacaccaccugggaggaccacugccaguucucccgccccagccccaucggcuaccuggggcugcucagccagcggacccgcgacaucuacaucucccggcgccugcugggcacguucaccuggacccucagcgacuccgagggcaacgagacccccgggggcuacugccugacgcgguggaugcugaucgaggccgagcucaagugcuucgggaacaccgccguggcgaagugcaacgagaagcacgacgaggaguucugcgacaugcugcgccuguucgacuucaacaagcaggccauccggcgccucaagacccccgcccagaugagcauccagcugaucaacaaggccgugaacgcccugaucaacgaccagcucaucaugaagaaccaccuccgggacaucaugggcaucccguacugcaacuacuccaaguacugcuaccugaaccacaccgucacggggaagaccagccugccccgcugcugccugguguccaacggcagcuaccugaacgagacccacuucuccgacgacaucgagcagcaggcggacaacaugaucaccgagcuccugcagaaggaguacauggaccggcagggcaagacgccccuggggcucguggaccuguucgucuucagcaccuccuucuaccugaucagcaucuuccugcaccucaucaagaucccgacccaccgccacaucaccggcaagcccugccccaagccccaccggcugaaccacauggggaucugcuccugcggccuguacaagcacccgggggugcccgugaaguggaagcgcugaggacuaguaauaaggaaacuguaugaaugucugugggcaggaagugaagagauccuucuguaaagguuuuuggaauuaugucugcugaauaauaaacuuuuuugaaauaauaaaucugguagaaaaaugagaucucaaaggcucuuuucagagccaccaaaaaaaaaaaaaaaaaaaaaaaaaaaaaaaaaaaaaaaaaaaaaaaaaaaaaaaaaaaaaaaaaaaaaaaaaaaaaaaaaaaaaaaaaaaaaaaaaaaaa

SEQ ID NO: 32494 - RNA, 1809 nt, Artificial Sequence
  mRNA product Design b-4 (hSL-A100) comprising derived and/or modified sequence from LASV(ISTH2010-NIG-2012;Clade II)__AIT17482__GPCmut7 (opt1)
aggagagucccgcagucggcguccagcggcucugcuuguucgugugugugucguugcaggccuuauucaagcuuaccaugggccagaucaucaccuucuuccaggaggugccccacgucaucgaggaggugaugaacaucgugcugaucgcccucagccugcuggccauccucaaggggaucuacaacgucgcgaccugcggccuguucgggcugguguccuuccuccugcugugcggccgcagcugcuccacgaccuacaaggggguguacgagcuccagacccuggagcuggacauggccagccucaacaugaccaugccgcuguccugcacgaagaacaacagccaccacuacaucauggucggcaacgagaccggccuggagcucacccugaccaacacguccaucaucaaccacaaguucugcaaccugagcgacgcccacaagaagaaccucuacgaccacgcccugauguccaucaucagcaccuuccaccuguccauccccaacuucaaccaguacgaggccaugagcugcgacuucaacgggggcaagaucuccgugcaguacaaccucagccacgcguacgccguggacgccgccaaccacugcgggaccaucgcgaacggcguccugcagaccuucaugcggauggccuggggcggguccuacaucgcccuggacagcggcaagggguccugggacugcaucaugacgagcuaccaguaccucaucauccagaacaucaccugggaggaccacugccaguucucccgccccagccccaucggcuaccuggggcugcucagccagcggacccgcgacaucuacaucucccggcgccugcugggcaccuucacguggacccucagcgacuccgagggcaacgagacccccgggggcuacugccugacccgguggaugcugaucgaggccgagcucaagugcuucgggaacacggccguggcgaagugcaacgagaagcacgacgaggaguucugcgacaugcugcgccuguucgacuucaacaagcaggccauccggcgccucaagacccccgcccagaugagcauccagcugaucaacaaggccgugaacgcccugaucaacgaccagcucaucaugaagaaccaccuccgggacaucaugggcauccccuacugcaacuacuccaaguacugcuaccugaaccacaccgucaccgggaagacgagccugccccgcugcugccugguguccaacggcagcuaccugaacgagacccacuucuccgacgacaucgagcagcaggcggacaacaugaucaccgagcuccugcagaaggaguacaucgaccggcagggcaagaccccgcuggggcucguggaccuguucgucuucagcacguccuucuaccugaucagcaucuuccugcaccucgugaagaucccgacccaccgccacguggucggcaagcccugccccaagccccaccggcugaaccacauggggaucugcuccugcggccuguacaagcacccgggggugcccgugaaguggaagcgcugaggacuaguaauaaggaaacuguaugaaugucugugggcaggaagugaagagauccuucuguaaagguuuuuggaauuaugucugcugaauaauaaacuuuuuugaaauaauaaaucugguagaaaaaugagaucucaaaggcucuuuucagagccaccaaaaaaaaaaaaaaaaaaaaaaaaaaaaaaaaaaaaaaaaaaaaaaaaaaaaaaaaaaaaaaaaaaaaaaaaaaaaaaaaaaaaaaaaaaaaaaaaaaaaa

SEQ ID NO: 32495 - RNA, 1809 nt, Artificial Sequence
  mRNA product Design b-4 (hSL-A100) comprising derived and/or modified sequence from LASV(Lassa virus/H.sapiens-wt/NGA/2015/ISTH_0543;Clade II)__AVO03639__GPCmut7 (opt1)
aggagagucccgcagucggcguccagcggcucugcuuguucgugugugugucguugcaggccuuauucaagcuuaccaugggccagaucaucaccuucuuccaggaggugccccacgucaucgaggaggugaugaacaucgugcugaucgcccucagccugcuggccauccucaaggggaucuacaacgucgcgaccugcggccuguucgggcugguguccuuccuccugcugugcggccgcagcugcuccacgaccuacaaggggguguacgagcuccagacccuggagcuggacauggccaaccucaacaugaccaugccgcugagcugcacgaagaacaacucccaccacuacaucauggucggcaacgagaccggccuggagcucacccugaccaacacgagcaucaucaaccacaaguucugcaaccuguccgacgcccacaagaagaaccucuacgaccacgcccugaugagcaucaucuccaccuuccaccugagcauccccaacuucaaccaguacgaggccauguccugcgacuucaacgggggcaagaucagcgugcaguacaaccucucccacaccuacgcgguggacgccgccaaccacugcgggaccaucgccaacggcguccugcagacguucaugcggauggcguggggcgggagcuacaucgcccuggacuccggcaaggggagcugggacugcaucaugaccuccuaccaguaccucgugauccagaacaccaccugggaggaccacugccaguucagccgccccucccccaucggcuaccuggggcugcucagccagcggacgcgcgacaucuacaucagccggcgccugcugggcaccuucaccuggacccucuccgacagcgagggcaacgagacgcccgggggcuacugccugacccgguggaugcugaucgaggccgagcucaagugcuucgggaacaccgccguggccaagugcaacgagaagcacgacgaggaguucugcgacaugcugcgccuguucgacuucaacaagcaggcgauccggcgccucaagacccccgcccagauguccauccagcugaucaacaaggccgucaacgcccugaucaacgaccagcucaucaugaagaaccaccuccgggacaucaugggcauccccuacugcaacuacagcaaguacugcuaccugaaccacacggugaccgggaagaccucccugccccgcugcugccuggugagcaacggcuccuaccugaacgagacccacuucagcgacgacaucgagcagcaggccgacaacaugaucacggagcuccugcagaaggaguacaucgaccggcagggcaagaccccgcuggggcucgucgaccuguucguguucuccaccagcuucuaccugaucuccaucuuccugcaccucgugaagaucccgacccaccgccacaucacgggcaagcccugccccaagccccaccggcugaaccacauggggaucugcagcugcggccuguacaagcacccggggguccccgugaaguggaagcgcugaggacuaguaauaaggaaacuguaugaaugucugugggcaggaagugaagagauccuucuguaaagguuuuuggaauuaugucugcugaauaauaaacuuuuuugaaauaauaaaucugguagaaaaaugagaucucaaaggcucuuuucagagccaccaaaaaaaaaaaaaaaaaaaaaaaaaaaaaaaaaaaaaaaaaaaaaaaaaaaaaaaaaaaaaaaaaaaaaaaaaaaaaaaaaaaaaaaaaaaaaaaaaaaaa

SEQ ID NO: 32496 - RNA, 1809 nt, Artificial Sequence
  mRNA product Design b-4 (hSL-A100) comprising derived and/or modified sequence from LASV(Lassa virus/H.sapiens-wt/NGA/2016/ISTH_0009;Clade II)__AVO03571__GPCmut7 (opt1)
aggagagucccgcagucggcguccagcggcucugcuuguucgugugugugucguugcaggccuuauucaagcuuaccaugggccagaucaucaccuucuuccaggaggugccccacgucaucgaggaggugaugaacaucgugcugaucgcccucagccugcuggccauccucaaggggaucuacaacgucgcgaccugcggccugcuggggcucguguccuuccugcugcucugcggccgcagcugcuccacgaccuacaaggggguguacgagcugcagacccuggagcucgacauggccagccugaacaugaccaugccgcuguccugcacgaagaacaacagccaccacuacaucauggucggcaacgagaccggccucgagcugacccugaccaacacguccaucaucaaccacaaguucugcaaccucagcgacgcccacaagaagaaccuguacgaccacgcccugauguccaucaucagcaccuuccaccucuccauccccaacuucaaccaguacgaggccaugagcugcgacuucaacgggggccggaucuccgugcaguacaaccugagccacuccuacgcgguggacgccgccaaccacugcgggaccaucgccaacggcguccugcagaccuucaugcgcauggcguggggcgggagcuacaucgcccucgacuccggcaaggggagcugggacugcaucaugacguccuaccaguaccugaucauccagaacaccaccugggaggaccacugccaguucagccggcccagccccaucggcuaccuggggcuccugucccagcgcacccgggacaucuacaucagccgccggcugcucggcacguucaccuggacccuguccgacagcgagggcaacgagacccccgggggcuacugccugacgcgcuggaugcucaucgaggccgagcugaagugcuucgggaacaccgccguggccaagugcaacgagaagcacgacgaggaguucugcgacaugcugcggcuguucgacuucaacaagcaggcgauccgccggcugaagacccccgcccagauguccauccagcugaucaacaaggccgugaacgcccucaucaacgaccagcugaucaugaagaaccaccuccgcgacaucaugggcaucccguacugcaacuacagcaaguacugcuaccucaaccacaccgucacggggaagaccucccugccccggugcugccuggugagcaacggcuccuaccucaacgagacccacuucagcgacgacaucgagcagcaggccgacaacaugaucaccgagcugcugcagaaggaguacaucgaccgccagggcaagacgccccucgggcugguggaccuguucgucuucuccaccagcuucuaccugaucuccaucuuccuccaccuggugaagaucccgacccaccggcacaucaccggcaagcccugccccaagccccaccgccugaaccacauggggaucugcagcugcggccucuacaaccacccgggggugcccgucaaguggaagcggugaggacuaguaauaaggaaacuguaugaaugucugugggcaggaagugaagagauccuucuguaaagguuuuuggaauuaugucugcugaauaauaaacuuuuuugaaauaauaaaucugguagaaaaaugagaucucaaaggcucuuuucagagccaccaaaaaaaaaaaaaaaaaaaaaaaaaaaaaaaaaaaaaaaaaaaaaaaaaaaaaaaaaaaaaaaaaaaaaaaaaaaaaaaaaaaaaaaaaaaaaaaaaaaaa

SEQ ID NO: 32497 - RNA, 1809 nt, Artificial Sequence
  mRNA product Design b-4 (hSL-A100) comprising derived and/or modified sequence from LASV(Lassa virus/H.sapiens-wt/NGA/2016/ISTH_0017;Clade II)__AVO03567__GPCmut7 (opt1)
aggagagucccgcagucggcguccagcggcucugcuuguucgugugugugucguugcaggccuuauucaagcuuaccaugggccagaucaucaccuucuuccaggaggugccccacgucaucgaggaggugaugaacaucgugcugaucgcccucagccugcuggccauccucaaggggaucuacaacgucgcgaccugcggccuguucgggcugguguccuuccuccugcugugcggccgcagcugcuccacgaccuacaaggggguguacgagcuccagacccuggagcuggacauggccagccucaacaugaccaugccgcuguccugcacgaagaacaacagccaccacuacaucauggucggcaacgagaccggccuggagcucacccugaccaacacguccaucaucaaccacaaguucugcaaccugagcgacgcccacaagaagaaccucuacgaccacgcccugauguccaucaucagcaccuuccaccuguccauccccaacuucaaccaguacgaggccaugagcugcgacuucaacgggggcaagaucuccgugcaguacaaccucagccacaccuacgcgaucgacgccgccaaccacugcgggaccaucgccaacggcgugcugcagacguucaugcggauggcguggggcggguccuacaucgcccuggacagcggcaagggguccugggacugcaucaugaccagcuaccaguaccucaucauccagaacaccaccugggaggaccacugccaguucucccgccccagccccaucggcuaccuggggcugcucagccagcggacgcgcgacaucuacaucucccggcgccugcugggcaccuucaccuggacccucagcgacuccgagggcaacgagacgcccgggggcuacugccugacccgguggaugcugaucgaggccgagcucaagugcuucgggaacaccgccgucgccaagugcaacgagaagcacgacgaggaguucugcgacaugcugcgccuguucgacuucaacaagcaggcgauccggcgccucaagacccccgcccagaugagcauccagcugaucaacaaggccgugaacgcccugaucaacgaccagcucaucaugaagaaccaccuccgggacaucaugggcauccccuacugcaacuacuccaaguacugcuaccugaaccacacggugaccgggaagaccagccugccccgcugcugccuggucuccaacggcagcuaccugaacgagacccacuucuccgacgacaucgagcagcaggccgacaacaugaucacggagcuccugcagaaggaguacauggaccggcagggcaagaccccgcuggggcucguggaccuguucguguucagcaccuccuucuaccugaucagcaucuuccugcaccucguccgcaucccgacccaccggcacgugaucggcaagcccugccccaagccccaccgccugaaccacauggggaucugcuccugcggccuguacaagcacccgggggugcccgucaaguggaagcggugaggacuaguaauaaggaaacuguaugaaugucugugggcaggaagugaagagauccuucuguaaagguuuuuggaauuaugucugcugaauaauaaacuuuuuugaaauaauaaaucugguagaaaaaugagaucucaaaggcucuuuucagagccaccaaaaaaaaaaaaaaaaaaaaaaaaaaaaaaaaaaaaaaaaaaaaaaaaaaaaaaaaaaaaaaaaaaaaaaaaaaaaaaaaaaaaaaaaaaaaaaaaaaaaa

SEQ ID NO: 32498 - RNA, 1809 nt, Artificial Sequence
  mRNA product Design b-4 (hSL-A100) comprising derived and/or modified sequence from LASV(Lassa virus/H.sapiens-wt/NGA/2018/ISTH_0959;Clade II)__AVV65099__GPCmut7 (opt1)
aggagagucccgcagucggcguccagcggcucugcuuguucgugugugugucguugcaggccuuauucaagcuuaccaugggccagaucaucaccuucuuccaggaggugccccacgucaucgaggaggugaugaacaucgugcugaucgcccucagccugcuggccauccucaaggggaucuacaacgucgugaccugcggccuguucgggcugguguccuuccuccugcugugcggccgcagcugcuccacgaccuacaagggggucuacgagcuccagacccuggagcuggacauggcgagccucaacaugaccaugccgcuguccugcacgaagaacaacagccaccacuacaucauggugggcaacgagaccggccuggagcucacccugaccaacacguccaucaucaaccacaaguucugcaaccugagcgacgcccacaagaagaaccucuacgaccacgcccugauguccaucaucagcaccuuccaccuguccauccccaacuucaaccaguacgaggccaugagcugcgacuucaacgggggcaagaucuccgugcaguacaaccucagccacgccuacgcgaucgacgccgccaaccacugcgggaccaucgccaacggcguccugcagaccuucaugcggauggcguggggcggguccuacaucgcccuggacagcggcaagggguccugggacugcaucaugacgagcuaccaguaccucaucauccagaacaccaccugggaggaccacugccaguucucccgccccagccccaucggcuaccuggggcugcucagccagcggacccgcgacaucuacaucucccggcgccugcugggcacguucaccuggacccucagcgacuccgagggcaacgagacccccgggggcuacugccugacgcgguggaugcugaucgaggccgagcucaagugcuucgggaacaccgccguggccaagugcaacgagaagcacgacgaggaguucugcgacaugcugcgccuguucgacuucaacaagcaggcgauccggcgccucaagacccccgcccagaugagcauccagcugaucaacaaggccgugaacgcccugaucaacgaccagcucaucaugaagaaccaccuccgggacaucaugggcaucccguacugcaacuacuccaaguacugcuaccugaaccacaccgucacggggaagaccagccugccccgcugcugccugguguccaacggcagcuaccugaacgagacccacuucuccgacgacaucgagcagcaggccgacaacaugaucaccgagcuccugcagaaggaguacaucgaccggcagggcaagacgccccuggggcucguggaccuguucgucuucagcaccuccuucuaccugaucagcaucuuccugcaccucgugaagaucccgacccaccgccacgugaucggcaagcccugccccaagccccaccggcugaaccacauggggaucugcuccugcggccuguacaagcacccggggguccccgugaaguggaagcgcugaggacuaguaauaaggaaacuguaugaaugucugugggcaggaagugaagagauccuucuguaaagguuuuuggaauuaugucugcugaauaauaaacuuuuuugaaauaauaaaucugguagaaaaaugagaucucaaaggcucuuuucagagccaccaaaaaaaaaaaaaaaaaaaaaaaaaaaaaaaaaaaaaaaaaaaaaaaaaaaaaaaaaaaaaaaaaaaaaaaaaaaaaaaaaaaaaaaaaaaaaaaaaaaaa

SEQ ID NO: 32499 - RNA, 1809 nt, Artificial Sequence
  mRNA product Design b-4 (hSL-A100) comprising derived and/or modified sequence from LASV(LASV003-NIG-2008;Clade II)__AIT17580__GPCmut7 (opt1)
aggagagucccgcagucggcguccagcggcucugcuuguucgugugugugucguugcaggccuuauucaagcuuaccaugggccagaucaucaccuucuuccaggaggugccccacgucaucgaggaggugaugaacaucgugcugaucgcccucagccugcuggccauccucaaggggaucuacaacgucgcgaccugcggccuguucgggcugguguccuuccuccugcugugcggccgcagcugcuccacgaccuacaaggggguguacgagcuccagacccuggagcuggacauggccagccucaacaugaccaugccgcuguccugcacgaagaacaacagccaccacuacaucauggucggcaacgagaccggccuggagcucacccugaccaacacguccaucaucaaccacaaguucugcaaccugagcgacgcccacaagaagaaccucuacgaccacgcccugauguccaucaucagcaccuuccaccuguccauccccaacuucaaccaguacgaggccaugagcugcgacuucaacgggggcaagaucuccgugcaguacaaccucagccacaccuacgcgguggacgccgccaaccacugcgggaccaucgccaacggcguccugcagacguucaugcggauggcguggggcggguccuacaucgcccuggacagcggcaagggguccugggacugcaucaugaccagcuaccaguaccucaucauccagaacaccaccugggaggaccacugccaguucucccgccccagccccaucggcuaccuggggcugcucagccagcggacgcgcgacaucuacaucucccggcgccugcugggcaccuucaccuggacccucagcgacuccgagagcaacgagacgccgggcggguacugccugacccgguggaugcugaucgaggccgagcucaagugcuucggcaacaccgccguggccaagugcaacgagaagcacgacgaggaguucugcgacaugcugcgccuguucgacuucaacaagcaggcgauccggcgccucaaggcccccgcccagauguccauccagcugaucaacaaggccgugaacgcccugaucaacgaccagcucaucaugaagaaccaccuccgggacaucauggggauccccuacugcaacuacagcaaguacugcuaccugaaccacaccgucacgggccgcaccucccugccccggugcugccuggugagcaacggguccuaccugaacgagacccacuucagcgacgacaucgagcagcaggcggacaacaugaucaccgagcuccugcagaaggaguacauggaccgccagggcaagacgccccugggccucguggaccuguucgucuucuccaccagcuucuaccugaucuccaucuuccugcaccucgugaagaucccgacccaccggcacgugaucgggaagcccugccccaagccccaccgccugaaccacaugggcaucugcagcugcgggcuguacaagcacccgggcguccccgugaaguggaagcggugaggacuaguaauaaggaaacuguaugaaugucugugggcaggaagugaagagauccuucuguaaagguuuuuggaauuaugucugcugaauaauaaacuuuuuugaaauaauaaaucugguagaaaaaugagaucucaaaggcucuuuucagagccaccaaaaaaaaaaaaaaaaaaaaaaaaaaaaaaaaaaaaaaaaaaaaaaaaaaaaaaaaaaaaaaaaaaaaaaaaaaaaaaaaaaaaaaaaaaaaaaaaaaaaa

SEQ ID NO: 32500 - RNA, 1809 nt, Artificial Sequence
  mRNA product Design b-4 (hSL-A100) comprising derived and/or modified sequence from LASV(LASV035-NIG-2009;Clade II)__AIT17588__GPCmut7 (opt1)
aggagagucccgcagucggcguccagcggcucugcuuguucgugugugugucguugcaggccuuauucaagcuuaccaugggccagaucaucaccuucuuccaggaggugccccacgucaucgaggaggugaugaacaucgugcugaucgcccucagccugcuggccauccucaaggggaucuacaacgucgcgaccugcggccuguucgggcugguguccuuccuccugcugugcggccgcagcugcuccacgaccuacaaggggguguacgagcuccagacccuggagcuggacauggccagccucaacaugaccaugccgcuguccugcacgaagaacaacagccaccacuacaucauggucggcaacgagaccggccuggagcucacccugaccaacacguccaucaucaaccacaaguucugcaaccugagcgacgcccacaagaagaaccucuacgaccacgcccugauguccaucaucagcaccuuccaccuguccauccccaacuucaaccaguacgaggccaugagcugcgacuucaacgggggcaagaucuccgugcaguacaaccucagccacgcguacgccguggacgccgccaaccacugcgggaccaucgcgaacggcguccugcagaccuucaugcggauggccuggggcggguccuacaucgcccuggacagcggcaagggguccugggacugcaucaugacgagcuaccaguaccucaucauccagaacaccaccugggaggaccacugccaguucucccgccccagccccaucggcuaccuggggcugcucagccagcggacccgcgacaucuacaucucccggcgccugcugggcacguucaccuggacccucagcgacuccgagggcaacgagacccccgggggcuacugccugacgcgguggaugcugaucgaggccgagcucaagugcuucgggaacaccgccguggcgaagugcaacgagaagcacgacgaggaguucugcgacaugcugcgccuguucgacuucaacaagcaggccauccggcgccucaaggcccccgcccagaugagcauccagcugaucaacaaggccgugaacgcgcugaucaacgaccagcucaucaugaagaaccaccuccgggacaucaugggcauccccuacugcaacuacuccaaguacugcuaccugaaccacaccgucaccgggaagacgagccugccccgcugcugccugguguccaacggcagcuaccugaacgagacccacuucuccgacgacaucgagcagcaggccgacaacaugaucaccgagcuccugcagaaggaguacaucgaccggcagggcaagaccccgcuggggcucguggaccuguucgucuucagcacguccuucuaccugaucagcaucuuccugcaccucgugaagaucccgacccaccgccacgugaucggcaagcccugccccaagccccaccggcugaaccacauggggaucugcuccugcggccuguacaagcacccggggguccccgugaaguggaagcgcugaggacuaguaauaaggaaacuguaugaaugucugugggcaggaagugaagagauccuucuguaaagguuuuuggaauuaugucugcugaauaauaaacuuuuuugaaauaauaaaucugguagaaaaaugagaucucaaaggcucuuuucagagccaccaaaaaaaaaaaaaaaaaaaaaaaaaaaaaaaaaaaaaaaaaaaaaaaaaaaaaaaaaaaaaaaaaaaaaaaaaaaaaaaaaaaaaaaaaaaaaaaaaaaaa

SEQ ID NO: 32501 - RNA, 1809 nt, Artificial Sequence
  mRNA product Design b-4 (hSL-A100) comprising derived and/or modified sequence from LASV(LASV1000-NIG-2009;Clade II)__AIT17782__GPCmut7 (opt1)
aggagagucccgcagucggcguccagcggcucugcuuguucgugugugugucguugcaggccuuauucaagcuuaccaugggccagaucaucaccuucuuccaggaggugccccacgucaucgaggaggugaugaacaucgugcugaucgcccucagccugcuggccauccucaaggggaucuacaacgucgcgaccugcggccuguucgggcugguguccuuccuccugcugugcggccgcagcugcuccacgaccuacaaggggguguacgagcuccagacccuggagcuggacauggccagccucaacaugaccaugccgcuguccugcacgaagaacaacagccaccacuacaucauggucggcaacgagaccggccuggagcucacccugaccaacacguccaucaucaaccacaaguucugcaaccugagcgacgcccacaagaagaaccucuacgaccacgcccugauguccaucaucagcaccuuccaccuguccauccccaacuucaaccaguacgaggccaugagcugcgacuucaacgggggcaagaucuccgugcaguacaaccucagccacaccuacgcgguggacgccgccaaccacugcgggaccaucgccaacggcguccugcagacguucaugcggauggcguggggcggguccuacaucgcccuggacagcggcaagggguccugggacugcaucaugaccagcuaccaguaccucaucauccagaacaccaccugggaggaccacugccaguucucccgccccagccccaucggcuaccuggggcugcucagccagcggacgcgcgacaucuacaucucccggcgccugcugggcaccuucaccuggacccucagcgacuccgagggcaacgagacgcccgggggcuacugccugacccgguggaugcugaucgaggccgagcucaagugcuucgggaacaccgccguggccaagugcaacgagaagcacgacgaggaguucugcgacaugcugcgccuguucgacuucaacaagcaggcgaucaagcggcucaagacccccgcccagaugagcauccagcugaucaacaaggccgugaacgcccugaucaacgaccagcucaucaugaagaaccaccuccgcgacaucaugggcauccccuacugcaacuacuccaaguacugcuaccugaaccacacggucaccgggaagaccagccugccccggugcugccugguguccaacggcagcuaccugaacgagacccacuucuccgacgacaucgagcagcaggccgacaacaugaucacggagcuccugcagaaggaguacaucgaccgccagggcaagaccccgcuggggcucguggaccuguucgucuucagcaccuccuucuaccugaucagcaucuuccugcaccucgugaagaucccgacccaccggcacguggucggcaagcccugccccaagccccaccgccugaaccacauggggaucugcuccugcggccuguacaagcacccgggggugcccgugaaguggaagcggugaggacuaguaauaaggaaacuguaugaaugucugugggcaggaagugaagagauccuucuguaaagguuuuuggaauuaugucugcugaauaauaaacuuuuuugaaauaauaaaucugguagaaaaaugagaucucaaaggcucuuuucagagccaccaaaaaaaaaaaaaaaaaaaaaaaaaaaaaaaaaaaaaaaaaaaaaaaaaaaaaaaaaaaaaaaaaaaaaaaaaaaaaaaaaaaaaaaaaaaaaaaaaaaaa

SEQ ID NO: 32502 - RNA, 1809 nt, Artificial Sequence
  mRNA product Design b-4 (hSL-A100) comprising derived and/or modified sequence from LASV(LASV221-NIG-2010;Clade II)__AIT17624__GPCmut7 (opt1)
aggagagucccgcagucggcguccagcggcucugcuuguucgugugugugucguugcaggccuuauucaagcuuaccaugggccagaucaucaccuucuuccaggaggugccccacgucaucgaggaggugaugaacaucgugcugaucgcccucagccugcuggccauccucaaggggaucuacaacgucgcgaccugcggccuguucgggcugguguccuuccuccugcugugcggccgcagcugcuccacgaccuacaaggggguguacgagcuccagacccuggagcuggacauggccagccucaacaugaccaugccgcuguccugcacgaagaacaacagccaccacuacaucauggucggcaacgagaccggccuggagcucacccugaccaacacguccaucaucaaccacaaguucugcaaccugagcgacgcccacaagaagaaccucuacgaccacgcccugauguccaucaucagcaccuuccaccuguccauccccaacuucaaccaguacgaggccaugagcugcgacuucaacgggggcaagaucuccgugcaguacaaccucagccacaccuacgcgaucgacgccgccaaccacugcgggaccaucgccaacggcgugcugcagacguucaugcggauggcguggggcggguccuacaucgcccuggacagcggcaagggguccugggacugcaucaugaccagcuaccaguaccucaucauccagaacaccaccugggaggaccacugccaguucucccgccccagccccaucggcuaccuggggcugcucagccagcggacgcgcgacaucuacaucucccggcgccugcugggcaccuucaccuggacccucagcgacuccgagggcaacgagacgcccgggggcuacugccugacccgguggaugcugaucgaggccgagcucaagugcuucgggaacaccgccgucgccaagugcaacgagaagcacgacgaggaguucugcgacaugcugcgccuguucgacuucaacaagcaggcgauccggcgccucaagacccccgcccagaugagcauccagcugaucaacaaggccgugaacgcccugaucaacgaccagcucaucaugaagaaccaccuccgggacaucaugggcauccccuacugcaacuacuccaaguacugcuaccugaaccacacggugaccgggaagaccagccugccccgcugcugccuggucuccaacggcagcuaccugaacgagacccacuucuccgacgacaucgagcagcaggccgacaacaugaucacggagaugcuccagaaggaguacauggaccggcagggcaagaccccgcuggggcugguggaccucuucguguucagcaccuccuucuaccugaucagcaucuuccugcaccuggucaagaucccgacccaccgccacgugaucggcaagcccugccccaagccccaccggcucaaccacauggggaucugcuccugcggccuguacaagcacccgggggugcccgucaaguggaagcgcugaggacuaguaauaaggaaacuguaugaaugucugugggcaggaagugaagagauccuucuguaaagguuuuuggaauuaugucugcugaauaauaaacuuuuuugaaauaauaaaucugguagaaaaaugagaucucaaaggcucuuuucagagccaccaaaaaaaaaaaaaaaaaaaaaaaaaaaaaaaaaaaaaaaaaaaaaaaaaaaaaaaaaaaaaaaaaaaaaaaaaaaaaaaaaaaaaaaaaaaaaaaaaaaaa

SEQ ID NO: 32503 - RNA, 1809 nt, Artificial Sequence
  mRNA product Design b-4 (hSL-A100) comprising derived and/or modified sequence from LASV(LASV237-NIG-2010;Clade II)__AIT17638__GPCmut7 (opt1)
aggagagucccgcagucggcguccagcggcucugcuuguucgugugugugucguugcaggccuuauucaagcuuaccaugggccagaucaucaccuucuuccaggaggugccccacgucaucgaggaggugaugaacaucgugcugaucgcccucagccugcuggccauccucaaggggaucuacaacgucgcgaccugcggccuguucgggcugguguccuuccuccugcugugcggccgcagcugcuccacgaccuacaaggggguguacgagcuccagacccuggagcuggacauggccagccucaacaugaccaugccgcuguccugcacgaagaacaacagccaccacuacaucauggucggcaacgagaccggccuggagcucacccugaccaacacguccaucaucaaccacaaguucugcaaccugagcgacgcccacaagaaggaccucuacgaccacgcccugauguccaucaucagcaccuuccaccuguccauccccaacuucaaccaguacgaggccaugagcugcgacuucaacgggggcaagaucuccgugcaguacaaccucagccacaccuacgcgguggacgccgccaaccacugcgggaccaucgccaacggcguccugcagacguucaugcggauggcguggggcggguccuacaucgcccuggacagcggcaagggguccugggacugcaucaugaccagcuaccaguaccucaucauccagaacaccaccugggaggaccacugccaguucucccgccccagccccaucggcuaccuggggcugcucagccagcggacgcgcgacaucuacaucucccggcgccugcugggcaccuucaccuggacccucagcgacuccgagggcaacgagacgcccgggggcuacugccugacccgguggaugcugaucgaggccgagcucaagugcuucgggaacaccgccguggccaagugcaacgagaagcacgacgaggaguucugcgacaugcugcgccuguucgacuucaacaagcaggcgauccggcgccucaagacccccgcccagaugagcauccagcugaucaacaaggccgugaacgcccugaucaacgaccagcucaucaugaagaaccaccuccgggacaucaugggcauccccuacugcaacuacuccaaguacugcuaccugaaccacacggucaccgggaagaccagccugccccgcugcugccugguguccaacggcagcuaccugaacgagacccacuucuccgacgacaucgagcagcaggccgacaacaugaucacggagcuccugcagaaggaguacauggaccggcagggcaagaccccgcuggggcucguggaccuguucgucuucagcaccuccuucuaccugaucagcaucuuccugcaccucaucaagaucccgacccaccgccacaucacgggcaagcccugccccaagccccaccggcugaaccacauggggaucugcuccugcggccuguacaagcacccgggggugcccgugaaguggaagcgcugaggacuaguaauaaggaaacuguaugaaugucugugggcaggaagugaagagauccuucuguaaagguuuuuggaauuaugucugcugaauaauaaacuuuuuugaaauaauaaaucugguagaaaaaugagaucucaaaggcucuuuucagagccaccaaaaaaaaaaaaaaaaaaaaaaaaaaaaaaaaaaaaaaaaaaaaaaaaaaaaaaaaaaaaaaaaaaaaaaaaaaaaaaaaaaaaaaaaaaaaaaaaaaaaa

SEQ ID NO: 32504 - RNA, 1809 nt, Artificial Sequence
  mRNA product Design b-4 (hSL-A100) comprising derived and/or modified sequence from LASV(LASV253-NIG-2011;Clade II)__AIT17670__GPCmut7 (opt1)
aggagagucccgcagucggcguccagcggcucugcuuguucgugugugugucguugcaggccuuauucaagcuuaccaugggccagaucaucaccuucuuccaggaggugccccacgucaucgaggaggugaugaacaucgugcugaucgcccucagccugcuggccauccucaaggggaucuacaacgucgcgaccugcggccuguucgggcugguguccuuccuccugcugugcggccgcagcugcuccacgaccuacaaggggguguacgagcuccagacccuggagcuggacauggccagccucaacaugaccaugccgcuguccugcacgaagaacaacagccaccacuacaucauggucggcaacgagaccggccuggagcucacccugaccaacacguccaucaucaaccacaaguucugcaaccugagcgacgcccacaagaagaaccucuacgaccacgcccugauguccaucaucagcaccuuccaccuguccauccccaacuucaaccaguacgaggccaugagcugcgacuucaacgggggcaagaucuccgugcaguacaaccucagccacaccuacgcgguggacgccgccaaccacugcgggaccaucgccaacggcguccugcagacguucaugcggauggcguggggcggguccuacaucgcccuggacagcggcaagggguccugggacugcaucaugaccagcuaccaguaccucaucauccagaacaccaccugggaggaccacugccaguucucccgccccagccccaucggcuaccuggggcugcucagccagcggacgcgcgacaucuacaucucccggcgccugcugggcaccuucaccuggacccucagcgacuccgagggcaacgagacgcccgggggcuacugccugacccgguggaugcugaucgaggccgagcucaagugcuucgggaacaccgccguggccaagugcaacgagaagcacgacgaggaguucugcgacaugcugcgccuguucgacuucaacaagcaggcgauccggcgccucaaggcccccgcccagaugagcauccagcugaucaacaaggccgugaacgcccugaucaacgaccagcucaucaugaagaaccaccuccgggacaucaugggcaucccguacugcaacuacuccaaguacugcuaccugaaccacaccgucacggggcgcaccagccugccccggugcugccugguguccaacggcagcuaccugaacgagacccacuucuccgacgacaucgagcagcaggcggacaacaugaucaccgagcuccugcagaaggaguacaucgaccgccagggcaagacgccccuggggcucguggaccuguucgucuucagcaccuccuucuaccugaucagcaucuuccugcaccucgugaagaucccgacccaccggcacaucaucggcaagcccugccccaagccccaccgccugaaccacauggggaucugcuccugcggccuguacaagcacccgggggugcccgucaaguggaagcggugaggacuaguaauaaggaaacuguaugaaugucugugggcaggaagugaagagauccuucuguaaagguuuuuggaauuaugucugcugaauaauaaacuuuuuugaaauaauaaaucugguagaaaaaugagaucucaaaggcucuuuucagagccaccaaaaaaaaaaaaaaaaaaaaaaaaaaaaaaaaaaaaaaaaaaaaaaaaaaaaaaaaaaaaaaaaaaaaaaaaaaaaaaaaaaaaaaaaaaaaaaaaaaaaa

SEQ ID NO: 32505 - RNA, 1809 nt, Artificial Sequence
  mRNA product Design b-4 (hSL-A100) comprising derived and/or modified sequence from LASV(LASV254-NIG-2011;Clade II)__AIT17674__GPCmut7 (opt1)
aggagagucccgcagucggcguccagcggcucugcuuguucgugugugugucguugcaggccuuauucaagcuuaccaugggccagaucaucaccuucuuccaggaggugccccacgucaucgaggaggugaugaacaucgugcugaucgcccucagccugcuggccauccucaaggggaucuacaacgucgcgaccugcggccuguucgggcugguguccuuccuccugcugugcggccgcagcugcuccacgaccuacaaggggguguacgagcuccagacccuggagcuggacaugaccaaccucaacaugacgaugccgcugagcugcaccaagaacaacucccaccacuacaucauggucggcaacgagaccggccuggagcucacccugacgaacaccagcaucaucaaccacaaguucugcaaccuguccgacgcccacaagaagaaccucuacaaccacgcccugaugagcaucaucuccaccuuccaccugagcauccccaacuucaaccaguacgaggccauguccugcgacuucaacgggggcaagaucagcgugcaguacaaccucucccacagcuacgccguggacgcggccaaccacugcgggaccaucgccaacggcguccugcagacguucaugcggauggccuggggcggguccuacaucgcgcuggacagcggcaaggggaacugggacugcaucaugaccuccuaccaguaccucaucauccagaacaccaccugggaggaccacugccaguucagccgccccucccccaucggcuaccuggggcugcucagccagcggacgcgcgacaucuacaucagccggcgccugcugggcaccuucaccuggacccucuccgacagcgagggcaacgagacgcccgggggcuacugccugacccgguggaugcugaucgaggccgagcucaagugcuucgggaacaccgccguggccaagugcaacgagaagcacgacgaggaguucugcgacaugcugcgccuguucgacuucaacaagcaggccauccggcgccucaagacccccgcgcaggccaacauccagcugaucaacaaggccgugaacgcccugaucaacgaccagcucaucaugaagaaccaccuccgggacaucaugggcauccccuacugcaacuacuccaaguacugcuaccugaaccacacggucaccgggaagaccagccugccccgcugcugccugguguccaacggcagcuaccugaacgagacccacuucuccgacgacaucgagcagcaggccgacaacaugaucacggagcuccugcagaaggaguacauggaccggcagggcaagaccccgcuggggcucguggaccuguucgucuucagcaccuccuucuaccugaucagcaucuuccugcaccucgugaagaucccgacccaccgccacgugaucggcaagcccugccccaagccccaccggcugaaccacauggggaucugcuccugcggccuguacaagcacccggggguccccgugaaguggaagcgcugaggacuaguaauaaggaaacuguaugaaugucugugggcaggaagugaagagauccuucuguaaagguuuuuggaauuaugucugcugaauaauaaacuuuuuugaaauaauaaaucugguagaaaaaugagaucucaaaggcucuuuucagagccaccaaaaaaaaaaaaaaaaaaaaaaaaaaaaaaaaaaaaaaaaaaaaaaaaaaaaaaaaaaaaaaaaaaaaaaaaaaaaaaaaaaaaaaaaaaaaaaaaaaaaa

SEQ ID NO: 32506 - RNA, 1809 nt, Artificial Sequence
  mRNA product Design b-4 (hSL-A100) comprising derived and/or modified sequence from LASV(Nig08-A19;Clade III)__ADU56618__GPCmut7 (opt1)
aggagagucccgcagucggcguccagcggcucugcuuguucgugugugugucguugcaggccuuauucaagcuuaccaugggccagaucgugaccuucuuccaggaggucccccacgugaucgaggaggugaugaacaucguccugaucgcccucagcauccuggccauccugaaggggcucuacaacaucgcgaccugcggccugaucgggcuggugacguuccuccugcuguccggccgcagcugcuccaugaccuacaaggggguguacgagcuccagacccuggagcugaacaugaacacccucaacaugacgaugccgcugagcugcaccaagaacaacucccaccacuacaucauggucggcaacgagaccggccuggagcucacccugacgaacaccagccugcuccaccacaaguucugcaaccuguccgacgcccacaagaagaaccuguacgaccacacccucaugagcaucaucuccaccuuccaccugagcauccccaacuucaaccaguacgaggccauguccugcgacuucaacgggggcaagaucacggugcaguacaaccugagccacuccuacgccaucgacgccgcgaaccacugcgggaccguggccaacggcguccuccagaccuucaugcggauggccuggggcgggagcuacaucgcccuggacuccggccgcgggaagugggacugcaucaugaccagcuaccaguaccugaucauccagaacacgaccugggaggaccacugccaguucucccggcccagccccaucggcuaccucgggcugcugucccagcgcacccgggacaucuacaucagccgccggcuccugggcaccuucacguggacccugagcgacuccgagggcaacgagacccccgggggcuacugccucacccgcuggaugcugaucgaggcggagcugaagugcuucgggaacacggccguggccaagugcaacgagaagcacgacgaggaguucugcgacaugcuccggcuguucgacuucaacaagcaggccauccgccggcugaaggcccccgcgcagaugagcauccagcucaucaacaaggccgugaacgcccugaucaacgaccagcugaucaugaagaaccaccuccgcgacaucaugggcauccccuacugcaacuacuccaaguacugcuaccugaaccacaccagcaccgggcggaccucccugccccgcugcugccucgucagcaacggcuccuaccugaacgagacgcacuucagcgacgacaucgagcagcaggccgacaacaugaucaccgagaugcugcagaaggaguaccucgaccggcagggcaagaccccgcuggggcugguggaccuguucguguucuccaccagcuucuaccucaucuccaucuuccugcaccuggucaagaucccgacgcaccgccacaucgugggcaagcccugccccaagccccaccggcucaaccacauggggaucugcagcugcggccuguacaagcagccgggggugcccguccgcuggaagcggugaggacuaguaauaaggaaacuguaugaaugucugugggcaggaagugaagagauccuucuguaaagguuuuuggaauuaugucugcugaauaauaaacuuuuuugaaauaauaaaucugguagaaaaaugagaucucaaaggcucuuuucagagccaccaaaaaaaaaaaaaaaaaaaaaaaaaaaaaaaaaaaaaaaaaaaaaaaaaaaaaaaaaaaaaaaaaaaaaaaaaaaaaaaaaaaaaaaaaaaaaaaaaaaaa

SEQ ID NO: 32507 - RNA, 1812 nt, Artificial Sequence
  mRNA product Design b-4 (hSL-A100) comprising derived and/or modified sequence from LASV(G1180-SLE-2010;Clade IV)__AIT17168__GPCmut7 (opt1)
aggagagucccgcagucggcguccagcggcucugcuuguucgugugugugucguugcaggccuuauucaagcuuaccaugggccagaucgugaccuucuuccaggaggucccccacgugaucgaggaggugaugaacaucguccugaucgcccucagcauccuggccgugcugaaggggcucuacaacuucgcgaccugcggccugguggggcugcucaccuuccugcugcucugcggccgcuccugcaccgccagccgguacaagggggucuacgagcugcagacccuggagcucaacauggagacccugaacaugacgaugccgcuguccugcaccaagaacaacagccaccacuacaucauggugggcaacgagaccggccucgagcugacccugacgaacaccuccaucaucaaccacaaguucugcaaccucagcgacgcccacaagaagaaccuguacgaccacgcccugauguccaucaucagcaccuuccaccucuccauccccaacuucaaccaguacgaggccaugagcugcgacuucaacgggggcaagaucuccgugcaguacaaccugagccacuccuacgcgggggacgccgccaaccacugcggcaccgucgccaacggggugcugcagacguucaugcgcauggcguggggcggcagcuacaucgcccucgacuccgggcacggcagcugggacugcaucaugaccuccuaccaguaccugaucauccagaacaccaccugggaggaccacugccaguucagccggcccucccccaucggguaccugggccuccugagccagcgcacgcgggacaucuacaucagccgccggcugcucggcaccuucaccuggacccuguccgacagcgaggggaaggacacgccgggcggguacugccugacccgcuggaugcucaucgaggccgagcugaagugcuucggcaacaccgccguggccaagugcaacgagaagcacgacgaggaguucugcgacaugcugcggcuguucgacuucaacaagcaggcgauccagcgccugaaggcccccgcccagauguccauccagcugaucaacaaggccgucaacgcccucaucaacgaccagcugaucaugaagaaccaccuccgggacaucauggggauccccuacugcaacuacagcaaguacugcuaccucaaccacaccacgaccggcaagaccucccugcccaagugcugccuggugagcaacggcuccuaccucaacgagacccacuucagcgacgacaucgagcagcaggcggacaacaugaucacggagaugcugcagaaggaguacauggagcgccaggggaagacgccccugggccucguggaccuguucgucuucuccaccagcuucuaccugaucuccaucuuccugcaccucgugaagaucccgacccaccggcacaucgugggcaagagcugccccaagccccaccgccugaaccacauggggaucugcuccugcgggcuguacaagcagcccggcgucccggugaaguggaagcggugaggacuaguaauaaggaaacuguaugaaugucugugggcaggaagugaagagauccuucuguaaagguuuuuggaauuaugucugcugaauaauaaacuuuuuugaaauaauaaaucugguagaaaaaugagaucucaaaggcucuuuucagagccaccaaaaaaaaaaaaaaaaaaaaaaaaaaaaaaaaaaaaaaaaaaaaaaaaaaaaaaaaaaaaaaaaaaaaaaaaaaaaaaaaaaaaaaaaaaaaaaaaaaaaa

SEQ ID NO: 32508 - RNA, 1812 nt, Artificial Sequence
  mRNA product Design b-4 (hSL-A100) comprising derived and/or modified sequence from LASV(G1442-SLE-2011;Clade IV)__AIT17180__GPCmut7 (opt1)
aggagagucccgcagucggcguccagcggcucugcuuguucgugugugugucguugcaggccuuauucaagcuuaccaugggccagaucgugaccuucuuccaggaggucccccacgugaucgaggaggugaugaacaucguccugaucgcccucagcauccuggccgugcugaaggggcucuacaacguggcgaccugcggccugaucgggcuggucacguuccuccugcugugcggccgcuccugcaccaccacccucuacaaggggguguacgagcugcagacgcuggagcucaacauggagacccugaacaugaccaugccgcugagcugcaccaagaacaacucccaccacuacauccgggugggcaacgagacgggccucgagcugacccugaccaacaccagcaucaucaaccacaaguucugcaaccucuccgacgcccacaagaagaaccuguacgaccacgcccugaugagcaucaucuccacguuccaccucagcauccccaacuucaaccaguacgaggccauguccugcgacuucaacgggggcaagaucagcguccaguacaaccugucccacagcuacgccggggacgcggccaaccacugcggcaccguggccaacggggugcugcagaccuucaugcgcauggccuggggcggcuccuacaucgcgcucgacagcgggcggggcaacugggacugcaucaugaccuccuaccaguaccugaucauccagaacacgaccugggacgaccacugccaguucagccgccccucccccaucggguaccugggccuccugagccagcggacccgcgacgucuacaucucccggcgccugcucggcaccuucacguggacccugagcgacagcgaggggaaggacaccccgggcggguacugccugacccgguggaugcucaucgaggccgagcugaagugcuucggcaacacggccguggccaagugcaacgagaagcacgacgaggaguucugcgacaugcugcgccucuucgacuucaacaagcaggccauccagcggcugaaggcgcccgcccagauguccauccagcugaucaacaaggccgugaacgcccucaucaacgaccagcugaucaugaagaaccaccuccgcgacaucauggggauccccuacugcaacuacagcaaguacugcuaccugaacaacaccgccaccggcaagaccucccugcccaagugcugccugaucagcaacggcuccuaccucaacgagacgcacuucagcgacgacaucgagcaggaggcggacaacaugaucaccgagaugcugcagaaggaguacauggagcggcaggggaagacgccccugggccucgucgaccuguucguguucuccaccagcuucuaccugaucuccaucuuccugcaccucgugaagaucccgacccaccgccacaucgucggcaagagcugccccaagccccaccggcugaaccacauggggaucugcuccugcgggcuguacaagcagcccggcgugccggugcgcuggaagcggugaggacuaguaauaaggaaacuguaugaaugucugugggcaggaagugaagagauccuucuguaaagguuuuuggaauuaugucugcugaauaauaaacuuuuuugaaauaauaaaucugguagaaaaaugagaucucaaaggcucuuuucagagccaccaaaaaaaaaaaaaaaaaaaaaaaaaaaaaaaaaaaaaaaaaaaaaaaaaaaaaaaaaaaaaaaaaaaaaaaaaaaaaaaaaaaaaaaaaaaaaaaaaaaaa

SEQ ID NO: 32509 - RNA, 1812 nt, Artificial Sequence
  mRNA product Design b-4 (hSL-A100) comprising derived and/or modified sequence from LASV(G3010-SLE-2013;Clade IV)__AIT17344__GPCmut7 (opt1)
aggagagucccgcagucggcguccagcggcucugcuuguucgugugugugucguugcaggccuuauucaagcuuaccaugggccagaucgugaccuucuuccaggaggucccccacgugaucgaggaggugaugaacaucguccugaucgcccucagcauccuggccgugcugaaggggcucuacaacuucgcgaccugcggccugguggggcuggucacguuccuccugcugugcggccgcuccugcaccaccagccucuacaaggggguguacgagcugcagacccuggagcucaacauggagacgcugaacaugaccaugccgcuguccugcaccaagaacaacagccaccacuacaucauggugggcaacgagaccggccucgagcugacgcugaccaacaccuccaucaucaaccacaaguucugcaaccucagcgacgcccacaagaagaaccuguacaaccacgcccugauguccaucaucagcaccuuccaccucuccauccccaacuucaaccaguacgaggccaugagcugcgacuucaacgggggcaagaucuccguccaguacaaccugagccacuccuacgccggggacgcggccagccacugcggcacgguggccaacggggugcugcagaccuucaugcggauggccuggggcggcuccuacaucgcgcucgacagcggguacggcaagugggacugcaucaugaccuccuaccaguaccugaucauccagaacaccacgugggaggaccacugccaguucagccgccccucccccaucggguaccugggccuccugagccagcggacccgcgacaucuacaucagccggcgccugcucggcaccuucaccuggacgcuguccgacagcgaggggaaggacaccccgggcggguacugccugacccgguggaugcucaucgaggccgagcugaagugcuucggcaacaccgccgucgccaagugcaacgagaagcacgacgaggaguucugcgacaugcugcgccucuucgacuucaacaagcaggccauccagcggcugaagacgcccgcgcagauguccauccagcugaucaacaaggccgugaacgcccucaucaacgaccagcugaucaugaagaaccaccuccgcgacaucauggggauccccuacugcaacuacagcaaguacugcuaccugaaccacaccaccaccggcaagacgucccugcccaagugcugccuggugagcaacggcuccuaccucaacgagacccacuucagcgacgacaucgagcagcaggccgacaacaugaucaccgagaugcugcagaaggaguacauggagcggcaggggaagacgccccugggccucgucgaccuguucguguucuccaccagcuucuaccugaucuccaucuuccugcaccucgugaagaucccgacccaccgccacaucgucggcaagagcugccccaagccccaccggcugaaccacauggggaucugcuccugcgggcuguacaagcagcccggcgugccggugcgcuggaagcggugaggacuaguaauaaggaaacuguaugaaugucugugggcaggaagugaagagauccuucuguaaagguuuuuggaauuaugucugcugaauaauaaacuuuuuugaaauaauaaaucugguagaaaaaugagaucucaaaggcucuuuucagagccaccaaaaaaaaaaaaaaaaaaaaaaaaaaaaaaaaaaaaaaaaaaaaaaaaaaaaaaaaaaaaaaaaaaaaaaaaaaaaaaaaaaaaaaaaaaaaaaaaaaaaa

SEQ ID NO: 32510 - RNA, 1812 nt, Artificial Sequence
  mRNA product Design b-4 (hSL-A100) comprising derived and/or modified sequence from LASV(G502-SLE-2009;Clade IV)__AIT17126__GPCmut7 (opt1)
aggagagucccgcagucggcguccagcggcucugcuuguucgugugugugucguugcaggccuuauucaagcuuaccaugggccagaucgugaccuucuuccaggaggucccccacgugaucgaggaggugaugaacaucguccugaucgcccucagcauccuggccgugcugaaggggcucuacaacuucgcgaccugcggccugguggggcugcucacguuccugcugcucugcggccgcuccugcaccaccgggcuguacaagggcgucuacgagcugcagacccucgagcugaacauggagacgcugaacaugaccaugccgcucagcugcaccaagaacaacucccaccacuacaucauggugggcaacgagaccgggcuggagcugacgcucaccaacaccagcaucaucaaccacaaguucugcaaccuguccgacgcccacaagaagaaccuguacgaccacgcccucaugagcaucaucuccaccuuccaccugagcauccccaacuucaaccaguacgaggccauguccugcgacuucaacggcgggaagaucagcgugcaguacaaccugucccacagcuacgccggcgacgcggccgaccacugcgggacggucgccaacggcgugcuccagaccuucaugcggauggccuggggcggguccuacaucgcgcuggacagcggccgcgggcggugggacugcaucaugaccuccuaccaguaccugaucauccagaacaccacgugggaggaccacugccaguucagccgccccucccccaucggcuaccucggccugcugagccagcggacccgcgacaucuacaucucccggcgccuccuggggaccuucaccuggacgcugagcgacagcgagggcaaggacacccccgggggcuacugccucacccgguggaugcugaucgaggccgagcugaagugcuucgggaacaccgccguggccaagugcaacgagaagcacgacgaggaguucugcgacaugcuccgccuguucgacuucaacaagcaggccauccagcggcugaaggcgcccgcccagauguccauccagcucaucaacaaggccgucaacgcccugaucaacgaccagcuggugaugaagaaccaccuccgcgacaucaugggcauccccuacugcaacuacagccgguacugcuaccugaaccacacgaccaccggccgcaccucccugcccaagugcugccucgugagcaacggguccuaccugaacgagacgcacuucagcgacgacaucgagcagcaggccgacaacaugaucaccgagaugcugcagaaggaguacauggagcggcagggcaagaccccgcucgggcuggucgaccuguucguguucuccaccagcuucuaccugaucuccaucuuccuccaccuggugaagaucccgacgcaccgccacaucgucggcaagagcugccccaagccccaccggcugaaccacauggggaucugcuccugcggccucuacaagcagcccggcgugccggugaaguggaagcgcugaggacuaguaauaaggaaacuguaugaaugucugugggcaggaagugaagagauccuucuguaaagguuuuuggaauuaugucugcugaauaauaaacuuuuuugaaauaauaaaucugguagaaaaaugagaucucaaaggcucuuuucagagccaccaaaaaaaaaaaaaaaaaaaaaaaaaaaaaaaaaaaaaaaaaaaaaaaaaaaaaaaaaaaaaaaaaaaaaaaaaaaaaaaaaaaaaaaaaaaaaaaaaaaaa

SEQ ID NO: 32511 - RNA, 1812 nt, Artificial Sequence
  mRNA product Design b-4 (hSL-A100) comprising derived and/or modified sequence from LASV(G733-SLE-2010;Clade IV)__AIT17154__GPCmut7 (opt1)
aggagagucccgcagucggcguccagcggcucugcuuguucgugugugugucguugcaggccuuauucaagcuuaccaugggccagaucgugaccuucuuccaggaggucccccacgugaucgaggaggugaugaacaucguccugaucgcccucagcauccuggccgugcugaaggggcucuacaacuucgcgaccugcggcaucguggggcuggucuccuuccugcuccugugcggccgcagcugcacgaccucccuguacaaggggguguacgagcuccagacccuggagcugaacauggagacccucaacaugacgaugccgcugagcugcaccaagaacaacucccaccacuacaucauggugggcaacgagaccggccuggagcucacccugacgaacaccagcaucaucaaccacaaguucugcaaccuguccgacgcccacaagaagaaccucuacgaccacgcccugaugagcaucaucuccaccuuccaccugagcauccccaacuucaaccaguacgaggccauguccugcgacuucaacgggggcaagaucagcguccaguacaaccucucccacagcuacgccggggacgcggccaaccacugcggcaccaucgccaacggggugcugcagacguucaugcggauggccuggggcggcuccuacaucgcgcuggacagcgggcgcgaccggugggacugcaucaugaccuccuaccaguaccucaucauccagaacaccaccugggaggaccacugccaguucagccgccccucccccaucggcuaccuggggcugcucagccagcggacgcgcgacaucuacaucagccggcgccugcugggcaccuucaccuggacccucuccgacagcgagggcaaggacacgcccgggggcuacugccugacccgguggaugcugaucgaggccgagcucaagugcuucgggaacaccgccguggccaagugcaacgagaagcacgacgaggaguucugcgacaugcugcgccuguucgacuucaacaagcaggccauccagcggcucaaggcgcccgcccagauguccauccagcugaucaacaaggccgucaacgcccugaucaacgaccagcucaucaugaagaaccaccuccgcgacaucaugggcauccccuacugcaacuacagcaaguacugcuaccugaaccacaccacgaccgggaagaccucccugcccaagugcugccuggugagcaacggcuccuaccugaacgagacccacuucagcgacgacaucgagcagcaggccgacaacaugaucacggagaugcuccagaaggaguacauggagcggcagggcaagaccccgcuggggcugguggaccucuucgucuucuccaccagcuucuaccugaucuccaucuuccugcaccuggugaagaucccgacccaccgccacguggucggcaagagcugccccaagccccaccggcucaaccacauggggaucugcuccugcggccuguacgggcagcccggcgugccggugaaguggaagcgcugaggacuaguaauaaggaaacuguaugaaugucugugggcaggaagugaagagauccuucuguaaagguuuuuggaauuaugucugcugaauaauaaacuuuuuugaaauaauaaaucugguagaaaaaugagaucucaaaggcucuuuucagagccaccaaaaaaaaaaaaaaaaaaaaaaaaaaaaaaaaaaaaaaaaaaaaaaaaaaaaaaaaaaaaaaaaaaaaaaaaaaaaaaaaaaaaaaaaaaaaaaaaaaaaa

SEQ ID NO: 32512 - RNA, 1812 nt, Artificial Sequence
  mRNA product Design b-4 (hSL-A100) comprising derived and/or modified sequence from MOPV/LASV reassortant(IGS-1;Clade IV)__AFY05576__GPCmut7 (opt1)
aggagagucccgcagucggcguccagcggcucugcuuguucgugugugugucguugcaggccuuauucaagcuuaccaugggccagaucgugaccuucuuccaggaggucccccacgugaucgaggaggugaugaacaucguccugaucgcccucagcgugcuggccgugcugaaggggcucuacaacuucgcgaccugcggccuggucgggcuggugacguuccuccugcugugcggccgcuccugcaccaccagccucuacaaggggguguacgagcugcagacccuggagcucaacauggagacgcugaacaugaccaugccgcuguccugcaccaagaacaacagccaccacuacaucauggucggcaacgagaccggccucgagcugacgcugaccaacaccuccaucaucaaccacaaguucugcaaccucagcgacgcccacaagaagaaccuguacgaccacgcccugauguccaucaucagcaccuuccaccucuccauccccaacuucaaccaguacgaggccaugagcugcgacuucaacgggggcaagaucuccgugcaguacaaccugagccacuccuacgccggggacgcggccaaccacugcggcacgguggccaacgggguccugcagaccuucaugcggauggccuggggcggcagcuacaucgcgcucgacuccgggcgcggcaacugggacugcaucaugaccagcuaccaguaccugaucauccagaacaccacgugggaggaccacugccaguucucccggcccagccccaucggguaccugggccuccugucccagcgcacccgggacaucuacaucagccgccggcugcucggcaccuucaccuggacgcugagcgacuccgagggggaggacaccccgggcggguacugccugacccgcuggaugcucaucgaggccgagcugaagugcuucggcaacaccgccguggccaagugcaacgagaagcacgacgaggaguucugcgacaugcugcggcuguucgacuucaacaagcaggccauccagcgccugaaggcgcccgcccagaugagcauccagcugaucaacaaggccgugaacgcccucaucaacgaccagcugaucaugaagaaccaccuccgggacaucauggggauccccuacugcaacuacuccaaguacugcuaccucaaccacacgaccaccggccgcaccagccugcccaagugcugccuggucuccaacggcagcuaccucaacgagacgcacuucuccgacgacaucgagcagcaggccgacaacaugaucaccgagaugcugcagaaggaguacauggagcggcaggggaagacgccccugggccucguggaccuguucguguucagcaccuccuucuaccugaucagcaucuuccugcaccucgucaagaucccgacccaccgccacaucguggggaaguccugccccaagccccaccggcugaaccacaugggcaucugcagcugcgggcuguacaagcagcccggcgugccggucaaguggaagcgcugaggacuaguaauaaggaaacuguaugaaugucugugggcaggaagugaagagauccuucuguaaagguuuuuggaauuaugucugcugaauaauaaacuuuuuugaaauaauaaaucugguagaaaaaugagaucucaaaggcucuuuucagagccaccaaaaaaaaaaaaaaaaaaaaaaaaaaaaaaaaaaaaaaaaaaaaaaaaaaaaaaaaaaaaaaaaaaaaaaaaaaaaaaaaaaaaaaaaaaaaaaaaaaaaa

SEQ ID NO: 32513 - RNA, 1812 nt, Artificial Sequence
  mRNA product Design b-4 (hSL-A100) comprising derived and/or modified sequence from LASV(LM765-SLE-2012;Clade IV)__AIT17814__GPCmut7 (opt1)
aggagagucccgcagucggcguccagcggcucugcuuguucgugugugugucguugcaggccuuauucaagcuuaccaugggccagaucgugaccuucuuccaggaggucccccacgugaucgaggaggugaugaacaucguccugaucgcccucagcauccuggccgugcugaaggggcucuacaacuucgcgaccugcggccugguggggcuggucacguuccuccugcugugcggccgcuccugcaccaccagccucuacaaggggguguacgagcugcagacccuggagcucaacauggagacgcugaacaugaccaugccgcuguccugcaccaagaacaacagccaccacuacaucauggugggcaacgagaccggccucgagcugacgcugaccaacaccuccaucaucgaccacaaguucugcaaccucagcgacgcccaccggaagaaccuguacgaccacgcccugauguccaucaucagcaccuuccaccucuccauccccaacuucaaccaguacgaggccaugagcugcgacuucaacgggggcaagaucuccguccaguacaaccugagccacuccuacgccaaggacgcggccgaccacugcgggacgguggccaacggcgugcugcagaccuucaugcgcauggccuggggcgggagcuacaucgcgcucgacuccggccgggggcgcugggacugcaucaugaccagcuaccaguaccugaucauccagaacaccacgugggaggaccacugccaguucucccggcccagccccaucggcuaccuggggcuccugucccagcgcacccgggacaucuacaucagccgccggcugcucggcaccuucaccuggacgcugagcgacuccgagggcaaggacacccccgggggcuacugccugacccgcuggaugcucaucgaggccgagcugaagugcuucgggaacaccgccgucgccaagugcaacgagaagcacgacgaggaguucugcgacaugcugcggcuguucgacuucaacaagcaggccauccagcgccugaaggcgcccgcccagaugagcauccagcugaucaacaaggccgugaacgcccucaucaacgaccagcugaucaugaagaaccaccuccgggacaucaugggcauccccuacugcaacuacuccaaguacugcuaccucaaccacacgaccaccgggaagaccagccugcccaagugcugccugguguccaacggcagcuaccucaacgagacgcacuucuccgacgacaucgagcagcaggccgacaacaugaucaccgagaugcugcagaaggaguacauggagcgccagggcaagaccccgcuggggcucgucgaccuguucguguucagcaccuccuucuaccugaucagcaucuuccugcaccucgugaagaucccgacgcaccggcacaucgucggcaagcccugccccaagccccaccgccugaaccacauggggaucugcuccugcggccuguacaagcagccgggggugcccgugaaguggaagcggugaggacuaguaauaaggaaacuguaugaaugucugugggcaggaagugaagagauccuucuguaaagguuuuuggaauuaugucugcugaauaauaaacuuuuuugaaauaauaaaucugguagaaaaaugagaucucaaaggcucuuuucagagccaccaaaaaaaaaaaaaaaaaaaaaaaaaaaaaaaaaaaaaaaaaaaaaaaaaaaaaaaaaaaaaaaaaaaaaaaaaaaaaaaaaaaaaaaaaaaaaaaaaaaaa

SEQ ID NO: 32514 - RNA, 1812 nt, Artificial Sequence
  mRNA product Design b-4 (hSL-A100) comprising derived and/or modified sequence from LASV(LM776-SLE-2012;Clade IV)__AIT17824__GPCmut7 (opt1)
aggagagucccgcagucggcguccagcggcucugcuuguucgugugugugucguugcaggccuuauucaagcuuaccaugggccagaucgugaccuucuuccaggaggucccccacgugaucgaggaggugaugaacaucguccugaucgcccucagcauccuggccgugcugaaggggcucuacaacuucgcgaccugcggccugguggggcuggucacguuccuccugcugugcggccgcuccugcaccaccagcguguacaaggggguguacgagcuccagacccuggagcugaacauggagacgcucaacaugaccaugccgcuguccugcaccaagaacaacagccaccacuacaucauggucggcaacgagaccggccuggagcucacgcugaccaacaccuccaucaucaaccacaaguucugcaaccugagcgacgcccacaagaagaaccucuacgaccacgcccugauguccaucaucagcaccuuccaccuguccauccccaacuucaaccaguacgaggccaugagcugcgacuucaacgggggcaagaucuccgugcaguacaaccucagccacuccuacgccggggacgcggccaaccacugcggcacgguggccaacgggguccugcagaccuucaugcggauggccuggggcggcagcuacaucgcgcuggacuccgggcacggcaagugggacugcaucaugaccagcuaccaguaccucaucauccagaacaccacgugggaggaccacugccaguucucccgccccagccccaucggguaccugggccugcucucccagcggacccgcgacaucuacaucagccggcgccugcugggcaccuucaccuggacgcucagcgacuccgaggggaaggacaccccgggcggguacugccugacccgguggaugcugaucgaggccgagcucaagugcuucggcaacaccgccguggccaagugcaacgagaagcacgacgaggaguucugcgacaugcugcgccuguucgacuucaacaagcaggccauccagcggcucaaggcgcccgcccagaugagcauccagcugaucaacaaggccgugaacgcccugaucaacgaccagcucaucaugaagaaccaccuccgcgacaucauggggauccccuacugcaacuacuccaaguacugcuaccugaaccacacgaccaccggcaagaccagccugcccaagugcugccuggucuccaacggcagcuaccugaacgagacgcacuucuccgacgacaucgagcagcaggccgacaacaugaucaccgagaugcuccagaaggaguacauggagcggcaggggaagacgccccugggccugguggaccucuucguguucagcaccuccuucuaccugaucagcaucuuccugcaccuggucaagaucccgacccaccgccacaucguggggaaguccugccccaagccccaccggcucaaccacaugggcaucugcagcugcgggcuguacaagcagcccggcgugccgguccgcuggaagcggugaggacuaguaauaaggaaacuguaugaaugucugugggcaggaagugaagagauccuucuguaaagguuuuuggaauuaugucugcugaauaauaaacuuuuuugaaauaauaaaucugguagaaaaaugagaucucaaaggcucuuuucagagccaccaaaaaaaaaaaaaaaaaaaaaaaaaaaaaaaaaaaaaaaaaaaaaaaaaaaaaaaaaaaaaaaaaaaaaaaaaaaaaaaaaaaaaaaaaaaaaaaaaaaaa

SEQ ID NO: 32515 - RNA, 1812 nt, Artificial Sequence
  mRNA product Design b-4 (hSL-A100) comprising derived and/or modified sequence from LASV(Mad39;Clade IV)__ANH09722__GPCmut7 (opt1)
aggagagucccgcagucggcguccagcggcucugcuuguucgugugugugucguugcaggccuuauucaagcuuaccaugggccagaucgugaccuucuuccaggaggucccccacgugaucgaggaggugaugaacaucguccugaucgcccucagcauccuggccgugcugaaggggcucuacaacguggcgaccugcggccugaucgggcuggucacguuccuccugcugugcggccgcuccugcaccaccacccucuacaaggggguguacgagcugcaggcccuggagcucaacauggagacgcugaacaugaccaugccgcugagcugcaccaagaacaacucccaccacuacauccgggugggcaacgagaccggccucgagcugacgcugaccaacaccagccucaucaaccacaaguucugcaaccuguccgacgcccacaagaagaaccuguacgaccacgcccucaugagcaucaucuccaccuuccaccugagcauccccaacuucaaccaguacgaggccauguccugcgacuucaacgacgggaagaucagcguccaguacaaccugucccacacguacgcgggcgacaccgccaaccacugcgggaccguggccaacggcgugcuccagaccuucaugcgcauggccuggggcgggagcuacaucgcgcuggacuccggccgcgggggcugggacugcaucaugacgagcuaccaguaccugaucauccagaacaccaccugggaggaccacugccaguucucccggcccagccccaucggguaccucggccugcugucccagcggacccgcgacaucuacaucagccggcgccuccugggcacguucaccuggacccuguccgacagcgaggggaaggacaccccgggcggguacugccucacgcgguggaugcugaucgaggccgagcugaagugcuucggcaacaccgccgucgccaagugcaacgagaagcacgacgaggaguucugcgacaugcuccgccuguucgacuucaacaagcaggccauccagcggcugaaggcgcccgcccagaugagcauccagcucaucaacaaggccgugaacgcccugaucaacgaccagcugaucaugaagaaccaccuccgcgacaucauggggauccccuacugcaacuacuccaaguacugcuaccugaaccacaccgugaccggcaagacgagccugcccaagugcugccucgucuccaacggcagcuaccugaacgagacccacuucuccgacgacaucgagcagcaggccgacaacaugaucaccgagaugcugcagaaggaguacauggagcggcaggggaagacgccccucggccugguggaccuguucguguucagcaccuccuucuaccugaucagcaucuuccuccaccuggucaagaucccgacccaccgccacgugguggggaagcccugccccaagccccaccggcugaaccacaugggcaucugcuccugcggguucuacaagcagccgggcguccccgugcgcuggaagcggugaggacuaguaauaaggaaacuguaugaaugucugugggcaggaagugaagagauccuucuguaaagguuuuuggaauuaugucugcugaauaauaaacuuuuuugaaauaauaaaucugguagaaaaaugagaucucaaaggcucuuuucagagccaccaaaaaaaaaaaaaaaaaaaaaaaaaaaaaaaaaaaaaaaaaaaaaaaaaaaaaaaaaaaaaaaaaaaaaaaaaaaaaaaaaaaaaaaaaaaaaaaaaaaaa

SEQ ID NO: 32516 - RNA, 1812 nt, Artificial Sequence
  mRNA product Design b-4 (hSL-A100) comprising derived and/or modified sequence from LASV(Z0947-SLE-2011;Clade IV)__AIT17840__GPCmut7 (opt1)
aggagagucccgcagucggcguccagcggcucugcuuguucgugugugugucguugcaggccuuauucaagcuuaccaugggccagaucgugaccuucuuccaggaggucccccacgugaucgaggaggugaugaacaucguccugaucgcccucagcauccuggccgugcugaaggggcucuacaacuucgcgaccugcggccugguggggcuggucacguuccuccugcugugcggccgcuccugcaccaucagccucuacaaggggguguacgagcugcagacccuggagcucaacauggagacccugaacaugacgaugccgcuguccugcaccaagaacaacagccaccacuacaucauggugggcaacgagaccggccucgagcugacccugacgaacaccuccaucaucaaccacaaguucugcaaccucagcgacgcccacaagaagaaccuguacgaccacgcccugauguccaucaucagcaccuuccaccucuccauccccaacuucaaccaguacgaggccaugagcugcgacuucaacgggggcaagaucuccguccaguacaaccugagccacuccuacgccggggacgcggccaaccacugcggcaccguggccaacggggugcugcagacguucaugcggauggccuggggcggcagcuacaucgcgcucgacuccgggcgcgaccggugggacugcaucaugaccagcuaccaguaccugaucauccagaacaccaccugggaggaccacugccaguucucccgccccagccccaucggcuaccuggggcuccugucccagcggacgcgcgacaucuacaucagccggcgccugcucggcaccuucaccuggacccugagcgacuccgagggcaaggacacgcccgggggcuacugccugacccgguggaugcucaucgaggccgagcugaagugcuucgggaacaccgccgucgccaagugcaacgagaagcacgacgaggaguucugcgacaugcugcgccucuucgacuucaacaagcaggccauccagcggcugaaggcgcccgcccagaugagcauccagcugaucaacaaggccgugaacgcccucaucaacgaccagcugaucaugaagaaccaccuccgcgacaucaugggcauccccuacugcaacuacuccaaguacugcuaccugaaccacaccacgaccgggaagaccagccugcccaagugcugccugguguccaacggcagcuaccucaacgagacccacuucuccgacgacaucgagcagcaggccgacaacaugaucacggagaugcugcagaaggaguacauggagcggcagggcaagaccccgcuggggcucgucgaccuguucguguucagcaccuccuucuaccugaucagcaucuuccugcaccucgugaagaucccgacccaccgccacaucgucggcaagcccugccccaagccccaccggcugaaccacauggggaucugcuccugcggccuguacaagcagccgggggugcccgugaaguggaagcgcugaggacuaguaauaaggaaacuguaugaaugucugugggcaggaagugaagagauccuucuguaaagguuuuuggaauuaugucugcugaauaauaaacuuuuuugaaauaauaaaucugguagaaaaaugagaucucaaaggcucuuuucagagccaccaaaaaaaaaaaaaaaaaaaaaaaaaaaaaaaaaaaaaaaaaaaaaaaaaaaaaaaaaaaaaaaaaaaaaaaaaaaaaaaaaaaaaaaaaaaaaaaaaaaaa

SEQ ID NO: 32517 - RNA, 1812 nt, Artificial Sequence
  mRNA product Design b-4 (hSL-A100) comprising derived and/or modified sequence from LASV(Josiah;Clade IV)__NP_694870__GPCmut7 (opt1)
aggagagucccgcagucggcguccagcggcucugcuuguucgugugugugucguugcaggccuuauucaagcuuaccaugggccagaucgugaccuucuuccaggaggucccccacgugaucgaggaggugaugaacaucguccugaucgcccucagcgugcuggccgugcugaaggggcucuacaacuucgcgaccugcggccuggucgggcuggugacguuccuccugcugugcggccgcuccugcaccaccagccucuacaaggggguguacgagcugcagacccuggagcucaacauggagacgcugaacaugaccaugccgcuguccugcaccaagaacaacagccaccacuacaucauggucggcaacgagaccggccucgagcugacgcugaccaacaccuccaucaucaaccacaaguucugcaaccucagcgacgcccacaagaagaaccuguacgaccacgcccugauguccaucaucagcaccuuccaccucuccauccccaacuucaaccaguacgaggccaugagcugcgacuucaacgggggcaagaucuccgugcaguacaaccugagccacuccuacgccggggacgcggccaaccacugcggcacgguggccaacgggguccugcagaccuucaugcggauggccuggggcggcagcuacaucgcgcucgacuccgggcgcggcaacugggacugcaucaugaccagcuaccaguaccugaucauccagaacaccacgugggaggaccacugccaguucucccggcccagccccaucggguaccugggccuccugucccagcgcacccgggacaucuacaucagccgccggcugcucggcaccuucaccuggacgcugagcgacuccgaggggaaggacaccccgggcggguacugccugacccgcuggaugcucaucgaggccgagcugaagugcuucggcaacaccgccguggccaagugcaacgagaagcacgacgaggaguucugcgacaugcugcggcuguucgacuucaacaagcaggccauccagcgccugaaggcgcccgcccagaugagcauccagcugaucaacaaggccgugaacgcccucaucaacgaccagcugaucaugaagaaccaccuccgggacaucauggggauccccuacugcaacuacuccaaguacugcuaccucaaccacacgaccaccggccgcaccagccugcccaagugcugccuggucuccaacggcagcuaccucaacgagacgcacuucuccgacgacaucgagcagcaggccgacaacaugaucaccgagaugcugcagaaggaguacauggagcggcaggggaagaccccgcugggccugguggaccucuucguguucagcaccuccuucuaccugaucagcaucuuccugcaccucgucaagauccccacgcaccgccacaucguggggaaguccugccccaagccccaccggcugaaccacaugggcaucugcagcugcgggcuguacaagcagccgggcgugcccgucaaguggaagcgcugaggacuaguaauaaggaaacuguaugaaugucugugggcaggaagugaagagauccuucuguaaagguuuuuggaauuaugucugcugaauaauaaacuuuuuugaaauaauaaaucugguagaaaaaugagaucucaaaggcucuuuucagagccaccaaaaaaaaaaaaaaaaaaaaaaaaaaaaaaaaaaaaaaaaaaaaaaaaaaaaaaaaaaaaaaaaaaaaaaaaaaaaaaaaaaaaaaaaaaaaaaaaaaaaa

SEQ ID NO: 32518 - RNA, 1809 nt, Artificial Sequence
  mRNA product Design b-4 (hSL-A100) comprising derived and/or modified sequence from LASV(LP;Clade I)__AAF86701__GPCmut7 (opt1)
aggagagucccgcagucggcguccagcggcucugcuuguucgugugugugucguugcaggccuuauucaagcuuaccaugggccagaucaucaccuucuuccaggaggugccccacgucaucgaggaggugaugaacaucgugcugaucgcccucagccugcuggccauccucaaggggcuguacaacaucgcgaccugcggcaucaucgggcuggucgccuuccucuuccugugcggcaaguccugcagccugacgcucaagggcggguacgagcugcagacccuggagcucaacauggagacccugaacaugaccaugccgcuguccugcacgaagaacagcucccaccacuacauccgcgugggcaacgagaccgggcucgagcugacccugaccaacacgagcaucaucaaccacaaguucugcaaccucuccgacgcccacaagaagaaccuguacgaccacgcccugaugagcaucaucuccaccuuccaccucagcauccccaacuucaaccaguacgaggccauguccugcgacuucaacggcgggaagaucagcgugcaguacaaccugucccacagcuacgcgggcgacgccgccgagcacugcgggaccgucgccaacggcgugcugcagaccuucaugcggauggcguggggcgggcgcuacaucgcccucgacuccggcaaggggaacugggacugcaucaugacgagcuaccaguaccugaucauccagaacaccaccugggaggaccacugccaguucucccggcccagccccaucggcuaccugggccuccugucccagcgcacccgggacaucuacaucagccgccggcugcucgggacguucaccuggacccugagcgacuccgagggcaacgagacccccgggggcuacugccugacgcgcuggaugcucaucgaggccgagcugaagugcuucgggaacaccgccguggccaagugcaacgagaagcacgacgaggaguucugcgacaugcugcggcuguucgacuucaacaagcaggcgauccgccggcugaaggccccggcccagaugagcauccagcugaucaacaaggccgucaacgcccucaucaacgaccagcugaucaugaagaaccaccuccgcgacaucaugggcauccccuacugcaacuacuccaaguacugcuaccucaaccacaccagcuccggccggaccagccugcccaagugcugccugaucuccaacgggagcuaccucaacgagacgcaguucuccgacgacaucgagcagcaggcggacaacaugaucaccgagaugcugcagaaggaguacaucgagcgccagggcaagaccccgcuggggcugguggacaucuucaucuucagcaccuccuucuaccucaucagcaucuuccugcaccugaucaagauccccacgcaccggcacaucgugggcaagcccugccccaagccgcaccgccucaaccacaugggggucugcuccugcggccuguacaagcaccccggcgugcccaccaaguggaagcggugaggacuaguaauaaggaaacuguaugaaugucugugggcaggaagugaagagauccuucuguaaagguuuuuggaauuaugucugcugaauaauaaacuuuuuugaaauaauaaaucugguagaaaaaugagaucucaaaggcucuuuucagagccaccaaaaaaaaaaaaaaaaaaaaaaaaaaaaaaaaaaaaaaaaaaaaaaaaaaaaaaaaaaaaaaaaaaaaaaaaaaaaaaaaaaaaaaaaaaaaaaaaaaaaa

SEQ ID NO: 32519 - RNA, 1809 nt, Artificial Sequence
  mRNA product Design b-4 (hSL-A100) comprising derived and/or modified sequence from LASV(803213;Clade II)__AAF86703__GPCmut7 (opt1)
aggagagucccgcagucggcguccagcggcucugcuuguucgugugugugucguugcaggccuuauucaagcuuaccaugggccagaucaucaccuucuuccaggaggugccccacgucaucgaggaggugaugaacaucgugcugaucgcccucagccugcuggccauccucaaggggaucuacaacgucgcgaccugcggccuguucgggcugaucuccuuccuccugcugugcggccgcagcugcuccgugacguacaaggggguguacgagcuccagacccuggagcugaacauggccaaccucaacaugaccaugccgcugagcugcaccaagaacaacucccaccacuacaucauggucggcaacgagacgggccuggagcucacccugaccaacaccagcaucaucaaccacaaguucugcaaccuguccgacgcccacaagaagaaccucuacgaccacgcccugaugagcaucaucuccacguuccaccugagcauccccaacuucaaccaguacgaggccauguccugcgacuucaacgggggcaagaucagcgugcaguacaaccucucccacagcuucgcgguggacgccgccaaccacugcgggaccaucgccaacggcguccugcagaccuucaugcggauggcguggggcggguccuacaucgcccuggacagcggcaaggggaacugggacugcaucaugaccuccuaccaguaccucaucauccagaacacgaccugggaggaccacugccaguucagccgccccucccccaucggcuaccuggggcugcucagccagcggacccgcgacaucuacaucagccggcgccugcugggcaccuucacguggacccucuccgacagcgagggcaacgaggcccccgggggcuacugccugacccgguggaugcugaucgaggccgagcucaagugcuucgggaacaccgccguggcgaagugcaacgagaagcacgacgaggaguucugcgacaugcugcgccuguucgacuucaacaagcaggccaucaagcggcucaagacgccggcccagauguccauccagcugaucaacaaggccgugaacgcccugaucaacgaccagcucaucaugaagaaccaccuccgcgacaucaugggcauccccuacugcaacuacagccgguacugcuaccugaaccacaccgucaccgggaagaccucccugccccgcugcugccuggugagcaacggcuccuaccugaacgagacgcacuucagcgacgacaucgagcagcaggcggacaacaugaucaccgagaugcuccagaaggaguacauggaccggcagggcaagaccccgcuggggcugguggaccuguucgucuucuccaccagcuucuaccucaucuccaucuuccugcaccuggugaagauccccacgcaccgccacaucgugggcaagcccugccccaagccgcaccggcucaaccacauggggaucugcagcugcggccuguacaagcaccccgggguccccgugaaguggaagcgcugaggacuaguaauaaggaaacuguaugaaugucugugggcaggaagugaagagauccuucuguaaagguuuuuggaauuaugucugcugaauaauaaacuuuuuugaaauaauaaaucugguagaaaaaugagaucucaaaggcucuuuucagagccaccaaaaaaaaaaaaaaaaaaaaaaaaaaaaaaaaaaaaaaaaaaaaaaaaaaaaaaaaaaaaaaaaaaaaaaaaaaaaaaaaaaaaaaaaaaaaaaaaaaaaa

SEQ ID NO: 32520 - RNA, 1809 nt, Artificial Sequence
  mRNA product Design b-4 (hSL-A100) comprising derived and/or modified sequence from LASV(GA391;Clade III)__CAA36645__GPCmut7 (opt1)
aggagagucccgcagucggcguccagcggcucugcuuguucgugugugugucguugcaggccuuauucaagcuuaccaugggccagaucgugaccuucuuccaggaggucccccacgugaucgaggaggugaugaacaucguccugaucgcccucagcauccuggccauccugaaggggcucuacaacguggcgaccugcggccugaucgggcuggugacguuccuccugcuguccggccgcagcugcucccucaucuacaaggggaccuacgagcugcagacccuggagcucaacauggagacccugaacaugacgaugccgcugagcugcaccaagaacaacucccaccacuacauccgggucggcaacgagaccggccucgagcugacccugacgaacaccagcauccucaaccacaaguucugcaaccuguccgacgcccacaagcgcaaccuguacgaccacagccucauguccaucaucagcaccuuccaccuguccauccccaacuucaaccaguacgaggccaugagcugcgacuucaacgggggcaagaucaccgugcaguacaaccugucccacagcuucgccguggacgccgcggggcacugcggcacgcucgccaacgggguccugcagaccuucaugcggauggccuggggcggcuccuacaucgcccuggacagcgggcgcggcaacugggacugcaucaugaccuccuaccaguaccucaucauccagaacaccacgugggacgaccacugccaguucagccggcccucccccaucggguaccugggccugcucagccagcgcacccgggacaucuacaucagccgccggcugcugggcaccuucaccuggacgcucuccgacagcgaggggaacgagaccccgggcggguacugccugacccgcuggaugcugaucgaggcggagcucaagugcuucggcaacaccgccguggccaagugcaacgagaagcacgacgaggaguucugcgacaugcugcggcuguucgacuucaacaagcaggccauccgccggcucaagacgcccgcccagauguccauccagcugaucaacaaggcggugaacgcccugaucaacgaccagcucaucaugaagaaccaccuccgcgacaucauggggauccccuacugcaacuacagccgguacugcuaccugaaccacaccuccaccggcaagaccagccugccccgcugcugccugaucuccaacggcagcuaccugaacgagacgaaguucuccgacgacaucgagcagcaggccgacaacaugaucaccgagaugcugcagaaggaguacaucgaccggcaggggaagaccccgcucggccuggucgaccuguucguguucagcaccuccuucuaccucaucagcaucuuccugcaccuggugaagauccccacgcaccgccacaucgucgggaagcccugccccaagccgcaccggcucaaccacaugggcaucugcuccugcgggcuguacaagcagcccggcgugcccgugcgcuggaagcggugaggacuaguaauaaggaaacuguaugaaugucugugggcaggaagugaagagauccuucuguaaagguuuuuggaauuaugucugcugaauaauaaacuuuuuugaaauaauaaaucugguagaaaaaugagaucucaaaggcucuuuucagagccaccaaaaaaaaaaaaaaaaaaaaaaaaaaaaaaaaaaaaaaaaaaaaaaaaaaaaaaaaaaaaaaaaaaaaaaaaaaaaaaaaaaaaaaaaaaaaaaaaaaaaa

SEQ ID NO: 32521 - RNA, 1812 nt, Artificial Sequence
  mRNA product Design b-4 (hSL-A100) comprising derived and/or modified sequence from LASV(AV;Clade V)__CCA30314__GPCmut7 (opt1)
aggagagucccgcagucggcguccagcggcucugcuuguucgugugugugucguugcaggccuuauucaagcuuaccaugggccagaucgugaccuucuuccaggaggucccccacgugaucgaggaggugaugaacaucguccugaucgcccucagcauccuggccgugcugaaggggcucuacaacaucgcgaccugcggccugaucgggcugaucacguuccuccugcugugcggccgcuccugcagcuccaaccucuacaaggggguguacgagcugcagagccuggaccucaacauggagacccugaacaugaccaugccgcuguccugcaccaagaacaacagccaccacuacauccgggucggcaacgacacgggccucgagcugacccugaccaacaccuccauccucaaccacaaguucugcaaccugagcgacgcccacaagaaggaccuguacgaccacgcccucauguccaucaucagcacguuccaccuguccauccccaacuucaaccaguacgaggccaugagcugcgacuucaacgggggcaagaucuccgugcaguacaaccugagccacuccuacgccaucgacgcggccaaccacugcgggaccguggccaacggcauccuccagaccuucaugcgcauggccuggggcgggagcuacaucgcgcuggacuccggccgggggaacugggacugcaucaugaccagcuaccaguaccugaucauccagaacacgaccugggagaaccacugccaguucucccgccccagccccaucggcuaccucgggcugcugagccagcggacccgcgacaucuacaucucccggcgccuccugggcaccuucacguggacccugagcgacuccgagggcaacgccacccccgggggcuacugccucacccgguggaugcugaucgaggccgagcugaagugcuucgggaacacggccgucgccaagugcaacgagaagcacgacgaggaguucugcgacaugcuccgccuguucgacuucaacaagcaggcgaucagccggcugaaguccccggcccagaugagcauccagcucaucaacaaggccgugaacgcccugaucaacgaccagcugaucaugaagaaccaccuccgcgacaucaugggcauccccuacugcaacuacuccaaguacugcuaccugaaccacaccaucaccgggaagaccagccugcccaagugcugccucguguccaacggcagcuaccugaacgagacgcacuucuccgacgacaucgagcagcaggccgacaacaugaucaccgagaugcugcagaaggaguacauggagcggcagggcaagaccccgcuggggcucgucgaccuguucguguucagcaccuccuucuaccugaucagcaucuuccuccgccuggugaagauccccacgcaccggcacaucgucggcaagcccugccccaagccgcaccgccugaaccacauggggaucugcuccugcggccucuacaagcagcccggggugcccgugcgguggaagcgcugaggacuaguaauaaggaaacuguaugaaugucugugggcaggaagugaagagauccuucuguaaagguuuuuggaauuaugucugcugaauaauaaacuuuuuugaaauaauaaaucugguagaaaaaugagaucucaaaggcucuuuucagagccaccaaaaaaaaaaaaaaaaaaaaaaaaaaaaaaaaaaaaaaaaaaaaaaaaaaaaaaaaaaaaaaaaaaaaaaaaaaaaaaaaaaaaaaaaaaaaaaaaaaaaa

SEQ ID NO: 32522 - RNA, 1809 nt, Artificial Sequence
  mRNA product Design b-4 (hSL-A100) comprising derived and/or modified sequence from LASV(Togo/2016/7082;Clade VI)__AMR44577__GPCmut7 (opt1)
aggagagucccgcagucggcguccagcggcucugcuuguucgugugugugucguugcaggccuuauucaagcuuaccaugggccagaucaucaccuucuuccaggaggugccccacgucaucgaggaggugaugaacaucgugcugaucgcccucagccugcuggccauccucaagggggucuacaacguggcgaccugcggcaucaucgggcuggugacguuccuguuccucugcggccgcuccugcagccugaucuacaagggguccuacgagcugcagacccucgagcugaacauggagacccugaacaugaccaugccgcucagcugcacgaagaacuccagccaccacuacauccgggucggcaacgagaccggccuggagcugacccucaccaacacguccaucaucaaccacaaguucugcaaccugagcgacgcccacaagcgcaaccuguacgaccacgcccucauguccauccugagcaccuuccaccuguccauccccaacuucaaccaguacgaggccaugagcugcgacuucaacgggggcaagaucuccgugcaguacaaccucagccacgccuacgcgguggacgccgccgagcacugcgggaccgucgccaacggcgugcugcagaccuucaugcggauggcguggggcggguccuacaucgcccuggacagcggccgcgggaacugggacugcaucaugacguccuaccaguaccucaucauccagaacaccaccugggaggaccacugccaguucagccggcccucccccaucggcuaccuggggcugcucagccagcgcacccgggacaucuacaucagccgccggcugcugggcacguucaccuggacccucuccgacagcgagggcaacgagacccccgggggcuacugccugacgcgcuggaugcugaucgaggccgagcucaagugcuucgggaacaccgccguggccaagugcaacgagaagcacgacgaggaguucugcgacaugcugcggcuguucgacuucaacaagcaggcgauccagcgccucaaguccccggcccagaugagcauccagcugaucaacaaggccgucaacgcccugaucaacgaccagcucaucaugaagaaccaccuccgggacaugaugggcauccccuacugcaacuacuccaaguacugcuaccugaaccacaccagcuccgggcgcaccagccugcccaagugcugccugguguccaacggcagcuaccugaacgagacgcacuucuccgacgacaucgagcagcaggccgacaacaugaucaccgagaugcuccagaaggaguacaucgaccggcagggcaagaccccgcuggggcugguggaccuguucgucuucagcaccuccuucuaccucaucagcaucuuccugcaccugaucaagauccccacgcaccgccacaucgugggcaagcccugccccaagccgcaccggcucaaccacauggggaucugcuccugcggccuguacaagcagcccggggugcccacccgcuggaagcggugaggacuaguaauaaggaaacuguaugaaugucugugggcaggaagugaagagauccuucuguaaagguuuuuggaauuaugucugcugaauaauaaacuuuuuugaaauaauaaaucugguagaaaaaugagaucucaaaggcucuuuucagagccaccaaaaaaaaaaaaaaaaaaaaaaaaaaaaaaaaaaaaaaaaaaaaaaaaaaaaaaaaaaaaaaaaaaaaaaaaaaaaaaaaaaaaaaaaaaaaaaaaaaaaa

SEQ ID NO: 32523 - RNA, 1809 nt, Artificial Sequence
  mRNA product Design b-4 (hSL-A100) comprising derived and/or modified sequence from LASV(KAK-428;Clade n.d. (VII))__ANH09740__GPCmut7 (opt1)
aggagagucccgcagucggcguccagcggcucugcuuguucgugugugugucguugcaggccuuauucaagcuuaccaugggccagaucgugaccuucuuccaggaggucccccacgugaucgaggaggugaugaacaucguccugaucgcccucagccugcuggccauccucaaggggcuguacaacuucgcgaccugcggcgugaucgggcugaucacguuccuccugcugugcggccgcuccugcagcgccaccuacaaggggcaguacgagcuccagacccuggagcugaacauggagucccucaacaugaccaugccgcugagcugcacgaagaacaacucccaccacuacauccgggccggcaacaacaccggccuggagcucacccugaccaacacgagcaucaucucccacaaguucugcaaccugagcgacgcccacaagaagaaccucuacgaccacacccugauguccaucaucaccaccuuccaccugagcauccccaacuucaaccaguacgaggccauguccugcgacuucaacgggggcaagaucagcauccaguacaaccucucccacagcuacgcgggggacgccgcccagcacugcggcacgguggccaacgggguccugcagaccuucaugcgcauggcguggggcggcuccuaccuggcccucgacagcgggcggcgcggcugggacugcaucaucuccagcuaccaguaccugaucauccagaacaccaccugggacgaccacugccaguucucccggcccagccccaucggguaccugggcuucgugagccagaagacgcgcgacaucuacaucucccggcgccuccugggcaccuucaccuggacccugagcgacuccgaggggcacgacaugccgggcggguacugccucacgcgguggaugcugaucgaggccgaccugaagugcuucggcaacaccgccguggccaagugcaacgagaagcacgacgaggaguucugcgacauguggcgccucuucgacuucaacaagcaggcgauccagcggcugaaggcccccgcccagaugaacauccagcugaucaacaaggccgucaacgcccucaucaacgaccagcugaugaugaagaaccaccuccgcgacaucauggggauccccuacugcaacuacagcaaguucugcuaccugaacaacaccaccacgggccggaccucccugccccgcugcugccugaucagcaacggcuccuaccucaacgagacccacuucagcgacgacaucgagcagcaggcggacaacaugaucaccgagaugcugcagaaggaguacauggaccggcaggggaagacgccgcugggccucguggaccuguucguguucuccaccagcuucuaccugaucaccaucuuccugcaccucgucaagauccccacccaccgccacaucguggggaagcccugccccaagccgcaccggcugaaccacaugggcaucugcuccugcgggcuguacaagcagcccggcgugcccguccgcuggaagcggugaggacuaguaauaaggaaacuguaugaaugucugugggcaggaagugaagagauccuucuguaaagguuuuuggaauuaugucugcugaauaauaaacuuuuuugaaauaauaaaucugguagaaaaaugagaucucaaaggcucuuuucagagccaccaaaaaaaaaaaaaaaaaaaaaaaaaaaaaaaaaaaaaaaaaaaaaaaaaaaaaaaaaaaaaaaaaaaaaaaaaaaaaaaaaaaaaaaaaaaaaaaaaaaaa

SEQ ID NO: 32524 - RNA, 1809 nt, Artificial Sequence; identical to SEQ ID NO: 32518
  mRNA product Design b-4 (hSL-A100) comprising derived and/or modified sequence from LASV(Pinneo-NIG-1969;Clade I)__AIT17836__GPCmut7 (opt1)

SEQ ID NO: 32525 - RNA, 1809 nt, Artificial Sequence
  mRNA product Design b-4 (hSL-A100) comprising derived and/or modified sequence from LASV(ISTH0009-NIG-2011;Clade II)__AIT17404__GPCmut7 (opt1)
aggagagucccgcagucggcguccagcggcucugcuuguucgugugugugucguugcaggccuuauucaagcuuaccaugggccagaucaucaccuucuuccaggaggugccccacgucaucgaggaggugaugaacaucgugcugaucgcccucagccugcuggccauccucaaggggaucuacaacgucgcgaccugcggccuguucgggcugguguccuuccuccugcugugcggccgcagcugcuccacgaccuacaaggggguguacgagcuccagacccuggagcuggacauggccagccucaacaugaccaugccgcuguccugcacgaagaacaacagccaccacuacaucauggucggcaacgagaccggccuggagcucacccugaccaacacguccaucaucaaccacaaguucugcaaccugagcgacgcccacaagaagaaccucuacgaccacgcccugauguccaucaucagcaccuuccaccuguccauccccaacuucaaccaguacgaggccaugagcugcgacuucaacgggggcaagaucuccgugcaguacaaccucagccacgcguacgccguggacgccgccaaccacugcgggaccaucgcgaacggcguccugcagaccuucaugcggauggccuggggcggguccuacaucgcccuggacagcggcaagggguccugggacugcaucaugacgagcuaccaguaccucaucauccagaacaccaccugggaggaccacugccaguucucccgccccagccccaucggcuaccuggggcugcucagccagcggacccgcgacaucuacaucucccggcgccugcugggcacguucaccuggacccucagcgacuccgagggcaacgagacccccgggggcuacugccugacgcgguggaugcugaucgaggccgagcucaagugcuucgggaacaccgccguggcgaagugcaacgagaagcacgacgaggaguucugcgacaugcugcgccuguucgacuucaacaagcaggccauccggcgccucaagaccccggcccagaugagcauccagcugaucaacaaggccgugaacgcccugaucaacgaccagcucaucaugaagaaccaccuccgggacaucaugggcauccccuacugcaacuacuccaaguacugcuaccugaaccacaccgucacggggaagaccagccugccccgcugcugccugguguccaacggcagcuaccugaacgagacccacuucuccgacgacaucgagcagcaggcggacaacaugaucaccgagcuccugcagaaggaguacauggaccggcagggcaagacgccgcuggggcugguggaccucuucgucuucagcaccuccuucuaccugaucagcaucuuccugcaccucaucaagauccccacccaccgccacaucaccggcaagcccugccccaagccgcaccggcugaaccacauggggaucugcuccugcggccuguacaagcaccccggggugcccgugaaguggaagcgcugaggacuaguaauaaggaaacuguaugaaugucugugggcaggaagugaagagauccuucuguaaagguuuuuggaauuaugucugcugaauaauaaacuuuuuugaaauaauaaaucugguagaaaaaugagaucucaaaggcucuuuucagagccaccaaaaaaaaaaaaaaaaaaaaaaaaaaaaaaaaaaaaaaaaaaaaaaaaaaaaaaaaaaaaaaaaaaaaaaaaaaaaaaaaaaaaaaaaaaaaaaaaaaaaa

SEQ ID NO: 32526 - RNA, 1809 nt, Artificial Sequence
  mRNA product Design b-4 (hSL-A100) comprising derived and/or modified sequence from LASV(ISTH2010-NIG-2012;Clade II)__AIT17482__GPCmut7 (opt1)
aggagagucccgcagucggcguccagcggcucugcuuguucgugugugugucguugcaggccuuauucaagcuuaccaugggccagaucaucaccuucuuccaggaggugccccacgucaucgaggaggugaugaacaucgugcugaucgcccucagccugcuggccauccucaaggggaucuacaacgucgcgaccugcggccuguucgggcugguguccuuccuccugcugugcggccgcagcugcuccacgaccuacaaggggguguacgagcuccagacccuggagcuggacauggccagccucaacaugaccaugccgcuguccugcacgaagaacaacagccaccacuacaucauggucggcaacgagaccggccuggagcucacccugaccaacacguccaucaucaaccacaaguucugcaaccugagcgacgcccacaagaagaaccucuacgaccacgcccugauguccaucaucagcaccuuccaccuguccauccccaacuucaaccaguacgaggccaugagcugcgacuucaacgggggcaagaucuccgugcaguacaaccucagccacgcguacgccguggacgccgccaaccacugcgggaccaucgcgaacggcguccugcagaccuucaugcggauggccuggggcggguccuacaucgcccuggacagcggcaagggguccugggacugcaucaugacgagcuaccaguaccucaucauccagaacaucaccugggaggaccacugccaguucucccgccccagccccaucggcuaccuggggcugcucagccagcggacccgcgacaucuacaucucccggcgccugcugggcaccuucacguggacccucagcgacuccgagggcaacgagacccccgggggcuacugccugacccgguggaugcugaucgaggccgagcucaagugcuucgggaacacggccguggcgaagugcaacgagaagcacgacgaggaguucugcgacaugcugcgccuguucgacuucaacaagcaggccauccggcgccucaagaccccggcccagaugagcauccagcugaucaacaaggccgugaacgcccugaucaacgaccagcucaucaugaagaaccaccuccgggacaucaugggcauccccuacugcaacuacuccaaguacugcuaccugaaccacaccgucaccgggaagacgagccugccccgcugcugccugguguccaacggcagcuaccugaacgagacccacuucuccgacgacaucgagcagcaggcggacaacaugaucaccgagcuccugcagaaggaguacaucgaccggcagggcaagaccccgcuggggcugguggaccucuucgucuucagcacguccuucuaccugaucagcaucuuccugcaccucgugaagauccccacccaccgccacguggucggcaagcccugccccaagccgcaccggcugaaccacauggggaucugcuccugcggccuguacaagcaccccggggugcccgugaaguggaagcgcugaggacuaguaauaaggaaacuguaugaaugucugugggcaggaagugaagagauccuucuguaaagguuuuuggaauuaugucugcugaauaauaaacuuuuuugaaauaauaaaucugguagaaaaaugagaucucaaaggcucuuuucagagccaccaaaaaaaaaaaaaaaaaaaaaaaaaaaaaaaaaaaaaaaaaaaaaaaaaaaaaaaaaaaaaaaaaaaaaaaaaaaaaaaaaaaaaaaaaaaaaaaaaaaaa

SEQ ID NO: 32527 - RNA, 1809 nt, Artificial Sequence
  mRNA product Design b-4 (hSL-A100) comprising derived and/or modified sequence from LASV(Lassa virus/H.sapiens-wt/NGA/2015/ISTH_0543;Clade II)__AVO03639__GPCmut7 (opt1)
aggagagucccgcagucggcguccagcggcucugcuuguucgugugugugucguugcaggccuuauucaagcuuaccaugggccagaucaucaccuucuuccaggaggugccccacgucaucgaggaggugaugaacaucgugcugaucgcccucagccugcuggccauccucaaggggaucuacaacgucgcgaccugcggccuguucgggcugguguccuuccuccugcugugcggccgcagcugcuccacgaccuacaaggggguguacgagcuccagacccuggagcuggacauggccaaccucaacaugaccaugccgcugagcugcacgaagaacaacucccaccacuacaucauggucggcaacgagaccggccuggagcucacccugaccaacacgagcaucaucaaccacaaguucugcaaccuguccgacgcccacaagaagaaccucuacgaccacgcccugaugagcaucaucuccaccuuccaccugagcauccccaacuucaaccaguacgaggccauguccugcgacuucaacgggggcaagaucagcgugcaguacaaccucucccacaccuacgcgguggacgccgccaaccacugcgggaccaucgccaacggcguccugcagacguucaugcggauggcguggggcgggagcuacaucgcccuggacuccggcaaggggagcugggacugcaucaugaccuccuaccaguaccucgugauccagaacaccaccugggaggaccacugccaguucagccgccccucccccaucggcuaccuggggcugcucagccagcggacgcgcgacaucuacaucagccggcgccugcugggcaccuucaccuggacccucuccgacagcgagggcaacgagacgcccgggggcuacugccugacccgguggaugcugaucgaggccgagcucaagugcuucgggaacaccgccguggccaagugcaacgagaagcacgacgaggaguucugcgacaugcugcgccuguucgacuucaacaagcaggcgauccggcgccucaagaccccggcccagauguccauccagcugaucaacaaggccgucaacgcccugaucaacgaccagcucaucaugaagaaccaccuccgggacaucaugggcauccccuacugcaacuacagcaaguacugcuaccugaaccacacggugaccgggaagaccucccugccccgcugcugccuggugagcaacggcuccuaccugaacgagacccacuucagcgacgacaucgagcagcaggccgacaacaugaucacggagcuccugcagaaggaguacaucgaccggcagggcaagaccccgcuggggcuggucgaccucuucguguucuccaccagcuucuaccugaucuccaucuuccugcaccucgugaagauccccacccaccgccacaucacgggcaagcccugccccaagccgcaccggcugaaccacauggggaucugcagcugcggccuguacaagcaccccgggguccccgugaaguggaagcgcugaggacuaguaauaaggaaacuguaugaaugucugugggcaggaagugaagagauccuucuguaaagguuuuuggaauuaugucugcugaauaauaaacuuuuuugaaauaauaaaucugguagaaaaaugagaucucaaaggcucuuuucagagccaccaaaaaaaaaaaaaaaaaaaaaaaaaaaaaaaaaaaaaaaaaaaaaaaaaaaaaaaaaaaaaaaaaaaaaaaaaaaaaaaaaaaaaaaaaaaaaaaaaaaaa

SEQ ID NO: 32528 - RNA, 1809 nt, Artificial Sequence
  mRNA product Design b-4 (hSL-A100) comprising derived and/or modified sequence from LASV(Lassa virus/H.sapiens-wt/NGA/2016/ISTH_0009;Clade II)__AVO03571__GPCmut7 (opt1)
aggagagucccgcagucggcguccagcggcucugcuuguucgugugugugucguugcaggccuuauucaagcuuaccaugggccagaucaucaccuucuuccaggaggugccccacgucaucgaggaggugaugaacaucgugcugaucgcccucagccugcuggccauccucaaggggaucuacaacgucgcgaccugcggccugcuggggcucguguccuuccugcugcucugcggccgcagcugcuccacgaccuacaaggggguguacgagcugcagacccuggagcucgacauggccagccugaacaugaccaugccgcuguccugcacgaagaacaacagccaccacuacaucauggucggcaacgagaccggccucgagcugacccugaccaacacguccaucaucaaccacaaguucugcaaccucagcgacgcccacaagaagaaccuguacgaccacgcccugauguccaucaucagcaccuuccaccucuccauccccaacuucaaccaguacgaggccaugagcugcgacuucaacgggggccggaucuccgugcaguacaaccugagccacuccuacgcgguggacgccgccaaccacugcgggaccaucgccaacggcguccugcagaccuucaugcgcauggcguggggcgggagcuacaucgcccucgacuccggcaaggggagcugggacugcaucaugacguccuaccaguaccugaucauccagaacaccaccugggaggaccacugccaguucagccggcccagccccaucggcuaccuggggcuccugucccagcgcacccgggacaucuacaucagccgccggcugcucggcacguucaccuggacccuguccgacagcgagggcaacgagacccccgggggcuacugccugacgcgcuggaugcucaucgaggccgagcugaagugcuucgggaacaccgccguggccaagugcaacgagaagcacgacgaggaguucugcgacaugcugcggcuguucgacuucaacaagcaggcgauccgccggcugaagaccccggcccagauguccauccagcugaucaacaaggccgugaacgcccucaucaacgaccagcugaucaugaagaaccaccuccgcgacaucaugggcauccccuacugcaacuacagcaaguacugcuaccucaaccacaccgucacggggaagaccucccugccccggugcugccuggugagcaacggcuccuaccucaacgagacccacuucagcgacgacaucgagcagcaggccgacaacaugaucaccgagcugcugcagaaggaguacaucgaccgccagggcaagacgccgcuggggcucguggaccuguucgucuucuccaccagcuucuaccugaucuccaucuuccuccaccuggugaagauccccacccaccggcacaucaccggcaagcccugccccaagccgcaccgccugaaccacauggggaucugcagcugcggccucuacaaccaccccggggugcccgucaaguggaagcggugaggacuaguaauaaggaaacuguaugaaugucugugggcaggaagugaagagauccuucuguaaagguuuuuggaauuaugucugcugaauaauaaacuuuuuugaaauaauaaaucugguagaaaaaugagaucucaaaggcucuuuucagagccaccaaaaaaaaaaaaaaaaaaaaaaaaaaaaaaaaaaaaaaaaaaaaaaaaaaaaaaaaaaaaaaaaaaaaaaaaaaaaaaaaaaaaaaaaaaaaaaaaaaaaa

SEQ ID NO: 32529 - RNA, 1809 nt, Artificial Sequence
  mRNA product Design b-4 (hSL-A100) comprising derived and/or modified sequence from LASV(Lassa virus/H.sapiens-wt/NGA/2016/ISTH_0017;Clade II)__AVO03567__GPCmut7 (opt1)
aggagagucccgcagucggcguccagcggcucugcuuguucgugugugugucguugcaggccuuauucaagcuuaccaugggccagaucaucaccuucuuccaggaggugccccacgucaucgaggaggugaugaacaucgugcugaucgcccucagccugcuggccauccucaaggggaucuacaacgucgcgaccugcggccuguucgggcugguguccuuccuccugcugugcggccgcagcugcuccacgaccuacaaggggguguacgagcuccagacccuggagcuggacauggccagccucaacaugaccaugccgcuguccugcacgaagaacaacagccaccacuacaucauggucggcaacgagaccggccuggagcucacccugaccaacacguccaucaucaaccacaaguucugcaaccugagcgacgcccacaagaagaaccucuacgaccacgcccugauguccaucaucagcaccuuccaccuguccauccccaacuucaaccaguacgaggccaugagcugcgacuucaacgggggcaagaucuccgugcaguacaaccucagccacaccuacgcgaucgacgccgccaaccacugcgggaccaucgccaacggcgugcugcagacguucaugcggauggcguggggcggguccuacaucgcccuggacagcggcaagggguccugggacugcaucaugaccagcuaccaguaccucaucauccagaacaccaccugggaggaccacugccaguucucccgccccagccccaucggcuaccuggggcugcucagccagcggacgcgcgacaucuacaucucccggcgccugcugggcaccuucaccuggacccucagcgacuccgagggcaacgagacgcccgggggcuacugccugacccgguggaugcugaucgaggccgagcucaagugcuucgggaacaccgccgucgccaagugcaacgagaagcacgacgaggaguucugcgacaugcugcgccuguucgacuucaacaagcaggcgauccggcgccucaagaccccggcccagaugagcauccagcugaucaacaaggccgugaacgcccugaucaacgaccagcucaucaugaagaaccaccuccgggacaucaugggcauccccuacugcaacuacuccaaguacugcuaccugaaccacacggugaccgggaagaccagccugccccgcugcugccuggucuccaacggcagcuaccugaacgagacccacuucuccgacgacaucgagcagcaggccgacaacaugaucacggagcuccugcagaaggaguacauggaccggcagggcaagaccccgcuggggcugguggaccucuucguguucagcaccuccuucuaccugaucagcaucuuccugcaccucguccgcauccccacccaccggcacgugaucggcaagcccugccccaagccgcaccgccugaaccacauggggaucugcuccugcggccuguacaagcaccccggggugcccgucaaguggaagcggugaggacuaguaauaaggaaacuguaugaaugucugugggcaggaagugaagagauccuucuguaaagguuuuuggaauuaugucugcugaauaauaaacuuuuuugaaauaauaaaucugguagaaaaaugagaucucaaaggcucuuuucagagccaccaaaaaaaaaaaaaaaaaaaaaaaaaaaaaaaaaaaaaaaaaaaaaaaaaaaaaaaaaaaaaaaaaaaaaaaaaaaaaaaaaaaaaaaaaaaaaaaaaaaaa

SEQ ID NO: 32530 - RNA, 1809 nt, Artificial Sequence
  mRNA product Design b-4 (hSL-A100) comprising derived and/or modified sequence from LASV(Lassa virus/H.sapiens-wt/NGA/2018/ISTH_0959;Clade II)__AVV65099__GPCmut7 (opt1)
aggagagucccgcagucggcguccagcggcucugcuuguucgugugugugucguugcaggccuuauucaagcuuaccaugggccagaucaucaccuucuuccaggaggugccccacgucaucgaggaggugaugaacaucgugcugaucgcccucagccugcuggccauccucaaggggaucuacaacgucgugaccugcggccuguucgggcugguguccuuccuccugcugugcggccgcagcugcuccacgaccuacaagggggucuacgagcuccagacccuggagcuggacauggcgagccucaacaugaccaugccgcuguccugcacgaagaacaacagccaccacuacaucauggugggcaacgagaccggccuggagcucacccugaccaacacguccaucaucaaccacaaguucugcaaccugagcgacgcccacaagaagaaccucuacgaccacgcccugauguccaucaucagcaccuuccaccuguccauccccaacuucaaccaguacgaggccaugagcugcgacuucaacgggggcaagaucuccgugcaguacaaccucagccacgccuacgcgaucgacgccgccaaccacugcgggaccaucgccaacggcguccugcagaccuucaugcggauggcguggggcggguccuacaucgcccuggacagcggcaagggguccugggacugcaucaugacgagcuaccaguaccucaucauccagaacaccaccugggaggaccacugccaguucucccgccccagccccaucggcuaccuggggcugcucagccagcggacccgcgacaucuacaucucccggcgccugcugggcacguucaccuggacccucagcgacuccgagggcaacgagacccccgggggcuacugccugacgcgguggaugcugaucgaggccgagcucaagugcuucgggaacaccgccguggccaagugcaacgagaagcacgacgaggaguucugcgacaugcugcgccuguucgacuucaacaagcaggcgauccggcgccucaagaccccggcccagaugagcauccagcugaucaacaaggccgugaacgcccugaucaacgaccagcucaucaugaagaaccaccuccgggacaucaugggcauccccuacugcaacuacuccaaguacugcuaccugaaccacaccgucacggggaagaccagccugccccgcugcugccugguguccaacggcagcuaccugaacgagacccacuucuccgacgacaucgagcagcaggccgacaacaugaucaccgagcuccugcagaaggaguacaucgaccggcagggcaagacgccgcuggggcugguggaccucuucgucuucagcaccuccuucuaccugaucagcaucuuccugcaccucgugaagauccccacccaccgccacgugaucggcaagcccugccccaagccgcaccggcugaaccacauggggaucugcuccugcggccuguacaagcaccccgggguccccgugaaguggaagcgcugaggacuaguaauaaggaaacuguaugaaugucugugggcaggaagugaagagauccuucuguaaagguuuuuggaauuaugucugcugaauaauaaacuuuuuugaaauaauaaaucugguagaaaaaugagaucucaaaggcucuuuucagagccaccaaaaaaaaaaaaaaaaaaaaaaaaaaaaaaaaaaaaaaaaaaaaaaaaaaaaaaaaaaaaaaaaaaaaaaaaaaaaaaaaaaaaaaaaaaaaaaaaaaaaa

SEQ ID NO: 32531 - RNA, 1809 nt, Artificial Sequence
  mRNA product Design b-4 (hSL-A100) comprising derived and/or modified sequence from LASV(LASV003-NIG-2008;Clade II)__AIT17580__GPCmut7 (opt1)
aggagagucccgcagucggcguccagcggcucugcuuguucgugugugugucguugcaggccuuauucaagcuuaccaugggccagaucaucaccuucuuccaggaggugccccacgucaucgaggaggugaugaacaucgugcugaucgcccucagccugcuggccauccucaaggggaucuacaacgucgcgaccugcggccuguucgggcugguguccuuccuccugcugugcggccgcagcugcuccacgaccuacaaggggguguacgagcuccagacccuggagcuggacauggccagccucaacaugaccaugccgcuguccugcacgaagaacaacagccaccacuacaucauggucggcaacgagaccggccuggagcucacccugaccaacacguccaucaucaaccacaaguucugcaaccugagcgacgcccacaagaagaaccucuacgaccacgcccugauguccaucaucagcaccuuccaccuguccauccccaacuucaaccaguacgaggccaugagcugcgacuucaacgggggcaagaucuccgugcaguacaaccucagccacaccuacgcgguggacgccgccaaccacugcgggaccaucgccaacggcguccugcagacguucaugcggauggcguggggcggguccuacaucgcccuggacagcggcaagggguccugggacugcaucaugaccagcuaccaguaccucaucauccagaacaccaccugggaggaccacugccaguucucccgccccagccccaucggcuaccuggggcugcucagccagcggacgcgcgacaucuacaucucccggcgccugcugggcaccuucaccuggacccucagcgacuccgagagcaacgagacgccgggcggguacugccugacccgguggaugcugaucgaggccgagcucaagugcuucggcaacaccgccguggccaagugcaacgagaagcacgacgaggaguucugcgacaugcugcgccuguucgacuucaacaagcaggcgauccggcgccucaaggcccccgcccagauguccauccagcugaucaacaaggccgugaacgcccugaucaacgaccagcucaucaugaagaaccaccuccgggacaucauggggauccccuacugcaacuacagcaaguacugcuaccugaaccacaccgucacgggccgcaccucccugccccggugcugccuggugagcaacggguccuaccugaacgagacccacuucagcgacgacaucgagcagcaggcggacaacaugaucaccgagcuccugcagaaggaguacauggaccgccagggcaagacgccgcugggccugguggaccucuucgucuucuccaccagcuucuaccugaucuccaucuuccugcaccucgugaagauccccacccaccggcacgugaucgggaagcccugccccaagccgcaccgccugaaccacaugggcaucugcagcugcgggcuguacaagcaccccggcguccccgugaaguggaagcggugaggacuaguaauaaggaaacuguaugaaugucugugggcaggaagugaagagauccuucuguaaagguuuuuggaauuaugucugcugaauaauaaacuuuuuugaaauaauaaaucugguagaaaaaugagaucucaaaggcucuuuucagagccaccaaaaaaaaaaaaaaaaaaaaaaaaaaaaaaaaaaaaaaaaaaaaaaaaaaaaaaaaaaaaaaaaaaaaaaaaaaaaaaaaaaaaaaaaaaaaaaaaaaaaa

SEQ ID NO: 32532 - RNA, 1809 nt, Artificial Sequence
  mRNA product Design b-4 (hSL-A100) comprising derived and/or modified sequence from LASV(LASV035-NIG-2009;Clade II)__AIT17588__GPCmut7 (opt1)
aggagagucccgcagucggcguccagcggcucugcuuguucgugugugugucguugcaggccuuauucaagcuuaccaugggccagaucaucaccuucuuccaggaggugccccacgucaucgaggaggugaugaacaucgugcugaucgcccucagccugcuggccauccucaaggggaucuacaacgucgcgaccugcggccuguucgggcugguguccuuccuccugcugugcggccgcagcugcuccacgaccuacaaggggguguacgagcuccagacccuggagcuggacauggccagccucaacaugaccaugccgcuguccugcacgaagaacaacagccaccacuacaucauggucggcaacgagaccggccuggagcucacccugaccaacacguccaucaucaaccacaaguucugcaaccugagcgacgcccacaagaagaaccucuacgaccacgcccugauguccaucaucagcaccuuccaccuguccauccccaacuucaaccaguacgaggccaugagcugcgacuucaacgggggcaagaucuccgugcaguacaaccucagccacgcguacgccguggacgccgccaaccacugcgggaccaucgcgaacggcguccugcagaccuucaugcggauggccuggggcggguccuacaucgcccuggacagcggcaagggguccugggacugcaucaugacgagcuaccaguaccucaucauccagaacaccaccugggaggaccacugccaguucucccgccccagccccaucggcuaccuggggcugcucagccagcggacccgcgacaucuacaucucccggcgccugcugggcacguucaccuggacccucagcgacuccgagggcaacgagacccccgggggcuacugccugacgcgguggaugcugaucgaggccgagcucaagugcuucgggaacaccgccguggcgaagugcaacgagaagcacgacgaggaguucugcgacaugcugcgccuguucgacuucaacaagcaggccauccggcgccucaaggccccggcccagaugagcauccagcugaucaacaaggccgugaacgcgcugaucaacgaccagcucaucaugaagaaccaccuccgggacaucaugggcauccccuacugcaacuacuccaaguacugcuaccugaaccacaccgucaccgggaagacgagccugccccgcugcugccugguguccaacggcagcuaccugaacgagacccacuucuccgacgacaucgagcagcaggccgacaacaugaucaccgagcuccugcagaaggaguacaucgaccggcagggcaagaccccgcuggggcugguggaccucuucgucuucagcacguccuucuaccugaucagcaucuuccugcaccucgugaagauccccacccaccgccacgugaucggcaagcccugccccaagccgcaccggcugaaccacauggggaucugcuccugcggccuguacaagcaccccgggguccccgugaaguggaagcgcugaggacuaguaauaaggaaacuguaugaaugucugugggcaggaagugaagagauccuucuguaaagguuuuuggaauuaugucugcugaauaauaaacuuuuuugaaauaauaaaucugguagaaaaaugagaucucaaaggcucuuuucagagccaccaaaaaaaaaaaaaaaaaaaaaaaaaaaaaaaaaaaaaaaaaaaaaaaaaaaaaaaaaaaaaaaaaaaaaaaaaaaaaaaaaaaaaaaaaaaaaaaaaaaaa

SEQ ID NO: 32533 - RNA, 1809 nt, Artificial Sequence
  mRNA product Design b-4 (hSL-A100) comprising derived and/or modified sequence from LASV(LASV1000-NIG-2009;Clade II)__AIT17782__GPCmut7 (opt1)
aggagagucccgcagucggcguccagcggcucugcuuguucgugugugugucguugcaggccuuauucaagcuuaccaugggccagaucaucaccuucuuccaggaggugccccacgucaucgaggaggugaugaacaucgugcugaucgcccucagccugcuggccauccucaaggggaucuacaacgucgcgaccugcggccuguucgggcugguguccuuccuccugcugugcggccgcagcugcuccacgaccuacaaggggguguacgagcuccagacccuggagcuggacauggccagccucaacaugaccaugccgcuguccugcacgaagaacaacagccaccacuacaucauggucggcaacgagaccggccuggagcucacccugaccaacacguccaucaucaaccacaaguucugcaaccugagcgacgcccacaagaagaaccucuacgaccacgcccugauguccaucaucagcaccuuccaccuguccauccccaacuucaaccaguacgaggccaugagcugcgacuucaacgggggcaagaucuccgugcaguacaaccucagccacaccuacgcgguggacgccgccaaccacugcgggaccaucgccaacggcguccugcagacguucaugcggauggcguggggcggguccuacaucgcccuggacagcggcaagggguccugggacugcaucaugaccagcuaccaguaccucaucauccagaacaccaccugggaggaccacugccaguucucccgccccagccccaucggcuaccuggggcugcucagccagcggacgcgcgacaucuacaucucccggcgccugcugggcaccuucaccuggacccucagcgacuccgagggcaacgagacgcccgggggcuacugccugacccgguggaugcugaucgaggccgagcucaagugcuucgggaacaccgccguggccaagugcaacgagaagcacgacgaggaguucugcgacaugcugcgccuguucgacuucaacaagcaggcgaucaagcggcucaagaccccggcccagaugagcauccagcugaucaacaaggccgugaacgcccugaucaacgaccagcucaucaugaagaaccaccuccgcgacaucaugggcauccccuacugcaacuacuccaaguacugcuaccugaaccacacggucaccgggaagaccagccugccccggugcugccugguguccaacggcagcuaccugaacgagacccacuucuccgacgacaucgagcagcaggccgacaacaugaucacggagcuccugcagaaggaguacaucgaccgccagggcaagaccccgcuggggcugguggaccucuucgucuucagcaccuccuucuaccugaucagcaucuuccugcaccucgugaagauccccacccaccggcacguggucggcaagcccugccccaagccgcaccgccugaaccacauggggaucugcuccugcggccuguacaagcaccccggggugcccgugaaguggaagcggugaggacuaguaauaaggaaacuguaugaaugucugugggcaggaagugaagagauccuucuguaaagguuuuuggaauuaugucugcugaauaauaaacuuuuuugaaauaauaaaucugguagaaaaaugagaucucaaaggcucuuuucagagccaccaaaaaaaaaaaaaaaaaaaaaaaaaaaaaaaaaaaaaaaaaaaaaaaaaaaaaaaaaaaaaaaaaaaaaaaaaaaaaaaaaaaaaaaaaaaaaaaaaaaaa

SEQ ID NO: 32534 - RNA, 1809 nt, Artificial Sequence
  mRNA product Design b-4 (hSL-A100) comprising derived and/or modified sequence from LASV(LASV221-NIG-2010;Clade II)__AIT17624__GPCmut7 (opt1)
aggagagucccgcagucggcguccagcggcucugcuuguucgugugugugucguugcaggccuuauucaagcuuaccaugggccagaucaucaccuucuuccaggaggugccccacgucaucgaggaggugaugaacaucgugcugaucgcccucagccugcuggccauccucaaggggaucuacaacgucgcgaccugcggccuguucgggcugguguccuuccuccugcugugcggccgcagcugcuccacgaccuacaaggggguguacgagcuccagacccuggagcuggacauggccagccucaacaugaccaugccgcuguccugcacgaagaacaacagccaccacuacaucauggucggcaacgagaccggccuggagcucacccugaccaacacguccaucaucaaccacaaguucugcaaccugagcgacgcccacaagaagaaccucuacgaccacgcccugauguccaucaucagcaccuuccaccuguccauccccaacuucaaccaguacgaggccaugagcugcgacuucaacgggggcaagaucuccgugcaguacaaccucagccacaccuacgcgaucgacgccgccaaccacugcgggaccaucgccaacggcgugcugcagacguucaugcggauggcguggggcggguccuacaucgcccuggacagcggcaagggguccugggacugcaucaugaccagcuaccaguaccucaucauccagaacaccaccugggaggaccacugccaguucucccgccccagccccaucggcuaccuggggcugcucagccagcggacgcgcgacaucuacaucucccggcgccugcugggcaccuucaccuggacccucagcgacuccgagggcaacgagacgcccgggggcuacugccugacccgguggaugcugaucgaggccgagcucaagugcuucgggaacaccgccgucgccaagugcaacgagaagcacgacgaggaguucugcgacaugcugcgccuguucgacuucaacaagcaggcgauccggcgccucaagaccccggcccagaugagcauccagcugaucaacaaggccgugaacgcccugaucaacgaccagcucaucaugaagaaccaccuccgggacaucaugggcauccccuacugcaacuacuccaaguacugcuaccugaaccacacggugaccgggaagaccagccugccccgcugcugccuggucuccaacggcagcuaccugaacgagacccacuucuccgacgacaucgagcagcaggccgacaacaugaucacggagaugcuccagaaggaguacauggaccggcagggcaagaccccgcuggggcugguggaccuguucguguucagcaccuccuucuaccucaucagcaucuuccugcaccuggucaagauccccacccaccgccacgugaucggcaagcccugccccaagccgcaccggcucaaccacauggggaucugcuccugcggccuguacaagcaccccggggugcccgucaaguggaagcgcugaggacuaguaauaaggaaacuguaugaaugucugugggcaggaagugaagagauccuucuguaaagguuuuuggaauuaugucugcugaauaauaaacuuuuuugaaauaauaaaucugguagaaaaaugagaucucaaaggcucuuuucagagccaccaaaaaaaaaaaaaaaaaaaaaaaaaaaaaaaaaaaaaaaaaaaaaaaaaaaaaaaaaaaaaaaaaaaaaaaaaaaaaaaaaaaaaaaaaaaaaaaaaaaaa

SEQ ID NO: 32535 - RNA, 1809 nt, Artificial Sequence
  mRNA product Design b-4 (hSL-A100) comprising derived and/or modified sequence from LASV(LASV237-NIG-2010;Clade II)__AIT17638__GPCmut7 (opt1)
aggagagucccgcagucggcguccagcggcucugcuuguucgugugugugucguugcaggccuuauucaagcuuaccaugggccagaucaucaccuucuuccaggaggugccccacgucaucgaggaggugaugaacaucgugcugaucgcccucagccugcuggccauccucaaggggaucuacaacgucgcgaccugcggccuguucgggcugguguccuuccuccugcugugcggccgcagcugcuccacgaccuacaaggggguguacgagcuccagacccuggagcuggacauggccagccucaacaugaccaugccgcuguccugcacgaagaacaacagccaccacuacaucauggucggcaacgagaccggccuggagcucacccugaccaacacguccaucaucaaccacaaguucugcaaccugagcgacgcccacaagaaggaccucuacgaccacgcccugauguccaucaucagcaccuuccaccuguccauccccaacuucaaccaguacgaggccaugagcugcgacuucaacgggggcaagaucuccgugcaguacaaccucagccacaccuacgcgguggacgccgccaaccacugcgggaccaucgccaacggcguccugcagacguucaugcggauggcguggggcggguccuacaucgcccuggacagcggcaagggguccugggacugcaucaugaccagcuaccaguaccucaucauccagaacaccaccugggaggaccacugccaguucucccgccccagccccaucggcuaccuggggcugcucagccagcggacgcgcgacaucuacaucucccggcgccugcugggcaccuucaccuggacccucagcgacuccgagggcaacgagacgcccgggggcuacugccugacccgguggaugcugaucgaggccgagcucaagugcuucgggaacaccgccguggccaagugcaacgagaagcacgacgaggaguucugcgacaugcugcgccuguucgacuucaacaagcaggcgauccggcgccucaagaccccggcccagaugagcauccagcugaucaacaaggccgugaacgcccugaucaacgaccagcucaucaugaagaaccaccuccgggacaucaugggcauccccuacugcaacuacuccaaguacugcuaccugaaccacacggucaccgggaagaccagccugccccgcugcugccugguguccaacggcagcuaccugaacgagacccacuucuccgacgacaucgagcagcaggccgacaacaugaucacggagcuccugcagaaggaguacauggaccggcagggcaagaccccgcuggggcugguggaccucuucgucuucagcaccuccuucuaccugaucagcaucuuccugcaccucaucaagauccccacccaccgccacaucacgggcaagcccugccccaagccgcaccggcugaaccacauggggaucugcuccugcggccuguacaagcaccccggggugcccgugaaguggaagcgcugaggacuaguaauaaggaaacuguaugaaugucugugggcaggaagugaagagauccuucuguaaagguuuuuggaauuaugucugcugaauaauaaacuuuuuugaaauaauaaaucugguagaaaaaugagaucucaaaggcucuuuucagagccaccaaaaaaaaaaaaaaaaaaaaaaaaaaaaaaaaaaaaaaaaaaaaaaaaaaaaaaaaaaaaaaaaaaaaaaaaaaaaaaaaaaaaaaaaaaaaaaaaaaaaa

SEQ ID NO: 32536 - RNA, 1809 nt, Artificial Sequence
  mRNA product Design b-4 (hSL-A100) comprising derived and/or modified sequence from LASV(LASV253-NIG-2011;Clade II)__AIT17670__GPCmut7 (opt1)
aggagagucccgcagucggcguccagcggcucugcuuguucgugugugugucguugcaggccuuauucaagcuuaccaugggccagaucaucaccuucuuccaggaggugccccacgucaucgaggaggugaugaacaucgugcugaucgcccucagccugcuggccauccucaaggggaucuacaacgucgcgaccugcggccuguucgggcugguguccuuccuccugcugugcggccgcagcugcuccacgaccuacaaggggguguacgagcuccagacccuggagcuggacauggccagccucaacaugaccaugccgcuguccugcacgaagaacaacagccaccacuacaucauggucggcaacgagaccggccuggagcucacccugaccaacacguccaucaucaaccacaaguucugcaaccugagcgacgcccacaagaagaaccucuacgaccacgcccugauguccaucaucagcaccuuccaccuguccauccccaacuucaaccaguacgaggccaugagcugcgacuucaacgggggcaagaucuccgugcaguacaaccucagccacaccuacgcgguggacgccgccaaccacugcgggaccaucgccaacggcguccugcagacguucaugcggauggcguggggcggguccuacaucgcccuggacagcggcaagggguccugggacugcaucaugaccagcuaccaguaccucaucauccagaacaccaccugggaggaccacugccaguucucccgccccagccccaucggcuaccuggggcugcucagccagcggacgcgcgacaucuacaucucccggcgccugcugggcaccuucaccuggacccucagcgacuccgagggcaacgagacgcccgggggcuacugccugacccgguggaugcugaucgaggccgagcucaagugcuucgggaacaccgccguggccaagugcaacgagaagcacgacgaggaguucugcgacaugcugcgccuguucgacuucaacaagcaggcgauccggcgccucaaggccccggcccagaugagcauccagcugaucaacaaggccgugaacgcccugaucaacgaccagcucaucaugaagaaccaccuccgggacaucaugggcauccccuacugcaacuacuccaaguacugcuaccugaaccacaccgucacggggcgcaccagccugccccggugcugccugguguccaacggcagcuaccugaacgagacccacuucuccgacgacaucgagcagcaggcggacaacaugaucaccgagcuccugcagaaggaguacaucgaccgccagggcaagacgccgcuggggcugguggaccucuucgucuucagcaccuccuucuaccugaucagcaucuuccugcaccucgugaagauccccacccaccggcacaucaucggcaagcccugccccaagccgcaccgccugaaccacauggggaucugcuccugcggccuguacaagcaccccggggugcccgucaaguggaagcggugaggacuaguaauaaggaaacuguaugaaugucugugggcaggaagugaagagauccuucuguaaagguuuuuggaauuaugucugcugaauaauaaacuuuuuugaaauaauaaaucugguagaaaaaugagaucucaaaggcucuuuucagagccaccaaaaaaaaaaaaaaaaaaaaaaaaaaaaaaaaaaaaaaaaaaaaaaaaaaaaaaaaaaaaaaaaaaaaaaaaaaaaaaaaaaaaaaaaaaaaaaaaaaaaa

SEQ ID NO: 32537 - RNA, 1809 nt, Artificial Sequence
  mRNA product Design b-4 (hSL-A100) comprising derived and/or modified sequence from LASV(LASV254-NIG-2011;Clade II)__AIT17674__GPCmut7 (opt1)
aggagagucccgcagucggcguccagcggcucugcuuguucgugugugugucguugcaggccuuauucaagcuuaccaugggccagaucaucaccuucuuccaggaggugccccacgucaucgaggaggugaugaacaucgugcugaucgcccucagccugcuggccauccucaaggggaucuacaacgucgcgaccugcggccuguucgggcugguguccuuccuccugcugugcggccgcagcugcuccacgaccuacaaggggguguacgagcuccagacccuggagcuggacaugaccaaccucaacaugacgaugccgcugagcugcaccaagaacaacucccaccacuacaucauggucggcaacgagaccggccuggagcucacccugacgaacaccagcaucaucaaccacaaguucugcaaccuguccgacgcccacaagaagaaccucuacaaccacgcccugaugagcaucaucuccaccuuccaccugagcauccccaacuucaaccaguacgaggccauguccugcgacuucaacgggggcaagaucagcgugcaguacaaccucucccacagcuacgccguggacgcggccaaccacugcgggaccaucgccaacggcguccugcagacguucaugcggauggccuggggcggguccuacaucgcgcuggacagcggcaaggggaacugggacugcaucaugaccuccuaccaguaccucaucauccagaacaccaccugggaggaccacugccaguucagccgccccucccccaucggcuaccuggggcugcucagccagcggacgcgcgacaucuacaucagccggcgccugcugggcaccuucaccuggacccucuccgacagcgagggcaacgagacgcccgggggcuacugccugacccgguggaugcugaucgaggccgagcucaagugcuucgggaacaccgccguggccaagugcaacgagaagcacgacgaggaguucugcgacaugcugcgccuguucgacuucaacaagcaggccauccggcgccucaagaccccggcgcaggccaacauccagcugaucaacaaggccgugaacgcccugaucaacgaccagcucaucaugaagaaccaccuccgggacaucaugggcauccccuacugcaacuacuccaaguacugcuaccugaaccacacggucaccgggaagaccagccugccccgcugcugccugguguccaacggcagcuaccugaacgagacccacuucuccgacgacaucgagcagcaggccgacaacaugaucacggagcuccugcagaaggaguacauggaccggcagggcaagaccccgcuggggcugguggaccucuucgucuucagcaccuccuucuaccugaucagcaucuuccugcaccucgugaagauccccacccaccgccacgugaucggcaagcccugccccaagccgcaccggcugaaccacauggggaucugcuccugcggccuguacaagcaccccgggguccccgugaaguggaagcgcugaggacuaguaauaaggaaacuguaugaaugucugugggcaggaagugaagagauccuucuguaaagguuuuuggaauuaugucugcugaauaauaaacuuuuuugaaauaauaaaucugguagaaaaaugagaucucaaaggcucuuuucagagccaccaaaaaaaaaaaaaaaaaaaaaaaaaaaaaaaaaaaaaaaaaaaaaaaaaaaaaaaaaaaaaaaaaaaaaaaaaaaaaaaaaaaaaaaaaaaaaaaaaaaaa

SEQ ID NO: 32538 - RNA, 1809 nt, Artificial Sequence
  mRNA product Design b-4 (hSL-A100) comprising derived and/or modified sequence from LASV(Nig08-A19;Clade III)__ADU56618__GPCmut7 (opt1)
aggagagucccgcagucggcguccagcggcucugcuuguucgugugugugucguugcaggccuuauucaagcuuaccaugggccagaucgugaccuucuuccaggaggucccccacgugaucgaggaggugaugaacaucguccugaucgcccucagcauccuggccauccugaaggggcucuacaacaucgcgaccugcggccugaucgggcuggugacguuccuccugcuguccggccgcagcugcuccaugaccuacaaggggguguacgagcuccagacccuggagcugaacaugaacacccucaacaugacgaugccgcugagcugcaccaagaacaacucccaccacuacaucauggucggcaacgagaccggccuggagcucacccugacgaacaccagccugcuccaccacaaguucugcaaccuguccgacgcccacaagaagaaccuguacgaccacacccucaugagcaucaucuccaccuuccaccugagcauccccaacuucaaccaguacgaggccauguccugcgacuucaacgggggcaagaucacggugcaguacaaccugagccacuccuacgccaucgacgccgcgaaccacugcgggaccguggccaacggcguccuccagaccuucaugcggauggccuggggcgggagcuacaucgcccuggacuccggccgcgggaagugggacugcaucaugaccagcuaccaguaccugaucauccagaacacgaccugggaggaccacugccaguucucccggcccagccccaucggcuaccucgggcugcugucccagcgcacccgggacaucuacaucagccgccggcuccugggcaccuucacguggacccugagcgacuccgagggcaacgagacccccgggggcuacugccucacccgcuggaugcugaucgaggcggagcugaagugcuucgggaacacggccguggccaagugcaacgagaagcacgacgaggaguucugcgacaugcuccggcuguucgacuucaacaagcaggccauccgccggcugaaggccccggcgcagaugagcauccagcucaucaacaaggccgugaacgcccugaucaacgaccagcugaucaugaagaaccaccuccgcgacaucaugggcauccccuacugcaacuacuccaaguacugcuaccugaaccacaccagcaccgggcggaccucccugccccgcugcugccucgucagcaacggcuccuaccugaacgagacgcacuucagcgacgacaucgagcagcaggccgacaacaugaucaccgagaugcugcagaaggaguaccuggaccggcagggcaagaccccgcucgggcugguggaccuguucguguucuccaccagcuucuaccucaucuccaucuuccugcaccuggucaagauccccacgcaccgccacaucgugggcaagcccugccccaagccgcaccggcucaaccacauggggaucugcagcugcggccuguacaagcagcccggggugcccguccgcuggaagcggugaggacuaguaauaaggaaacuguaugaaugucugugggcaggaagugaagagauccuucuguaaagguuuuuggaauuaugucugcugaauaauaaacuuuuuugaaauaauaaaucugguagaaaaaugagaucucaaaggcucuuuucagagccaccaaaaaaaaaaaaaaaaaaaaaaaaaaaaaaaaaaaaaaaaaaaaaaaaaaaaaaaaaaaaaaaaaaaaaaaaaaaaaaaaaaaaaaaaaaaaaaaaaaaaa

SEQ ID NO: 32539 - RNA, 1812 nt, Artificial Sequence
  mRNA product Design b-4 (hSL-A100) comprising derived and/or modified sequence from LASV(G1180-SLE-2010;Clade IV)__AIT17168__GPCmut7 (opt1)
aggagagucccgcagucggcguccagcggcucugcuuguucgugugugugucguugcaggccuuauucaagcuuaccaugggccagaucgugaccuucuuccaggaggucccccacgugaucgaggaggugaugaacaucguccugaucgcccucagcauccuggccgugcugaaggggcucuacaacuucgcgaccugcggccugguggggcugcucacguuccugcugcucugcggccgcuccugcaccgccagccgguacaagggggucuacgagcugcagacccuggagcucaacauggagacccugaacaugacgaugccgcuguccugcaccaagaacaacagccaccacuacaucauggugggcaacgagaccggccucgagcugacccugacgaacaccuccaucaucaaccacaaguucugcaaccucagcgacgcccacaagaagaaccuguacgaccacgcccugauguccaucaucagcaccuuccaccucuccauccccaacuucaaccaguacgaggccaugagcugcgacuucaacgggggcaagaucuccgugcaguacaaccugagccacuccuacgcgggggacgccgccaaccacugcggcaccgucgccaacggggugcugcagacguucaugcgcauggcguggggcggcagcuacaucgcccucgacuccgggcacggcagcugggacugcaucaugaccuccuaccaguaccugaucauccagaacaccaccugggaggaccacugccaguucagccggcccucccccaucggguaccugggccuccugagccagcgcacgcgggacaucuacaucagccgccggcugcucggcaccuucaccuggacccuguccgacagcgaggggaaggacacgccgggcggguacugccugacccgcuggaugcucaucgaggccgagcugaagugcuucggcaacaccgccguggccaagugcaacgagaagcacgacgaggaguucugcgacaugcugcggcuguucgacuucaacaagcaggcgauccagcgccugaaggcccccgcccagauguccauccagcugaucaacaaggccgucaacgcccucaucaacgaccagcugaucaugaagaaccaccuccgggacaucauggggauccccuacugcaacuacagcaaguacugcuaccucaaccacaccacgaccggcaagaccucccugcccaagugcugccuggugagcaacggcuccuaccucaacgagacccacuucagcgacgacaucgagcagcaggcggacaacaugaucacggagaugcugcagaaggaguacauggagcgccaggggaagaccccgcugggccugguggaccucuucgucuucuccaccagcuucuaccugaucuccaucuuccugcaccucgugaagauccccacccaccggcacaucgugggcaagagcugccccaagccccaccgccugaaccacauggggaucugcuccugcgggcuguacaagcagccgggcguccccgugaaguggaagcggugaggacuaguaauaaggaaacuguaugaaugucugugggcaggaagugaagagauccuucuguaaagguuuuuggaauuaugucugcugaauaauaaacuuuuuugaaauaauaaaucugguagaaaaaugagaucucaaaggcucuuuucagagccaccaaaaaaaaaaaaaaaaaaaaaaaaaaaaaaaaaaaaaaaaaaaaaaaaaaaaaaaaaaaaaaaaaaaaaaaaaaaaaaaaaaaaaaaaaaaaaaaaaaaaa

SEQ ID NO: 32540 - RNA, 1812 nt, Artificial Sequence
  mRNA product Design b-4 (hSL-A100) comprising derived and/or modified sequence from LASV(G1442-SLE-2011;Clade IV)__AIT17180__GPCmut7 (opt1)
aggagagucccgcagucggcguccagcggcucugcuuguucgugugugugucguugcaggccuuauucaagcuuaccaugggccagaucgugaccuucuuccaggaggucccccacgugaucgaggaggugaugaacaucguccugaucgcccucagcauccuggccgugcugaaggggcucuacaacguggcgaccugcggccugaucgggcuggucacguuccuccugcugugcggccgcuccugcaccaccacccucuacaaggggguguacgagcugcagacgcuggagcucaacauggagacccugaacaugaccaugccgcugagcugcaccaagaacaacucccaccacuacauccgggugggcaacgagacgggccucgagcugacccugaccaacaccagcaucaucaaccacaaguucugcaaccucuccgacgcccacaagaagaaccuguacgaccacgcccugaugagcaucaucuccacguuccaccucagcauccccaacuucaaccaguacgaggccauguccugcgacuucaacgggggcaagaucagcguccaguacaaccugucccacagcuacgccggggacgcggccaaccacugcggcaccguggccaacggggugcugcagaccuucaugcgcauggccuggggcggcuccuacaucgcgcucgacagcgggcggggcaacugggacugcaucaugaccuccuaccaguaccugaucauccagaacacgaccugggacgaccacugccaguucagccgccccucccccaucggguaccugggccuccugagccagcggacccgcgacgucuacaucucccggcgccugcucggcaccuucacguggacccugagcgacagcgaggggaaggacaccccgggcggguacugccugacccgguggaugcucaucgaggccgagcugaagugcuucggcaacacggccguggccaagugcaacgagaagcacgacgaggaguucugcgacaugcugcgccucuucgacuucaacaagcaggccauccagcggcugaaggcgcccgcccagauguccauccagcugaucaacaaggccgugaacgcccucaucaacgaccagcugaucaugaagaaccaccuccgcgacaucauggggauccccuacugcaacuacagcaaguacugcuaccugaacaacaccgccaccggcaagaccucccugcccaagugcugccugaucagcaacggcuccuaccucaacgagacgcacuucagcgacgacaucgagcaggaggcggacaacaugaucaccgagaugcugcagaaggaguacauggagcggcaggggaagaccccgcugggccuggucgaccucuucguguucuccaccagcuucuaccugaucuccaucuuccugcaccucgugaagauccccacgcaccgccacaucgucggcaagagcugccccaagccccaccggcugaaccacauggggaucugcuccugcgggcuguacaagcagccgggcgugcccgugcgcuggaagcggugaggacuaguaauaaggaaacuguaugaaugucugugggcaggaagugaagagauccuucuguaaagguuuuuggaauuaugucugcugaauaauaaacuuuuuugaaauaauaaaucugguagaaaaaugagaucucaaaggcucuuuucagagccaccaaaaaaaaaaaaaaaaaaaaaaaaaaaaaaaaaaaaaaaaaaaaaaaaaaaaaaaaaaaaaaaaaaaaaaaaaaaaaaaaaaaaaaaaaaaaaaaaaaaaa

SEQ ID NO: 32541 - RNA, 1812 nt, Artificial Sequence
  mRNA product Design b-4 (hSL-A100) comprising derived and/or modified sequence from LASV(G3010-SLE-2013;Clade IV)__AIT17344__GPCmut7 (opt1)
aggagagucccgcagucggcguccagcggcucugcuuguucgugugugugucguugcaggccuuauucaagcuuaccaugggccagaucgugaccuucuuccaggaggucccccacgugaucgaggaggugaugaacaucguccugaucgcccucagcauccuggccgugcugaaggggcucuacaacuucgcgaccugcggccugguggggcuggucacguuccuccugcugugcggccgcuccugcaccaccagccucuacaaggggguguacgagcugcagacccuggagcucaacauggagacgcugaacaugaccaugccgcuguccugcaccaagaacaacagccaccacuacaucauggugggcaacgagaccggccucgagcugacgcugaccaacaccuccaucaucaaccacaaguucugcaaccucagcgacgcccacaagaagaaccuguacaaccacgcccugauguccaucaucagcaccuuccaccucuccauccccaacuucaaccaguacgaggccaugagcugcgacuucaacgggggcaagaucuccguccaguacaaccugagccacuccuacgccggggacgcggccagccacugcggcacgguggccaacggggugcugcagaccuucaugcggauggccuggggcggcuccuacaucgcgcucgacagcggguacggcaagugggacugcaucaugaccuccuaccaguaccugaucauccagaacaccacgugggaggaccacugccaguucagccgccccucccccaucggguaccugggccuccugagccagcggacccgcgacaucuacaucagccggcgccugcucggcaccuucaccuggacgcuguccgacagcgaggggaaggacaccccgggcggguacugccugacccgguggaugcucaucgaggccgagcugaagugcuucggcaacaccgccgucgccaagugcaacgagaagcacgacgaggaguucugcgacaugcugcgccucuucgacuucaacaagcaggccauccagcggcugaagacgcccgcgcagauguccauccagcugaucaacaaggccgugaacgcccucaucaacgaccagcugaucaugaagaaccaccuccgcgacaucauggggauccccuacugcaacuacagcaaguacugcuaccugaaccacaccaccaccggcaagacgucccugcccaagugcugccuggugagcaacggcuccuaccucaacgagacccacuucagcgacgacaucgagcagcaggccgacaacaugaucaccgagaugcugcagaaggaguacauggagcggcaggggaagaccccgcugggccuggucgaccucuucguguucuccacgagcuucuaccugaucuccaucuuccugcaccucgugaagauccccacccaccgccacaucgucggcaagagcugccccaagccccaccggcugaaccacauggggaucugcuccugcgggcuguacaagcagccgggcgugcccgugcgcuggaagcggugaggacuaguaauaaggaaacuguaugaaugucugugggcaggaagugaagagauccuucuguaaagguuuuuggaauuaugucugcugaauaauaaacuuuuuugaaauaauaaaucugguagaaaaaugagaucucaaaggcucuuuucagagccaccaaaaaaaaaaaaaaaaaaaaaaaaaaaaaaaaaaaaaaaaaaaaaaaaaaaaaaaaaaaaaaaaaaaaaaaaaaaaaaaaaaaaaaaaaaaaaaaaaaaaa

SEQ ID NO: 32542 - RNA, 1812 nt, Artificial Sequence
  mRNA product Design b-4 (hSL-A100) comprising derived and/or modified sequence from LASV(G502-SLE-2009;Clade IV)__AIT17126__GPCmut7 (opt1)
aggagagucccgcagucggcguccagcggcucugcuuguucgugugugugucguugcaggccuuauucaagcuuaccaugggccagaucgugaccuucuuccaggaggucccccacgugaucgaggaggugaugaacaucguccugaucgcccucagcauccuggccgugcugaaggggcucuacaacuucgcgaccugcggccugguggggcugcucacguuccugcugcucugcggccgcuccugcaccaccgggcuguacaagggcgucuacgagcugcagacccucgagcugaacauggagacgcugaacaugaccaugccgcucagcugcaccaagaacaacucccaccacuacaucauggugggcaacgagaccgggcuggagcugacgcucaccaacaccagcaucaucaaccacaaguucugcaaccuguccgacgcccacaagaagaaccuguacgaccacgcccucaugagcaucaucuccaccuuccaccugagcauccccaacuucaaccaguacgaggccauguccugcgacuucaacggcgggaagaucagcgugcaguacaaccugucccacagcuacgccggcgacgcggccgaccacugcgggacggucgccaacggcgugcuccagaccuucaugcggauggccuggggcggguccuacaucgcgcuggacagcggccgcgggcggugggacugcaucaugaccuccuaccaguaccugaucauccagaacaccacgugggaggaccacugccaguucagccgccccucccccaucggcuaccucggccugcugagccagcggacccgcgacaucuacaucucccggcgccuccuggggaccuucaccuggacgcugagcgacagcgagggcaaggacacccccgggggcuacugccucacccgguggaugcugaucgaggccgagcugaagugcuucgggaacaccgccguggccaagugcaacgagaagcacgacgaggaguucugcgacaugcuccgccuguucgacuucaacaagcaggccauccagcggcugaaggcgccggcccagauguccauccagcucaucaacaaggccgucaacgcccugaucaacgaccagcuggugaugaagaaccaccuccgcgacaucaugggcauccccuacugcaacuacagccgguacugcuaccugaaccacacgaccaccggccgcaccucccugcccaagugcugccucgugagcaacggguccuaccugaacgagacgcacuucagcgacgacaucgagcagcaggccgacaacaugaucaccgagaugcugcagaaggaguacauggagcggcagggcaagaccccgcuggggcucgucgaccuguucguguucuccaccagcuucuaccugaucuccaucuuccuccaccuggugaagauccccacgcaccgccacaucgucggcaagagcugccccaagccccaccggcugaaccacauggggaucugcuccugcggccucuacaagcagccgggcgugcccgugaaguggaagcgcugaggacuaguaauaaggaaacuguaugaaugucugugggcaggaagugaagagauccuucuguaaagguuuuuggaauuaugucugcugaauaauaaacuuuuuugaaauaauaaaucugguagaaaaaugagaucucaaaggcucuuuucagagccaccaaaaaaaaaaaaaaaaaaaaaaaaaaaaaaaaaaaaaaaaaaaaaaaaaaaaaaaaaaaaaaaaaaaaaaaaaaaaaaaaaaaaaaaaaaaaaaaaaaaaa

SEQ ID NO: 32543 - RNA, 1812 nt, Artificial Sequence
  mRNA product Design b-4 (hSL-A100) comprising derived and/or modified sequence from LASV(G733-SLE-2010;Clade IV)__AIT17154__GPCmut7 (opt1)
aggagagucccgcagucggcguccagcggcucugcuuguucgugugugugucguugcaggccuuauucaagcuuaccaugggccagaucgugaccuucuuccaggaggucccccacgugaucgaggaggugaugaacaucguccugaucgcccucagcauccuggccgugcugaaggggcucuacaacuucgcgaccugcggcaucguggggcuggucuccuuccugcuccugugcggccgcagcugcacgaccucccuguacaaggggguguacgagcuccagacccuggagcugaacauggagacccucaacaugacgaugccgcugagcugcaccaagaacaacucccaccacuacaucauggugggcaacgagaccggccuggagcucacccugacgaacaccagcaucaucaaccacaaguucugcaaccuguccgacgcccacaagaagaaccucuacgaccacgcccugaugagcaucaucuccaccuuccaccugagcauccccaacuucaaccaguacgaggccauguccugcgacuucaacgggggcaagaucagcguccaguacaaccucucccacagcuacgccggggacgcggccaaccacugcggcaccaucgccaacggggugcugcagacguucaugcggauggccuggggcggcuccuacaucgcgcuggacagcgggcgcgaccggugggacugcaucaugaccuccuaccaguaccucaucauccagaacaccaccugggaggaccacugccaguucagccgccccucccccaucggcuaccuggggcugcucagccagcggacgcgcgacaucuacaucagccggcgccugcugggcaccuucaccuggacccucuccgacagcgagggcaaggacacgcccgggggcuacugccugacccgguggaugcugaucgaggccgagcucaagugcuucgggaacaccgccguggccaagugcaacgagaagcacgacgaggaguucugcgacaugcugcgccuguucgacuucaacaagcaggccauccagcggcucaaggcgccggcccagauguccauccagcugaucaacaaggccgucaacgcccugaucaacgaccagcucaucaugaagaaccaccuccgcgacaucaugggcauccccuacugcaacuacagcaaguacugcuaccugaaccacaccacgaccgggaagaccucccugcccaagugcugccuggugagcaacggcuccuaccugaacgagacccacuucagcgacgacaucgagcagcaggccgacaacaugaucacggagaugcuccagaaggaguacauggagcggcagggcaagaccccgcuggggcugguggaccuguucgucuucuccaccagcuucuaccucaucuccaucuuccugcaccuggugaagauccccacccaccgccacguggucggcaagagcugccccaagccccaccggcucaaccacauggggaucugcuccugcggccuguacgggcagccgggcgugcccgugaaguggaagcgcugaggacuaguaauaaggaaacuguaugaaugucugugggcaggaagugaagagauccuucuguaaagguuuuuggaauuaugucugcugaauaauaaacuuuuuugaaauaauaaaucugguagaaaaaugagaucucaaaggcucuuuucagagccaccaaaaaaaaaaaaaaaaaaaaaaaaaaaaaaaaaaaaaaaaaaaaaaaaaaaaaaaaaaaaaaaaaaaaaaaaaaaaaaaaaaaaaaaaaaaaaaaaaaaaa

SEQ ID NO: 32544 - RNA, 1812 nt, Artificial Sequence
  mRNA product Design b-4 (hSL-A100) comprising derived and/or modified sequence from MOPV/LASV reassortant(IGS-1;Clade IV)__AFY05576__GPCmut7 (opt1)
aggagagucccgcagucggcguccagcggcucugcuuguucgugugugugucguugcaggccuuauucaagcuuaccaugggccagaucgugaccuucuuccaggaggucccccacgugaucgaggaggugaugaacaucguccugaucgcccucagcgugcuggccgugcugaaggggcucuacaacuucgcgaccugcggccuggucgggcuggugacguuccuccugcugugcggccgcuccugcaccaccagccucuacaaggggguguacgagcugcagacccuggagcucaacauggagacgcugaacaugaccaugccgcuguccugcaccaagaacaacagccaccacuacaucauggucggcaacgagaccggccucgagcugacgcugaccaacaccuccaucaucaaccacaaguucugcaaccucagcgacgcccacaagaagaaccuguacgaccacgcccugauguccaucaucagcaccuuccaccucuccauccccaacuucaaccaguacgaggccaugagcugcgacuucaacgggggcaagaucuccgugcaguacaaccugagccacuccuacgccggggacgcggccaaccacugcggcacgguggccaacgggguccugcagaccuucaugcggauggccuggggcggcagcuacaucgcgcucgacuccgggcgcggcaacugggacugcaucaugaccagcuaccaguaccugaucauccagaacaccacgugggaggaccacugccaguucucccggcccagccccaucggguaccugggccuccugucccagcgcacccgggacaucuacaucagccgccggcugcucggcaccuucaccuggacgcugagcgacuccgagggggaggacaccccgggcggguacugccugacccgcuggaugcucaucgaggccgagcugaagugcuucggcaacaccgccguggccaagugcaacgagaagcacgacgaggaguucugcgacaugcugcggcuguucgacuucaacaagcaggccauccagcgccugaaggcgcccgcccagaugagcauccagcugaucaacaaggccgugaacgcccucaucaacgaccagcugaucaugaagaaccaccuccgggacaucauggggauccccuacugcaacuacuccaaguacugcuaccucaaccacacgaccaccggccgcaccagccugcccaagugcugccuggucuccaacggcagcuaccucaacgagacgcacuucuccgacgacaucgagcagcaggccgacaacaugaucaccgagaugcugcagaaggaguacauggagcggcaggggaagaccccgcugggccugguggaccucuucguguucagcaccuccuucuaccugaucagcaucuuccugcaccucgucaagauccccacgcaccgccacaucguggggaaguccugccccaagccccaccggcugaaccacaugggcaucugcagcugcgggcuguacaagcagccgggcgugcccgucaaguggaagcgcugaggacuaguaauaaggaaacuguaugaaugucugugggcaggaagugaagagauccuucuguaaagguuuuuggaauuaugucugcugaauaauaaacuuuuuugaaauaauaaaucugguagaaaaaugagaucucaaaggcucuuuucagagccaccaaaaaaaaaaaaaaaaaaaaaaaaaaaaaaaaaaaaaaaaaaaaaaaaaaaaaaaaaaaaaaaaaaaaaaaaaaaaaaaaaaaaaaaaaaaaaaaaaaaaa

SEQ ID NO: 32545 - RNA, 1812 nt, Artificial Sequence
  mRNA product Design b-4 (hSL-A100) comprising derived and/or modified sequence from LASV(LM765-SLE-2012;Clade IV)__AIT17814__GPCmut7 (opt1)
aggagagucccgcagucggcguccagcggcucugcuuguucgugugugugucguugcaggccuuauucaagcuuaccaugggccagaucgugaccuucuuccaggaggucccccacgugaucgaggaggugaugaacaucguccugaucgcccucagcauccuggccgugcugaaggggcucuacaacuucgcgaccugcggccugguggggcuggucacguuccuccugcugugcggccgcuccugcaccaccagccucuacaaggggguguacgagcugcagacccuggagcucaacauggagacgcugaacaugaccaugccgcuguccugcaccaagaacaacagccaccacuacaucauggugggcaacgagaccggccucgagcugacgcugaccaacaccuccaucaucgaccacaaguucugcaaccucagcgacgcccaccggaagaaccuguacgaccacgcccugauguccaucaucagcaccuuccaccucuccauccccaacuucaaccaguacgaggccaugagcugcgacuucaacgggggcaagaucuccguccaguacaaccugagccacuccuacgccaaggacgcggccgaccacugcgggacgguggccaacggcgugcugcagaccuucaugcgcauggccuggggcgggagcuacaucgcgcucgacuccggccgggggcgcugggacugcaucaugaccagcuaccaguaccugaucauccagaacaccacgugggaggaccacugccaguucucccggcccagccccaucggcuaccuggggcuccugucccagcgcacccgggacaucuacaucagccgccggcugcucggcaccuucaccuggacgcugagcgacuccgagggcaaggacacccccgggggcuacugccugacccgcuggaugcucaucgaggccgagcugaagugcuucgggaacaccgccgucgccaagugcaacgagaagcacgacgaggaguucugcgacaugcugcggcuguucgacuucaacaagcaggccauccagcgccugaaggcgccggcccagaugagcauccagcugaucaacaaggccgugaacgcccucaucaacgaccagcugaucaugaagaaccaccuccgggacaucaugggcauccccuacugcaacuacuccaaguacugcuaccucaaccacacgaccaccgggaagaccagccugcccaagugcugccugguguccaacggcagcuaccucaacgagacgcacuucuccgacgacaucgagcagcaggccgacaacaugaucaccgagaugcugcagaaggaguacauggagcgccagggcaagaccccgcuggggcuggucgaccucuucguguucagcaccuccuucuaccugaucagcaucuuccugcaccucgugaagauccccacgcaccggcacaucgucggcaagcccugccccaagccgcaccgccugaaccacauggggaucugcuccugcggccuguacaagcagcccggggugcccgugaaguggaagcggugaggacuaguaauaaggaaacuguaugaaugucugugggcaggaagugaagagauccuucuguaaagguuuuuggaauuaugucugcugaauaauaaacuuuuuugaaauaauaaaucugguagaaaaaugagaucucaaaggcucuuuucagagccaccaaaaaaaaaaaaaaaaaaaaaaaaaaaaaaaaaaaaaaaaaaaaaaaaaaaaaaaaaaaaaaaaaaaaaaaaaaaaaaaaaaaaaaaaaaaaaaaaaaaaa

SEQ ID NO: 32546 - RNA, 1812 nt, Artificial Sequence
  mRNA product Design b-4 (hSL-A100) comprising derived and/or modified sequence from LASV(LM776-SLE-2012;Clade IV)__AIT17824__GPCmut7 (opt1)
aggagagucccgcagucggcguccagcggcucugcuuguucgugugugugucguugcaggccuuauucaagcuuaccaugggccagaucgugaccuucuuccaggaggucccccacgugaucgaggaggugaugaacaucguccugaucgcccucagcauccuggccgugcugaaggggcucuacaacuucgcgaccugcggccugguggggcuggucacguuccuccugcugugcggccgcuccugcaccaccagcguguacaaggggguguacgagcuccagacccuggagcugaacauggagacgcucaacaugaccaugccgcuguccugcaccaagaacaacagccaccacuacaucauggucggcaacgagaccggccuggagcucacgcugaccaacaccuccaucaucaaccacaaguucugcaaccugagcgacgcccacaagaagaaccucuacgaccacgcccugauguccaucaucagcaccuuccaccuguccauccccaacuucaaccaguacgaggccaugagcugcgacuucaacgggggcaagaucuccgugcaguacaaccucagccacuccuacgccggggacgcggccaaccacugcggcacgguggccaacgggguccugcagaccuucaugcggauggccuggggcggcagcuacaucgcgcuggacuccgggcacggcaagugggacugcaucaugaccagcuaccaguaccucaucauccagaacaccacgugggaggaccacugccaguucucccgccccagccccaucggguaccugggccugcucucccagcggacccgcgacaucuacaucagccggcgccugcugggcaccuucaccuggacgcucagcgacuccgaggggaaggacaccccgggcggguacugccugacccgguggaugcugaucgaggccgagcucaagugcuucggcaacaccgccguggccaagugcaacgagaagcacgacgaggaguucugcgacaugcugcgccuguucgacuucaacaagcaggccauccagcggcucaaggcgcccgcccagaugagcauccagcugaucaacaaggccgugaacgcccugaucaacgaccagcucaucaugaagaaccaccuccgcgacaucauggggauccccuacugcaacuacuccaaguacugcuaccugaaccacacgaccaccggcaagaccagccugcccaagugcugccuggucuccaacggcagcuaccugaacgagacgcacuucuccgacgacaucgagcagcaggccgacaacaugaucaccgagaugcuccagaaggaguacauggagcggcaggggaagaccccgcugggccugguggaccuguucguguucagcaccuccuucuaccucaucagcaucuuccugcaccuggucaagauccccacgcaccgccacaucguggggaaguccugccccaagccccaccggcucaaccacaugggcaucugcagcugcgggcuguacaagcagccgggcgugcccguccgcuggaagcggugaggacuaguaauaaggaaacuguaugaaugucugugggcaggaagugaagagauccuucuguaaagguuuuuggaauuaugucugcugaauaauaaacuuuuuugaaauaauaaaucugguagaaaaaugagaucucaaaggcucuuuucagagccaccaaaaaaaaaaaaaaaaaaaaaaaaaaaaaaaaaaaaaaaaaaaaaaaaaaaaaaaaaaaaaaaaaaaaaaaaaaaaaaaaaaaaaaaaaaaaaaaaaaaaa

SEQ ID NO: 32547 - RNA, 1812 nt, Artificial Sequence
  mRNA product Design b-4 (hSL-A100) comprising derived and/or modified sequence from LASV(Mad39;Clade IV)__ANH09722__GPCmut7 (opt1)
aggagagucccgcagucggcguccagcggcucugcuuguucgugugugugucguugcaggccuuauucaagcuuaccaugggccagaucgugaccuucuuccaggaggucccccacgugaucgaggaggugaugaacaucguccugaucgcccucagcauccuggccgugcugaaggggcucuacaacguggcgaccugcggccugaucgggcuggucacguuccuccugcugugcggccgcuccugcaccaccacccucuacaaggggguguacgagcugcaggcccuggagcucaacauggagacgcugaacaugaccaugccgcugagcugcaccaagaacaacucccaccacuacauccgggugggcaacgagaccggccucgagcugacgcugaccaacaccagccucaucaaccacaaguucugcaaccuguccgacgcccacaagaagaaccuguacgaccacgcccucaugagcaucaucuccaccuuccaccugagcauccccaacuucaaccaguacgaggccauguccugcgacuucaacgacgggaagaucagcguccaguacaaccugucccacacguacgcgggcgacaccgccaaccacugcgggaccguggccaacggcgugcuccagaccuucaugcgcauggccuggggcgggagcuacaucgcgcuggacuccggccgcgggggcugggacugcaucaugacgagcuaccaguaccugaucauccagaacaccaccugggaggaccacugccaguucucccggcccagccccaucggguaccucggccugcugucccagcggacccgcgacaucuacaucagccggcgccuccugggcacguucaccuggacccuguccgacagcgaggggaaggacaccccgggcggguacugccucacgcgguggaugcugaucgaggccgagcugaagugcuucggcaacaccgccgucgccaagugcaacgagaagcacgacgaggaguucugcgacaugcuccgccuguucgacuucaacaagcaggccauccagcggcugaaggcgcccgcccagaugagcauccagcucaucaacaaggccgugaacgcccugaucaacgaccagcugaucaugaagaaccaccuccgcgacaucauggggauccccuacugcaacuacuccaaguacugcuaccugaaccacaccgugaccggcaagacgagccugcccaagugcugccucgucuccaacggcagcuaccugaacgagacccacuucuccgacgacaucgagcagcaggccgacaacaugaucaccgagaugcugcagaaggaguacauggagcggcaggggaagaccccgcugggccucguggaccuguucguguucagcacguccuucuaccugaucagcaucuuccuccaccuggucaagauccccacccaccgccacgugguggggaagcccugccccaagccgcaccggcugaaccacaugggcaucugcuccugcggguucuacaagcagcccggcguccccgugcgcuggaagcggugaggacuaguaauaaggaaacuguaugaaugucugugggcaggaagugaagagauccuucuguaaagguuuuuggaauuaugucugcugaauaauaaacuuuuuugaaauaauaaaucugguagaaaaaugagaucucaaaggcucuuuucagagccaccaaaaaaaaaaaaaaaaaaaaaaaaaaaaaaaaaaaaaaaaaaaaaaaaaaaaaaaaaaaaaaaaaaaaaaaaaaaaaaaaaaaaaaaaaaaaaaaaaaaaa

SEQ ID NO: 32548 - RNA, 1812 nt, Artificial Sequence
  mRNA product Design b-4 (hSL-A100) comprising derived and/or modified sequence from LASV(Z0947-SLE-2011;Clade IV)__AIT17840__GPCmut7 (opt1)
aggagagucccgcagucggcguccagcggcucugcuuguucgugugugugucguugcaggccuuauucaagcuuaccaugggccagaucgugaccuucuuccaggaggucccccacgugaucgaggaggugaugaacaucguccugaucgcccucagcauccuggccgugcugaaggggcucuacaacuucgcgaccugcggccugguggggcuggucacguuccuccugcugugcggccgcuccugcaccaucagccucuacaaggggguguacgagcugcagacccuggagcucaacauggagacccugaacaugacgaugccgcuguccugcaccaagaacaacagccaccacuacaucauggugggcaacgagaccggccucgagcugacccugacgaacaccuccaucaucaaccacaaguucugcaaccucagcgacgcccacaagaagaaccuguacgaccacgcccugauguccaucaucagcaccuuccaccucuccauccccaacuucaaccaguacgaggccaugagcugcgacuucaacgggggcaagaucuccguccaguacaaccugagccacuccuacgccggggacgcggccaaccacugcggcaccguggccaacggggugcugcagacguucaugcggauggccuggggcggcagcuacaucgcgcucgacuccgggcgcgaccggugggacugcaucaugaccagcuaccaguaccugaucauccagaacaccaccugggaggaccacugccaguucucccgccccagccccaucggcuaccuggggcuccugucccagcggacgcgcgacaucuacaucagccggcgccugcucggcaccuucaccuggacccugagcgacuccgagggcaaggacacgcccgggggcuacugccugacccgguggaugcucaucgaggccgagcugaagugcuucgggaacaccgccgucgccaagugcaacgagaagcacgacgaggaguucugcgacaugcugcgccucuucgacuucaacaagcaggccauccagcggcugaaggcgccggcccagaugagcauccagcugaucaacaaggccgugaacgcccucaucaacgaccagcugaucaugaagaaccaccuccgcgacaucaugggcauccccuacugcaacuacuccaaguacugcuaccugaaccacaccacgaccgggaagaccagccugcccaagugcugccugguguccaacggcagcuaccucaacgagacccacuucuccgacgacaucgagcagcaggccgacaacaugaucacggagaugcugcagaaggaguacauggagcggcagggcaagaccccgcuggggcuggucgaccucuucguguucagcaccuccuucuaccugaucagcaucuuccugcaccucgugaagauccccacccaccgccacaucgucggcaagcccugccccaagccgcaccggcugaaccacauggggaucugcuccugcggccuguacaagcagcccggggugcccgugaaguggaagcgcugaggacuaguaauaaggaaacuguaugaaugucugugggcaggaagugaagagauccuucuguaaagguuuuuggaauuaugucugcugaauaauaaacuuuuuugaaauaauaaaucugguagaaaaaugagaucucaaaggcucuuuucagagccaccaaaaaaaaaaaaaaaaaaaaaaaaaaaaaaaaaaaaaaaaaaaaaaaaaaaaaaaaaaaaaaaaaaaaaaaaaaaaaaaaaaaaaaaaaaaaaaaaaaaaa

SEQ ID NO: 32549 - RNA, 1812 nt, Artificial Sequence
  mRNA product Design b-4 (hSL-A100) comprising derived and/or modified sequence from LASV(Josiah;Clade IV)__NP_694870__GPCmut7 (opt4)
aggagagucccgcagucggcguccagcggcucugcuuguucgugugugugucguugcaggccuuauucaagcuuaccaugggccagaucgugaccuucuuccaggaggugccccacgugaucgaggaggugaugaacaucgugcugaucgcccugagcgugcuggccgugcugaagggccuguacaacuucgccaccugcggccuggugggccuggugaccuuccugcugcugugcggcagaagcugcaccaccagccuguacaagggcguguacgagcugcagacccuggagcugaacauggagacccugaacaugaccaugccccugagcugcaccaagaacaacagccaccacuacaucauggugggcaacgagaccggccuggagcugacccugaccaacaccagcaucaucaaccacaaguucugcaaccugagcgacgcccacaagaagaaccuguacgaccacgcccugaugagcaucaucagcaccuuccaccugagcauccccaacuucaaccaguacgaggccaugagcugcgacuucaacggcggcaagaucagcgugcaguacaaccugagccacagcuacgccggcgacgccgccaaccacugcggcaccguggccaacggcgugcugcagaccuucaugagaauggccuggggcggcagcuacaucgcccuggacagcggcagaggcaacugggacugcaucaugaccagcuaccaguaccugaucauccagaacaccaccugggaggaccacugccaguucagcagacccagccccaucggcuaccugggccugcugagccagagaaccagagacaucuacaucagcagaagacugcugggcaccuucaccuggacccugagcgacagcgagggcaaggacacccccggcggcuacugccugaccagauggaugcugaucgaggccgagcugaagugcuucggcaacaccgccguggccaagugcaacgagaagcacgacgaggaguucugcgacaugcugagacuguucgacuucaacaagcaggccauccagagacugaaggcccccgcccagaugagcauccagcugaucaacaaggccgugaacgcccugaucaacgaccagcugaucaugaagaaccaccugagagacaucaugggcauccccuacugcaacuacagcaaguacugcuaccugaaccacaccaccaccggcagaaccagccugcccaagugcugccuggugagcaacggcagcuaccugaacgagacccacuucagcgacgacaucgagcagcaggccgacaacaugaucaccgagaugcugcagaaggaguacauggagagacagggcaagaccccccugggccugguggaccuguucguguucagcaccagcuucuaccugaucagcaucuuccugcaccuggugaagauccccacccacagacacaucgugggcaagagcugccccaagccccacagacugaaccacaugggcaucugcagcugcggccuguacaagcagcccggcgugcccgugaaguggaagagaugaggacuaguaauaaggaaacuguaugaaugucugugggcaggaagugaagagauccuucuguaaagguuuuuggaauuaugucugcugaauaauaaacuuuuuugaaauaauaaaucugguagaaaaaugagaucucaaaggcucuuuucagagccaccaaaaaaaaaaaaaaaaaaaaaaaaaaaaaaaaaaaaaaaaaaaaaaaaaaaaaaaaaaaaaaaaaaaaaaaaaaaaaaaaaaaaaaaaaaaaaaaaaaaaa

SEQ ID NO: 32550 - RNA, 1809 nt, Artificial Sequence
  mRNA product Design b-4 (hSL-A100) comprising derived and/or modified sequence from LASV(LP;Clade I)__AAF86701__GPCmut7 (opt4)
aggagagucccgcagucggcguccagcggcucugcuuguucgugugugugucguugcaggccuuauucaagcuuaccaugggccagaucaucaccuucuuccaggaggugccccacgugaucgaggaggugaugaacaucgugcugaucgcccugagccugcuggccauccugaagggccuguacaacaucgccaccugcggcaucaucggccugguggccuuccuguuccugugcggcaagagcugcagccugacccugaagggcggcuacgagcugcagacccuggagcugaacauggagacccugaacaugaccaugccccugagcugcaccaagaacagcagccaccacuacaucagagugggcaacgagaccggccuggagcugacccugaccaacaccagcaucaucaaccacaaguucugcaaccugagcgacgcccacaagaagaaccuguacgaccacgcccugaugagcaucaucagcaccuuccaccugagcauccccaacuucaaccaguacgaggccaugagcugcgacuucaacggcggcaagaucagcgugcaguacaaccugagccacagcuacgccggcgacgccgccgagcacugcggcaccguggccaacggcgugcugcagaccuucaugagaauggccuggggcggcagauacaucgcccuggacagcggcaagggcaacugggacugcaucaugaccagcuaccaguaccugaucauccagaacaccaccugggaggaccacugccaguucagcagacccagccccaucggcuaccugggccugcugagccagagaaccagagacaucuacaucagcagaagacugcugggcaccuucaccuggacccugagcgacagcgagggcaacgagacccccggcggcuacugccugaccagauggaugcugaucgaggccgagcugaagugcuucggcaacaccgccguggccaagugcaacgagaagcacgacgaggaguucugcgacaugcugagacuguucgacuucaacaagcaggccaucagaagacugaaggcccccgcccagaugagcauccagcugaucaacaaggccgugaacgcccugaucaacgaccagcugaucaugaagaaccaccugagagacaucaugggcauccccuacugcaacuacagcaaguacugcuaccugaaccacaccagcagcggcagaaccagccugcccaagugcugccugaucagcaacggcagcuaccugaacgagacccaguucagcgacgacaucgagcagcaggccgacaacaugaucaccgagaugcugcagaaggaguacaucgagagacagggcaagaccccccugggccugguggacaucuucaucuucagcaccagcuucuaccugaucagcaucuuccugcaccugaucaagauccccacccacagacacaucgugggcaagcccugccccaagccccacagacugaaccacaugggcgugugcagcugcggccuguacaagcaccccggcgugcccaccaaguggaagagaugaggacuaguaauaaggaaacuguaugaaugucugugggcaggaagugaagagauccuucuguaaagguuuuuggaauuaugucugcugaauaauaaacuuuuuugaaauaauaaaucugguagaaaaaugagaucucaaaggcucuuuucagagccaccaaaaaaaaaaaaaaaaaaaaaaaaaaaaaaaaaaaaaaaaaaaaaaaaaaaaaaaaaaaaaaaaaaaaaaaaaaaaaaaaaaaaaaaaaaaaaaaaaaaaa

SEQ ID NO: 32551 - RNA, 1809 nt, Artificial Sequence
  mRNA product Design b-4 (hSL-A100) comprising derived and/or modified sequence from LASV(803213;Clade II)__AAF86703__GPCmut7 (opt4)
aggagagucccgcagucggcguccagcggcucugcuuguucgugugugugucguugcaggccuuauucaagcuuaccaugggccagaucaucaccuucuuccaggaggugccccacgugaucgaggaggugaugaacaucgugcugaucgcccugagccugcuggccauccugaagggcaucuacaacguggccaccugcggccuguucggccugaucagcuuccugcugcugugcggcagaagcugcagcgugaccuacaagggcguguacgagcugcagacccuggagcugaacauggccaaccugaacaugaccaugccccugagcugcaccaagaacaacagccaccacuacaucauggugggcaacgagaccggccuggagcugacccugaccaacaccagcaucaucaaccacaaguucugcaaccugagcgacgcccacaagaagaaccuguacgaccacgcccugaugagcaucaucagcaccuuccaccugagcauccccaacuucaaccaguacgaggccaugagcugcgacuucaacggcggcaagaucagcgugcaguacaaccugagccacagcuucgccguggacgccgccaaccacugcggcaccaucgccaacggcgugcugcagaccuucaugagaauggccuggggcggcagcuacaucgcccuggacagcggcaagggcaacugggacugcaucaugaccagcuaccaguaccugaucauccagaacaccaccugggaggaccacugccaguucagcagacccagccccaucggcuaccugggccugcugagccagagaaccagagacaucuacaucagcagaagacugcugggcaccuucaccuggacccugagcgacagcgagggcaacgaggcccccggcggcuacugccugaccagauggaugcugaucgaggccgagcugaagugcuucggcaacaccgccguggccaagugcaacgagaagcacgacgaggaguucugcgacaugcugagacuguucgacuucaacaagcaggccaucaagagacugaagacccccgcccagaugagcauccagcugaucaacaaggccgugaacgcccugaucaacgaccagcugaucaugaagaaccaccugagagacaucaugggcauccccuacugcaacuacagcagauacugcuaccugaaccacaccgugaccggcaagaccagccugcccagaugcugccuggugagcaacggcagcuaccugaacgagacccacuucagcgacgacaucgagcagcaggccgacaacaugaucaccgagaugcugcagaaggaguacauggacagacagggcaagaccccccugggccugguggaccuguucguguucagcaccagcuucuaccugaucagcaucuuccugcaccuggugaagauccccacccacagacacaucgugggcaagcccugccccaagccccacagacugaaccacaugggcaucugcagcugcggccuguacaagcaccccggcgugcccgugaaguggaagagaugaggacuaguaauaaggaaacuguaugaaugucugugggcaggaagugaagagauccuucuguaaagguuuuuggaauuaugucugcugaauaauaaacuuuuuugaaauaauaaaucugguagaaaaaugagaucucaaaggcucuuuucagagccaccaaaaaaaaaaaaaaaaaaaaaaaaaaaaaaaaaaaaaaaaaaaaaaaaaaaaaaaaaaaaaaaaaaaaaaaaaaaaaaaaaaaaaaaaaaaaaaaaaaaaa

SEQ ID NO: 32552 - RNA, 1809 nt, Artificial Sequence
  mRNA product Design b-4 (hSL-A100) comprising derived and/or modified sequence from LASV(GA391;Clade III)__CAA36645__GPCmut7 (opt4)
aggagagucccgcagucggcguccagcggcucugcuuguucgugugugugucguugcaggccuuauucaagcuuaccaugggccagaucgugaccuucuuccaggaggugccccacgugaucgaggaggugaugaacaucgugcugaucgcccugagcauccuggccauccugaagggccuguacaacguggccaccugcggccugaucggccuggugaccuuccugcugcugagcggcagaagcugcagccugaucuacaagggcaccuacgagcugcagacccuggagcugaacauggagacccugaacaugaccaugccccugagcugcaccaagaacaacagccaccacuacaucagagugggcaacgagaccggccuggagcugacccugaccaacaccagcauccugaaccacaaguucugcaaccugagcgacgcccacaagagaaaccuguacgaccacagccugaugagcaucaucagcaccuuccaccugagcauccccaacuucaaccaguacgaggccaugagcugcgacuucaacggcggcaagaucaccgugcaguacaaccugagccacagcuucgccguggacgccgccggccacugcggcacccuggccaacggcgugcugcagaccuucaugagaauggccuggggcggcagcuacaucgcccuggacagcggcagaggcaacugggacugcaucaugaccagcuaccaguaccugaucauccagaacaccaccugggacgaccacugccaguucagcagacccagccccaucggcuaccugggccugcugagccagagaaccagagacaucuacaucagcagaagacugcugggcaccuucaccuggacccugagcgacagcgagggcaacgagacccccggcggcuacugccugaccagauggaugcugaucgaggccgagcugaagugcuucggcaacaccgccguggccaagugcaacgagaagcacgacgaggaguucugcgacaugcugagacuguucgacuucaacaagcaggccaucagaagacugaagacccccgcccagaugagcauccagcugaucaacaaggccgugaacgcccugaucaacgaccagcugaucaugaagaaccaccugagagacaucaugggcauccccuacugcaacuacagcagauacugcuaccugaaccacaccagcaccggcaagaccagccugcccagaugcugccugaucagcaacggcagcuaccugaacgagaccaaguucagcgacgacaucgagcagcaggccgacaacaugaucaccgagaugcugcagaaggaguacaucgacagacagggcaagaccccccugggccugguggaccuguucguguucagcaccagcuucuaccugaucagcaucuuccugcaccuggugaagauccccacccacagacacaucgugggcaagcccugccccaagccccacagacugaaccacaugggcaucugcagcugcggccuguacaagcagcccggcgugcccgugagauggaagagaugaggacuaguaauaaggaaacuguaugaaugucugugggcaggaagugaagagauccuucuguaaagguuuuuggaauuaugucugcugaauaauaaacuuuuuugaaauaauaaaucugguagaaaaaugagaucucaaaggcucuuuucagagccaccaaaaaaaaaaaaaaaaaaaaaaaaaaaaaaaaaaaaaaaaaaaaaaaaaaaaaaaaaaaaaaaaaaaaaaaaaaaaaaaaaaaaaaaaaaaaaaaaaaaaa

SEQ ID NO: 32553 - RNA, 1812 nt, Artificial Sequence
  mRNA product Design b-4 (hSL-A100) comprising derived and/or modified sequence from LASV(AV;Clade V)__CCA30314__GPCmut7 (opt4)
aggagagucccgcagucggcguccagcggcucugcuuguucgugugugugucguugcaggccuuauucaagcuuaccaugggccagaucgugaccuucuuccaggaggugccccacgugaucgaggaggugaugaacaucgugcugaucgcccugagcauccuggccgugcugaagggccuguacaacaucgccaccugcggccugaucggccugaucaccuuccugcugcugugcggcagaagcugcagcagcaaccuguacaagggcguguacgagcugcagagccuggaccugaacauggagacccugaacaugaccaugccccugagcugcaccaagaacaacagccaccacuacaucagagugggcaacgacaccggccuggagcugacccugaccaacaccagcauccugaaccacaaguucugcaaccugagcgacgcccacaagaaggaccuguacgaccacgcccugaugagcaucaucagcaccuuccaccugagcauccccaacuucaaccaguacgaggccaugagcugcgacuucaacggcggcaagaucagcgugcaguacaaccugagccacagcuacgccaucgacgccgccaaccacugcggcaccguggccaacggcauccugcagaccuucaugagaauggccuggggcggcagcuacaucgcccuggacagcggcagaggcaacugggacugcaucaugaccagcuaccaguaccugaucauccagaacaccaccugggagaaccacugccaguucagcagacccagccccaucggcuaccugggccugcugagccagagaaccagagacaucuacaucagcagaagacugcugggcaccuucaccuggacccugagcgacagcgagggcaacgccacccccggcggcuacugccugaccagauggaugcugaucgaggccgagcugaagugcuucggcaacaccgccguggccaagugcaacgagaagcacgacgaggaguucugcgacaugcugagacuguucgacuucaacaagcaggccaucagcagacugaagagccccgcccagaugagcauccagcugaucaacaaggccgugaacgcccugaucaacgaccagcugaucaugaagaaccaccugagagacaucaugggcauccccuacugcaacuacagcaaguacugcuaccugaaccacaccaucaccggcaagaccagccugcccaagugcugccuggugagcaacggcagcuaccugaacgagacccacuucagcgacgacaucgagcagcaggccgacaacaugaucaccgagaugcugcagaaggaguacauggagagacagggcaagaccccccugggccugguggaccuguucguguucagcaccagcuucuaccugaucagcaucuuccugagacuggugaagauccccacccacagacacaucgugggcaagcccugccccaagccccacagacugaaccacaugggcaucugcagcugcggccuguacaagcagcccggcgugcccgugagauggaagagaugaggacuaguaauaaggaaacuguaugaaugucugugggcaggaagugaagagauccuucuguaaagguuuuuggaauuaugucugcugaauaauaaacuuuuuugaaauaauaaaucugguagaaaaaugagaucucaaaggcucuuuucagagccaccaaaaaaaaaaaaaaaaaaaaaaaaaaaaaaaaaaaaaaaaaaaaaaaaaaaaaaaaaaaaaaaaaaaaaaaaaaaaaaaaaaaaaaaaaaaaaaaaaaaaa

SEQ ID NO: 32554 - RNA, 1809 nt, Artificial Sequence
  mRNA product Design b-4 (hSL-A100) comprising derived and/or modified sequence from LASV(Togo/2016/7082;Clade VI)__AMR44577__GPCmut7 (opt4)
aggagagucccgcagucggcguccagcggcucugcuuguucgugugugugucguugcaggccuuauucaagcuuaccaugggccagaucaucaccuucuuccaggaggugccccacgugaucgaggaggugaugaacaucgugcugaucgcccugagccugcuggccauccugaagggcguguacaacguggccaccugcggcaucaucggccuggugaccuuccuguuccugugcggcagaagcugcagccugaucuacaagggcagcuacgagcugcagacccuggagcugaacauggagacccugaacaugaccaugccccugagcugcaccaagaacagcagccaccacuacaucagagugggcaacgagaccggccuggagcugacccugaccaacaccagcaucaucaaccacaaguucugcaaccugagcgacgcccacaagagaaaccuguacgaccacgcccugaugagcauccugagcaccuuccaccugagcauccccaacuucaaccaguacgaggccaugagcugcgacuucaacggcggcaagaucagcgugcaguacaaccugagccacgccuacgccguggacgccgccgagcacugcggcaccguggccaacggcgugcugcagaccuucaugagaauggccuggggcggcagcuacaucgcccuggacagcggcagaggcaacugggacugcaucaugaccagcuaccaguaccugaucauccagaacaccaccugggaggaccacugccaguucagcagacccagccccaucggcuaccugggccugcugagccagagaaccagagacaucuacaucagcagaagacugcugggcaccuucaccuggacccugagcgacagcgagggcaacgagacccccggcggcuacugccugaccagauggaugcugaucgaggccgagcugaagugcuucggcaacaccgccguggccaagugcaacgagaagcacgacgaggaguucugcgacaugcugagacuguucgacuucaacaagcaggccauccagagacugaagagccccgcccagaugagcauccagcugaucaacaaggccgugaacgcccugaucaacgaccagcugaucaugaagaaccaccugagagacaugaugggcauccccuacugcaacuacagcaaguacugcuaccugaaccacaccagcagcggcagaaccagccugcccaagugcugccuggugagcaacggcagcuaccugaacgagacccacuucagcgacgacaucgagcagcaggccgacaacaugaucaccgagaugcugcagaaggaguacaucgacagacagggcaagaccccccugggccugguggaccuguucguguucagcaccagcuucuaccugaucagcaucuuccugcaccugaucaagauccccacccacagacacaucgugggcaagcccugccccaagccccacagacugaaccacaugggcaucugcagcugcggccuguacaagcagcccggcgugcccaccagauggaagagaugaggacuaguaauaaggaaacuguaugaaugucugugggcaggaagugaagagauccuucuguaaagguuuuuggaauuaugucugcugaauaauaaacuuuuuugaaauaauaaaucugguagaaaaaugagaucucaaaggcucuuuucagagccaccaaaaaaaaaaaaaaaaaaaaaaaaaaaaaaaaaaaaaaaaaaaaaaaaaaaaaaaaaaaaaaaaaaaaaaaaaaaaaaaaaaaaaaaaaaaaaaaaaaaaa

SEQ ID NO: 32555 - RNA, 1809 nt, Artificial Sequence
  mRNA product Design b-4 (hSL-A100) comprising derived and/or modified sequence from LASV(KAK-428;Clade n.d. (VII))__ANH09740__GPCmut7 (opt4)
aggagagucccgcagucggcguccagcggcucugcuuguucgugugugugucguugcaggccuuauucaagcuuaccaugggccagaucgugaccuucuuccaggaggugccccacgugaucgaggaggugaugaacaucgugcugaucgcccugagccugcuggccauccugaagggccuguacaacuucgccaccugcggcgugaucggccugaucaccuuccugcugcugugcggcagaagcugcagcgccaccuacaagggccaguacgagcugcagacccuggagcugaacauggagagccugaacaugaccaugccccugagcugcaccaagaacaacagccaccacuacaucagagccggcaacaacaccggccuggagcugacccugaccaacaccagcaucaucagccacaaguucugcaaccugagcgacgcccacaagaagaaccuguacgaccacacccugaugagcaucaucaccaccuuccaccugagcauccccaacuucaaccaguacgaggccaugagcugcgacuucaacggcggcaagaucagcauccaguacaaccugagccacagcuacgccggcgacgccgcccagcacugcggcaccguggccaacggcgugcugcagaccuucaugagaauggccuggggcggcagcuaccuggcccuggacagcggcagaagaggcugggacugcaucaucagcagcuaccaguaccugaucauccagaacaccaccugggacgaccacugccaguucagcagacccagccccaucggcuaccugggcuucgugagccagaagaccagagacaucuacaucagcagaagacugcugggcaccuucaccuggacccugagcgacagcgagggccacgacaugcccggcggcuacugccugaccagauggaugcugaucgaggccgaccugaagugcuucggcaacaccgccguggccaagugcaacgagaagcacgacgaggaguucugcgacauguggagacuguucgacuucaacaagcaggccauccagagacugaaggcccccgcccagaugaacauccagcugaucaacaaggccgugaacgcccugaucaacgaccagcugaugaugaagaaccaccugagagacaucaugggcauccccuacugcaacuacagcaaguucugcuaccugaacaacaccaccaccggcagaaccagccugcccagaugcugccugaucagcaacggcagcuaccugaacgagacccacuucagcgacgacaucgagcagcaggccgacaacaugaucaccgagaugcugcagaaggaguacauggacagacagggcaagaccccccugggccugguggaccuguucguguucagcaccagcuucuaccugaucaccaucuuccugcaccuggugaagauccccacccacagacacaucgugggcaagcccugccccaagccccacagacugaaccacaugggcaucugcagcugcggccuguacaagcagcccggcgugcccgugagauggaagagaugaggacuaguaauaaggaaacuguaugaaugucugugggcaggaagugaagagauccuucuguaaagguuuuuggaauuaugucugcugaauaauaaacuuuuuugaaauaauaaaucugguagaaaaaugagaucucaaaggcucuuuucagagccaccaaaaaaaaaaaaaaaaaaaaaaaaaaaaaaaaaaaaaaaaaaaaaaaaaaaaaaaaaaaaaaaaaaaaaaaaaaaaaaaaaaaaaaaaaaaaaaaaaaaaa

SEQ ID NO: 32556 - RNA, 1809 nt, Artificial Sequence; identical to SEQ ID NO: 32550
  mRNA product Design b-4 (hSL-A100) comprising derived and/or modified sequence from LASV(Pinneo-NIG-1969;Clade I)__AIT17836__GPCmut7 (opt4)

SEQ ID NO: 32557 - RNA, 1809 nt, Artificial Sequence
  mRNA product Design b-4 (hSL-A100) comprising derived and/or modified sequence from LASV(ISTH0009-NIG-2011;Clade II)__AIT17404__GPCmut7 (opt4)
aggagagucccgcagucggcguccagcggcucugcuuguucgugugugugucguugcaggccuuauucaagcuuaccaugggccagaucaucaccuucuuccaggaggugccccacgugaucgaggaggugaugaacaucgugcugaucgcccugagccugcuggccauccugaagggcaucuacaacguggccaccugcggccuguucggccuggugagcuuccugcugcugugcggcagaagcugcagcaccaccuacaagggcguguacgagcugcagacccuggagcuggacauggccagccugaacaugaccaugccccugagcugcaccaagaacaacagccaccacuacaucauggugggcaacgagaccggccuggagcugacccugaccaacaccagcaucaucaaccacaaguucugcaaccugagcgacgcccacaagaagaaccuguacgaccacgcccugaugagcaucaucagcaccuuccaccugagcauccccaacuucaaccaguacgaggccaugagcugcgacuucaacggcggcaagaucagcgugcaguacaaccugagccacgccuacgccguggacgccgccaaccacugcggcaccaucgccaacggcgugcugcagaccuucaugagaauggccuggggcggcagcuacaucgcccuggacagcggcaagggcagcugggacugcaucaugaccagcuaccaguaccugaucauccagaacaccaccugggaggaccacugccaguucagcagacccagccccaucggcuaccugggccugcugagccagagaaccagagacaucuacaucagcagaagacugcugggcaccuucaccuggacccugagcgacagcgagggcaacgagacccccggcggcuacugccugaccagauggaugcugaucgaggccgagcugaagugcuucggcaacaccgccguggccaagugcaacgagaagcacgacgaggaguucugcgacaugcugagacuguucgacuucaacaagcaggccaucagaagacugaagacccccgcccagaugagcauccagcugaucaacaaggccgugaacgcccugaucaacgaccagcugaucaugaagaaccaccugagagacaucaugggcauccccuacugcaacuacagcaaguacugcuaccugaaccacaccgugaccggcaagaccagccugcccagaugcugccuggugagcaacggcagcuaccugaacgagacccacuucagcgacgacaucgagcagcaggccgacaacaugaucaccgagcugcugcagaaggaguacauggacagacagggcaagaccccccugggccugguggaccuguucguguucagcaccagcuucuaccugaucagcaucuuccugcaccugaucaagauccccacccacagacacaucaccggcaagcccugccccaagccccacagacugaaccacaugggcaucugcagcugcggccuguacaagcaccccggcgugcccgugaaguggaagagaugaggacuaguaauaaggaaacuguaugaaugucugugggcaggaagugaagagauccuucuguaaagguuuuuggaauuaugucugcugaauaauaaacuuuuuugaaauaauaaaucugguagaaaaaugagaucucaaaggcucuuuucagagccaccaaaaaaaaaaaaaaaaaaaaaaaaaaaaaaaaaaaaaaaaaaaaaaaaaaaaaaaaaaaaaaaaaaaaaaaaaaaaaaaaaaaaaaaaaaaaaaaaaaaaa

SEQ ID NO: 32558 - RNA, 1809 nt, Artificial Sequence
  mRNA product Design b-4 (hSL-A100) comprising derived and/or modified sequence from LASV(ISTH2010-NIG-2012;Clade II)__AIT17482__GPCmut7 (opt4)
aggagagucccgcagucggcguccagcggcucugcuuguucgugugugugucguugcaggccuuauucaagcuuaccaugggccagaucaucaccuucuuccaggaggugccccacgugaucgaggaggugaugaacaucgugcugaucgcccugagccugcuggccauccugaagggcaucuacaacguggccaccugcggccuguucggccuggugagcuuccugcugcugugcggcagaagcugcagcaccaccuacaagggcguguacgagcugcagacccuggagcuggacauggccagccugaacaugaccaugccccugagcugcaccaagaacaacagccaccacuacaucauggugggcaacgagaccggccuggagcugacccugaccaacaccagcaucaucaaccacaaguucugcaaccugagcgacgcccacaagaagaaccuguacgaccacgcccugaugagcaucaucagcaccuuccaccugagcauccccaacuucaaccaguacgaggccaugagcugcgacuucaacggcggcaagaucagcgugcaguacaaccugagccacgccuacgccguggacgccgccaaccacugcggcaccaucgccaacggcgugcugcagaccuucaugagaauggccuggggcggcagcuacaucgcccuggacagcggcaagggcagcugggacugcaucaugaccagcuaccaguaccugaucauccagaacaucaccugggaggaccacugccaguucagcagacccagccccaucggcuaccugggccugcugagccagagaaccagagacaucuacaucagcagaagacugcugggcaccuucaccuggacccugagcgacagcgagggcaacgagacccccggcggcuacugccugaccagauggaugcugaucgaggccgagcugaagugcuucggcaacaccgccguggccaagugcaacgagaagcacgacgaggaguucugcgacaugcugagacuguucgacuucaacaagcaggccaucagaagacugaagacccccgcccagaugagcauccagcugaucaacaaggccgugaacgcccugaucaacgaccagcugaucaugaagaaccaccugagagacaucaugggcauccccuacugcaacuacagcaaguacugcuaccugaaccacaccgugaccggcaagaccagccugcccagaugcugccuggugagcaacggcagcuaccugaacgagacccacuucagcgacgacaucgagcagcaggccgacaacaugaucaccgagcugcugcagaaggaguacaucgacagacagggcaagaccccccugggccugguggaccuguucguguucagcaccagcuucuaccugaucagcaucuuccugcaccuggugaagauccccacccacagacacguggugggcaagcccugccccaagccccacagacugaaccacaugggcaucugcagcugcggccuguacaagcaccccggcgugcccgugaaguggaagagaugaggacuaguaauaaggaaacuguaugaaugucugugggcaggaagugaagagauccuucuguaaagguuuuuggaauuaugucugcugaauaauaaacuuuuuugaaauaauaaaucugguagaaaaaugagaucucaaaggcucuuuucagagccaccaaaaaaaaaaaaaaaaaaaaaaaaaaaaaaaaaaaaaaaaaaaaaaaaaaaaaaaaaaaaaaaaaaaaaaaaaaaaaaaaaaaaaaaaaaaaaaaaaaaaa

SEQ ID NO: 32559 - RNA, 1809 nt, Artificial Sequence
  mRNA product Design b-4 (hSL-A100) comprising derived and/or modified sequence from LASV(Lassa virus/H.sapiens-wt/NGA/2015/ISTH_0543;Clade II)__AVO03639__GPCmut7 (opt4)
aggagagucccgcagucggcguccagcggcucugcuuguucgugugugugucguugcaggccuuauucaagcuuaccaugggccagaucaucaccuucuuccaggaggugccccacgugaucgaggaggugaugaacaucgugcugaucgcccugagccugcuggccauccugaagggcaucuacaacguggccaccugcggccuguucggccuggugagcuuccugcugcugugcggcagaagcugcagcaccaccuacaagggcguguacgagcugcagacccuggagcuggacauggccaaccugaacaugaccaugccccugagcugcaccaagaacaacagccaccacuacaucauggugggcaacgagaccggccuggagcugacccugaccaacaccagcaucaucaaccacaaguucugcaaccugagcgacgcccacaagaagaaccuguacgaccacgcccugaugagcaucaucagcaccuuccaccugagcauccccaacuucaaccaguacgaggccaugagcugcgacuucaacggcggcaagaucagcgugcaguacaaccugagccacaccuacgccguggacgccgccaaccacugcggcaccaucgccaacggcgugcugcagaccuucaugagaauggccuggggcggcagcuacaucgcccuggacagcggcaagggcagcugggacugcaucaugaccagcuaccaguaccuggugauccagaacaccaccugggaggaccacugccaguucagcagacccagccccaucggcuaccugggccugcugagccagagaaccagagacaucuacaucagcagaagacugcugggcaccuucaccuggacccugagcgacagcgagggcaacgagacccccggcggcuacugccugaccagauggaugcugaucgaggccgagcugaagugcuucggcaacaccgccguggccaagugcaacgagaagcacgacgaggaguucugcgacaugcugagacuguucgacuucaacaagcaggccaucagaagacugaagacccccgcccagaugagcauccagcugaucaacaaggccgugaacgcccugaucaacgaccagcugaucaugaagaaccaccugagagacaucaugggcauccccuacugcaacuacagcaaguacugcuaccugaaccacaccgugaccggcaagaccagccugcccagaugcugccuggugagcaacggcagcuaccugaacgagacccacuucagcgacgacaucgagcagcaggccgacaacaugaucaccgagcugcugcagaaggaguacaucgacagacagggcaagaccccccugggccugguggaccuguucguguucagcaccagcuucuaccugaucagcaucuuccugcaccuggugaagauccccacccacagacacaucaccggcaagcccugccccaagccccacagacugaaccacaugggcaucugcagcugcggccuguacaagcaccccggcgugcccgugaaguggaagagaugaggacuaguaauaaggaaacuguaugaaugucugugggcaggaagugaagagauccuucuguaaagguuuuuggaauuaugucugcugaauaauaaacuuuuuugaaauaauaaaucugguagaaaaaugagaucucaaaggcucuuuucagagccaccaaaaaaaaaaaaaaaaaaaaaaaaaaaaaaaaaaaaaaaaaaaaaaaaaaaaaaaaaaaaaaaaaaaaaaaaaaaaaaaaaaaaaaaaaaaaaaaaaaaaa

SEQ ID NO: 32560 - RNA, 1809 nt, Artificial Sequence
  mRNA product Design b-4 (hSL-A100) comprising derived and/or modified sequence from LASV(Lassa virus/H.sapiens-wt/NGA/2016/ISTH_0009;Clade II)__AVO03571__GPCmut7 (opt4)
aggagagucccgcagucggcguccagcggcucugcuuguucgugugugugucguugcaggccuuauucaagcuuaccaugggccagaucaucaccuucuuccaggaggugccccacgugaucgaggaggugaugaacaucgugcugaucgcccugagccugcuggccauccugaagggcaucuacaacguggccaccugcggccugcugggccuggugagcuuccugcugcugugcggcagaagcugcagcaccaccuacaagggcguguacgagcugcagacccuggagcuggacauggccagccugaacaugaccaugccccugagcugcaccaagaacaacagccaccacuacaucauggugggcaacgagaccggccuggagcugacccugaccaacaccagcaucaucaaccacaaguucugcaaccugagcgacgcccacaagaagaaccuguacgaccacgcccugaugagcaucaucagcaccuuccaccugagcauccccaacuucaaccaguacgaggccaugagcugcgacuucaacggcggcagaaucagcgugcaguacaaccugagccacagcuacgccguggacgccgccaaccacugcggcaccaucgccaacggcgugcugcagaccuucaugagaauggccuggggcggcagcuacaucgcccuggacagcggcaagggcagcugggacugcaucaugaccagcuaccaguaccugaucauccagaacaccaccugggaggaccacugccaguucagcagacccagccccaucggcuaccugggccugcugagccagagaaccagagacaucuacaucagcagaagacugcugggcaccuucaccuggacccugagcgacagcgagggcaacgagacccccggcggcuacugccugaccagauggaugcugaucgaggccgagcugaagugcuucggcaacaccgccguggccaagugcaacgagaagcacgacgaggaguucugcgacaugcugagacuguucgacuucaacaagcaggccaucagaagacugaagacccccgcccagaugagcauccagcugaucaacaaggccgugaacgcccugaucaacgaccagcugaucaugaagaaccaccugagagacaucaugggcauccccuacugcaacuacagcaaguacugcuaccugaaccacaccgugaccggcaagaccagccugcccagaugcugccuggugagcaacggcagcuaccugaacgagacccacuucagcgacgacaucgagcagcaggccgacaacaugaucaccgagcugcugcagaaggaguacaucgacagacagggcaagaccccccugggccugguggaccuguucguguucagcaccagcuucuaccugaucagcaucuuccugcaccuggugaagauccccacccacagacacaucaccggcaagcccugccccaagccccacagacugaaccacaugggcaucugcagcugcggccuguacaaccaccccggcgugcccgugaaguggaagagaugaggacuaguaauaaggaaacuguaugaaugucugugggcaggaagugaagagauccuucuguaaagguuuuuggaauuaugucugcugaauaauaaacuuuuuugaaauaauaaaucugguagaaaaaugagaucucaaaggcucuuuucagagccaccaaaaaaaaaaaaaaaaaaaaaaaaaaaaaaaaaaaaaaaaaaaaaaaaaaaaaaaaaaaaaaaaaaaaaaaaaaaaaaaaaaaaaaaaaaaaaaaaaaaaa

SEQ ID NO: 32561 - RNA, 1809 nt, Artificial Sequence
  mRNA product Design b-4 (hSL-A100) comprising derived and/or modified sequence from LASV(Lassa virus/H.sapiens-wt/NGA/2016/ISTH_0017;Clade II)__AVO03567__GPCmut7 (opt4)
aggagagucccgcagucggcguccagcggcucugcuuguucgugugugugucguugcaggccuuauucaagcuuaccaugggccagaucaucaccuucuuccaggaggugccccacgugaucgaggaggugaugaacaucgugcugaucgcccugagccugcuggccauccugaagggcaucuacaacguggccaccugcggccuguucggccuggugagcuuccugcugcugugcggcagaagcugcagcaccaccuacaagggcguguacgagcugcagacccuggagcuggacauggccagccugaacaugaccaugccccugagcugcaccaagaacaacagccaccacuacaucauggugggcaacgagaccggccuggagcugacccugaccaacaccagcaucaucaaccacaaguucugcaaccugagcgacgcccacaagaagaaccuguacgaccacgcccugaugagcaucaucagcaccuuccaccugagcauccccaacuucaaccaguacgaggccaugagcugcgacuucaacggcggcaagaucagcgugcaguacaaccugagccacaccuacgccaucgacgccgccaaccacugcggcaccaucgccaacggcgugcugcagaccuucaugagaauggccuggggcggcagcuacaucgcccuggacagcggcaagggcagcugggacugcaucaugaccagcuaccaguaccugaucauccagaacaccaccugggaggaccacugccaguucagcagacccagccccaucggcuaccugggccugcugagccagagaaccagagacaucuacaucagcagaagacugcugggcaccuucaccuggacccugagcgacagcgagggcaacgagacccccggcggcuacugccugaccagauggaugcugaucgaggccgagcugaagugcuucggcaacaccgccguggccaagugcaacgagaagcacgacgaggaguucugcgacaugcugagacuguucgacuucaacaagcaggccaucagaagacugaagacccccgcccagaugagcauccagcugaucaacaaggccgugaacgcccugaucaacgaccagcugaucaugaagaaccaccugagagacaucaugggcauccccuacugcaacuacagcaaguacugcuaccugaaccacaccgugaccggcaagaccagccugcccagaugcugccuggugagcaacggcagcuaccugaacgagacccacuucagcgacgacaucgagcagcaggccgacaacaugaucaccgagcugcugcagaaggaguacauggacagacagggcaagaccccccugggccugguggaccuguucguguucagcaccagcuucuaccugaucagcaucuuccugcaccuggugagaauccccacccacagacacgugaucggcaagcccugccccaagccccacagacugaaccacaugggcaucugcagcugcggccuguacaagcaccccggcgugcccgugaaguggaagagaugaggacuaguaauaaggaaacuguaugaaugucugugggcaggaagugaagagauccuucuguaaagguuuuuggaauuaugucugcugaauaauaaacuuuuuugaaauaauaaaucugguagaaaaaugagaucucaaaggcucuuuucagagccaccaaaaaaaaaaaaaaaaaaaaaaaaaaaaaaaaaaaaaaaaaaaaaaaaaaaaaaaaaaaaaaaaaaaaaaaaaaaaaaaaaaaaaaaaaaaaaaaaaaaaa

SEQ ID NO: 32562 - RNA, 1809 nt, Artificial Sequence
  mRNA product Design b-4 (hSL-A100) comprising derived and/or modified sequence from LASV(Lassa virus/H.sapiens-wt/NGA/2018/ISTH_0959;Clade II)__AVV65099__GPCmut7 (opt4)
aggagagucccgcagucggcguccagcggcucugcuuguucgugugugugucguugcaggccuuauucaagcuuaccaugggccagaucaucaccuucuuccaggaggugccccacgugaucgaggaggugaugaacaucgugcugaucgcccugagccugcuggccauccugaagggcaucuacaacguggugaccugcggccuguucggccuggugagcuuccugcugcugugcggcagaagcugcagcaccaccuacaagggcguguacgagcugcagacccuggagcuggacauggccagccugaacaugaccaugccccugagcugcaccaagaacaacagccaccacuacaucauggugggcaacgagaccggccuggagcugacccugaccaacaccagcaucaucaaccacaaguucugcaaccugagcgacgcccacaagaagaaccuguacgaccacgcccugaugagcaucaucagcaccuuccaccugagcauccccaacuucaaccaguacgaggccaugagcugcgacuucaacggcggcaagaucagcgugcaguacaaccugagccacgccuacgccaucgacgccgccaaccacugcggcaccaucgccaacggcgugcugcagaccuucaugagaauggccuggggcggcagcuacaucgcccuggacagcggcaagggcagcugggacugcaucaugaccagcuaccaguaccugaucauccagaacaccaccugggaggaccacugccaguucagcagacccagccccaucggcuaccugggccugcugagccagagaaccagagacaucuacaucagcagaagacugcugggcaccuucaccuggacccugagcgacagcgagggcaacgagacccccggcggcuacugccugaccagauggaugcugaucgaggccgagcugaagugcuucggcaacaccgccguggccaagugcaacgagaagcacgacgaggaguucugcgacaugcugagacuguucgacuucaacaagcaggccaucagaagacugaagacccccgcccagaugagcauccagcugaucaacaaggccgugaacgcccugaucaacgaccagcugaucaugaagaaccaccugagagacaucaugggcauccccuacugcaacuacagcaaguacugcuaccugaaccacaccgugaccggcaagaccagccugcccagaugcugccuggugagcaacggcagcuaccugaacgagacccacuucagcgacgacaucgagcagcaggccgacaacaugaucaccgagcugcugcagaaggaguacaucgacagacagggcaagaccccccugggccugguggaccuguucguguucagcaccagcuucuaccugaucagcaucuuccugcaccuggugaagauccccacccacagacacgugaucggcaagcccugccccaagccccacagacugaaccacaugggcaucugcagcugcggccuguacaagcaccccggcgugcccgugaaguggaagagaugaggacuaguaauaaggaaacuguaugaaugucugugggcaggaagugaagagauccuucuguaaagguuuuuggaauuaugucugcugaauaauaaacuuuuuugaaauaauaaaucugguagaaaaaugagaucucaaaggcucuuuucagagccaccaaaaaaaaaaaaaaaaaaaaaaaaaaaaaaaaaaaaaaaaaaaaaaaaaaaaaaaaaaaaaaaaaaaaaaaaaaaaaaaaaaaaaaaaaaaaaaaaaaaaa

SEQ ID NO: 32563 - RNA, 1809 nt, Artificial Sequence
  mRNA product Design b-4 (hSL-A100) comprising derived and/or modified sequence from LASV(LASV003-NIG-2008;Clade II)__AIT17580__GPCmut7 (opt4)
aggagagucccgcagucggcguccagcggcucugcuuguucgugugugugucguugcaggccuuauucaagcuuaccaugggccagaucaucaccuucuuccaggaggugccccacgugaucgaggaggugaugaacaucgugcugaucgcccugagccugcuggccauccugaagggcaucuacaacguggccaccugcggccuguucggccuggugagcuuccugcugcugugcggcagaagcugcagcaccaccuacaagggcguguacgagcugcagacccuggagcuggacauggccagccugaacaugaccaugccccugagcugcaccaagaacaacagccaccacuacaucauggugggcaacgagaccggccuggagcugacccugaccaacaccagcaucaucaaccacaaguucugcaaccugagcgacgcccacaagaagaaccuguacgaccacgcccugaugagcaucaucagcaccuuccaccugagcauccccaacuucaaccaguacgaggccaugagcugcgacuucaacggcggcaagaucagcgugcaguacaaccugagccacaccuacgccguggacgccgccaaccacugcggcaccaucgccaacggcgugcugcagaccuucaugagaauggccuggggcggcagcuacaucgcccuggacagcggcaagggcagcugggacugcaucaugaccagcuaccaguaccugaucauccagaacaccaccugggaggaccacugccaguucagcagacccagccccaucggcuaccugggccugcugagccagagaaccagagacaucuacaucagcagaagacugcugggcaccuucaccuggacccugagcgacagcgagagcaacgagacccccggcggcuacugccugaccagauggaugcugaucgaggccgagcugaagugcuucggcaacaccgccguggccaagugcaacgagaagcacgacgaggaguucugcgacaugcugagacuguucgacuucaacaagcaggccaucagaagacugaaggcccccgcccagaugagcauccagcugaucaacaaggccgugaacgcccugaucaacgaccagcugaucaugaagaaccaccugagagacaucaugggcauccccuacugcaacuacagcaaguacugcuaccugaaccacaccgugaccggcagaaccagccugcccagaugcugccuggugagcaacggcagcuaccugaacgagacccacuucagcgacgacaucgagcagcaggccgacaacaugaucaccgagcugcugcagaaggaguacauggacagacagggcaagaccccccugggccugguggaccuguucguguucagcaccagcuucuaccugaucagcaucuuccugcaccuggugaagauccccacccacagacacgugaucggcaagcccugccccaagccccacagacugaaccacaugggcaucugcagcugcggccuguacaagcaccccggcgugcccgugaaguggaagagaugaggacuaguaauaaggaaacuguaugaaugucugugggcaggaagugaagagauccuucuguaaagguuuuuggaauuaugucugcugaauaauaaacuuuuuugaaauaauaaaucugguagaaaaaugagaucucaaaggcucuuuucagagccaccaaaaaaaaaaaaaaaaaaaaaaaaaaaaaaaaaaaaaaaaaaaaaaaaaaaaaaaaaaaaaaaaaaaaaaaaaaaaaaaaaaaaaaaaaaaaaaaaaaaaa

SEQ ID NO: 32564 - RNA, 1809 nt, Artificial Sequence
  mRNA product Design b-4 (hSL-A100) comprising derived and/or modified sequence from LASV(LASV035-NIG-2009;Clade II)__AIT17588__GPCmut7 (opt4)
aggagagucccgcagucggcguccagcggcucugcuuguucgugugugugucguugcaggccuuauucaagcuuaccaugggccagaucaucaccuucuuccaggaggugccccacgugaucgaggaggugaugaacaucgugcugaucgcccugagccugcuggccauccugaagggcaucuacaacguggccaccugcggccuguucggccuggugagcuuccugcugcugugcggcagaagcugcagcaccaccuacaagggcguguacgagcugcagacccuggagcuggacauggccagccugaacaugaccaugccccugagcugcaccaagaacaacagccaccacuacaucauggugggcaacgagaccggccuggagcugacccugaccaacaccagcaucaucaaccacaaguucugcaaccugagcgacgcccacaagaagaaccuguacgaccacgcccugaugagcaucaucagcaccuuccaccugagcauccccaacuucaaccaguacgaggccaugagcugcgacuucaacggcggcaagaucagcgugcaguacaaccugagccacgccuacgccguggacgccgccaaccacugcggcaccaucgccaacggcgugcugcagaccuucaugagaauggccuggggcggcagcuacaucgcccuggacagcggcaagggcagcugggacugcaucaugaccagcuaccaguaccugaucauccagaacaccaccugggaggaccacugccaguucagcagacccagccccaucggcuaccugggccugcugagccagagaaccagagacaucuacaucagcagaagacugcugggcaccuucaccuggacccugagcgacagcgagggcaacgagacccccggcggcuacugccugaccagauggaugcugaucgaggccgagcugaagugcuucggcaacaccgccguggccaagugcaacgagaagcacgacgaggaguucugcgacaugcugagacuguucgacuucaacaagcaggccaucagaagacugaaggcccccgcccagaugagcauccagcugaucaacaaggccgugaacgcccugaucaacgaccagcugaucaugaagaaccaccugagagacaucaugggcauccccuacugcaacuacagcaaguacugcuaccugaaccacaccgugaccggcaagaccagccugcccagaugcugccuggugagcaacggcagcuaccugaacgagacccacuucagcgacgacaucgagcagcaggccgacaacaugaucaccgagcugcugcagaaggaguacaucgacagacagggcaagaccccccugggccugguggaccuguucguguucagcaccagcuucuaccugaucagcaucuuccugcaccuggugaagauccccacccacagacacgugaucggcaagcccugccccaagccccacagacugaaccacaugggcaucugcagcugcggccuguacaagcaccccggcgugcccgugaaguggaagagaugaggacuaguaauaaggaaacuguaugaaugucugugggcaggaagugaagagauccuucuguaaagguuuuuggaauuaugucugcugaauaauaaacuuuuuugaaauaauaaaucugguagaaaaaugagaucucaaaggcucuuuucagagccaccaaaaaaaaaaaaaaaaaaaaaaaaaaaaaaaaaaaaaaaaaaaaaaaaaaaaaaaaaaaaaaaaaaaaaaaaaaaaaaaaaaaaaaaaaaaaaaaaaaaaa

SEQ ID NO: 32565 - RNA, 1809 nt, Artificial Sequence
  mRNA product Design b-4 (hSL-A100) comprising derived and/or modified sequence from LASV(LASV1000-NIG-2009;Clade II)__AIT17782__GPCmut7 (opt4)
aggagagucccgcagucggcguccagcggcucugcuuguucgugugugugucguugcaggccuuauucaagcuuaccaugggccagaucaucaccuucuuccaggaggugccccacgugaucgaggaggugaugaacaucgugcugaucgcccugagccugcuggccauccugaagggcaucuacaacguggccaccugcggccuguucggccuggugagcuuccugcugcugugcggcagaagcugcagcaccaccuacaagggcguguacgagcugcagacccuggagcuggacauggccagccugaacaugaccaugccccugagcugcaccaagaacaacagccaccacuacaucauggugggcaacgagaccggccuggagcugacccugaccaacaccagcaucaucaaccacaaguucugcaaccugagcgacgcccacaagaagaaccuguacgaccacgcccugaugagcaucaucagcaccuuccaccugagcauccccaacuucaaccaguacgaggccaugagcugcgacuucaacggcggcaagaucagcgugcaguacaaccugagccacaccuacgccguggacgccgccaaccacugcggcaccaucgccaacggcgugcugcagaccuucaugagaauggccuggggcggcagcuacaucgcccuggacagcggcaagggcagcugggacugcaucaugaccagcuaccaguaccugaucauccagaacaccaccugggaggaccacugccaguucagcagacccagccccaucggcuaccugggccugcugagccagagaaccagagacaucuacaucagcagaagacugcugggcaccuucaccuggacccugagcgacagcgagggcaacgagacccccggcggcuacugccugaccagauggaugcugaucgaggccgagcugaagugcuucggcaacaccgccguggccaagugcaacgagaagcacgacgaggaguucugcgacaugcugagacuguucgacuucaacaagcaggccaucaagagacugaagacccccgcccagaugagcauccagcugaucaacaaggccgugaacgcccugaucaacgaccagcugaucaugaagaaccaccugagagacaucaugggcauccccuacugcaacuacagcaaguacugcuaccugaaccacaccgugaccggcaagaccagccugcccagaugcugccuggugagcaacggcagcuaccugaacgagacccacuucagcgacgacaucgagcagcaggccgacaacaugaucaccgagcugcugcagaaggaguacaucgacagacagggcaagaccccccugggccugguggaccuguucguguucagcaccagcuucuaccugaucagcaucuuccugcaccuggugaagauccccacccacagacacguggugggcaagcccugccccaagccccacagacugaaccacaugggcaucugcagcugcggccuguacaagcaccccggcgugcccgugaaguggaagagaugaggacuaguaauaaggaaacuguaugaaugucugugggcaggaagugaagagauccuucuguaaagguuuuuggaauuaugucugcugaauaauaaacuuuuuugaaauaauaaaucugguagaaaaaugagaucucaaaggcucuuuucagagccaccaaaaaaaaaaaaaaaaaaaaaaaaaaaaaaaaaaaaaaaaaaaaaaaaaaaaaaaaaaaaaaaaaaaaaaaaaaaaaaaaaaaaaaaaaaaaaaaaaaaaa

SEQ ID NO: 32566 - RNA, 1809 nt, Artificial Sequence
  mRNA product Design b-4 (hSL-A100) comprising derived and/or modified sequence from LASV(LASV221-NIG-2010;Clade II)__AIT17624__GPCmut7 (opt4)
aggagagucccgcagucggcguccagcggcucugcuuguucgugugugugucguugcaggccuuauucaagcuuaccaugggccagaucaucaccuucuuccaggaggugccccacgugaucgaggaggugaugaacaucgugcugaucgcccugagccugcuggccauccugaagggcaucuacaacguggccaccugcggccuguucggccuggugagcuuccugcugcugugcggcagaagcugcagcaccaccuacaagggcguguacgagcugcagacccuggagcuggacauggccagccugaacaugaccaugccccugagcugcaccaagaacaacagccaccacuacaucauggugggcaacgagaccggccuggagcugacccugaccaacaccagcaucaucaaccacaaguucugcaaccugagcgacgcccacaagaagaaccuguacgaccacgcccugaugagcaucaucagcaccuuccaccugagcauccccaacuucaaccaguacgaggccaugagcugcgacuucaacggcggcaagaucagcgugcaguacaaccugagccacaccuacgccaucgacgccgccaaccacugcggcaccaucgccaacggcgugcugcagaccuucaugagaauggccuggggcggcagcuacaucgcccuggacagcggcaagggcagcugggacugcaucaugaccagcuaccaguaccugaucauccagaacaccaccugggaggaccacugccaguucagcagacccagccccaucggcuaccugggccugcugagccagagaaccagagacaucuacaucagcagaagacugcugggcaccuucaccuggacccugagcgacagcgagggcaacgagacccccggcggcuacugccugaccagauggaugcugaucgaggccgagcugaagugcuucggcaacaccgccguggccaagugcaacgagaagcacgacgaggaguucugcgacaugcugagacuguucgacuucaacaagcaggccaucagaagacugaagacccccgcccagaugagcauccagcugaucaacaaggccgugaacgcccugaucaacgaccagcugaucaugaagaaccaccugagagacaucaugggcauccccuacugcaacuacagcaaguacugcuaccugaaccacaccgugaccggcaagaccagccugcccagaugcugccuggugagcaacggcagcuaccugaacgagacccacuucagcgacgacaucgagcagcaggccgacaacaugaucaccgagaugcugcagaaggaguacauggacagacagggcaagaccccccugggccugguggaccuguucguguucagcaccagcuucuaccugaucagcaucuuccugcaccuggugaagauccccacccacagacacgugaucggcaagcccugccccaagccccacagacugaaccacaugggcaucugcagcugcggccuguacaagcaccccggcgugcccgugaaguggaagagaugaggacuaguaauaaggaaacuguaugaaugucugugggcaggaagugaagagauccuucuguaaagguuuuuggaauuaugucugcugaauaauaaacuuuuuugaaauaauaaaucugguagaaaaaugagaucucaaaggcucuuuucagagccaccaaaaaaaaaaaaaaaaaaaaaaaaaaaaaaaaaaaaaaaaaaaaaaaaaaaaaaaaaaaaaaaaaaaaaaaaaaaaaaaaaaaaaaaaaaaaaaaaaaaaa

SEQ ID NO: 32567 - RNA, 1809 nt, Artificial Sequence
  mRNA product Design b-4 (hSL-A100) comprising derived and/or modified sequence from LASV(LASV237-NIG-2010;Clade II)__AIT17638__GPCmut7 (opt4)
aggagagucccgcagucggcguccagcggcucugcuuguucgugugugugucguugcaggccuuauucaagcuuaccaugggccagaucaucaccuucuuccaggaggugccccacgugaucgaggaggugaugaacaucgugcugaucgcccugagccugcuggccauccugaagggcaucuacaacguggccaccugcggccuguucggccuggugagcuuccugcugcugugcggcagaagcugcagcaccaccuacaagggcguguacgagcugcagacccuggagcuggacauggccagccugaacaugaccaugccccugagcugcaccaagaacaacagccaccacuacaucauggugggcaacgagaccggccuggagcugacccugaccaacaccagcaucaucaaccacaaguucugcaaccugagcgacgcccacaagaaggaccuguacgaccacgcccugaugagcaucaucagcaccuuccaccugagcauccccaacuucaaccaguacgaggccaugagcugcgacuucaacggcggcaagaucagcgugcaguacaaccugagccacaccuacgccguggacgccgccaaccacugcggcaccaucgccaacggcgugcugcagaccuucaugagaauggccuggggcggcagcuacaucgcccuggacagcggcaagggcagcugggacugcaucaugaccagcuaccaguaccugaucauccagaacaccaccugggaggaccacugccaguucagcagacccagccccaucggcuaccugggccugcugagccagagaaccagagacaucuacaucagcagaagacugcugggcaccuucaccuggacccugagcgacagcgagggcaacgagacccccggcggcuacugccugaccagauggaugcugaucgaggccgagcugaagugcuucggcaacaccgccguggccaagugcaacgagaagcacgacgaggaguucugcgacaugcugagacuguucgacuucaacaagcaggccaucagaagacugaagacccccgcccagaugagcauccagcugaucaacaaggccgugaacgcccugaucaacgaccagcugaucaugaagaaccaccugagagacaucaugggcauccccuacugcaacuacagcaaguacugcuaccugaaccacaccgugaccggcaagaccagccugcccagaugcugccuggugagcaacggcagcuaccugaacgagacccacuucagcgacgacaucgagcagcaggccgacaacaugaucaccgagcugcugcagaaggaguacauggacagacagggcaagaccccccugggccugguggaccuguucguguucagcaccagcuucuaccugaucagcaucuuccugcaccugaucaagauccccacccacagacacaucaccggcaagcccugccccaagccccacagacugaaccacaugggcaucugcagcugcggccuguacaagcaccccggcgugcccgugaaguggaagagaugaggacuaguaauaaggaaacuguaugaaugucugugggcaggaagugaagagauccuucuguaaagguuuuuggaauuaugucugcugaauaauaaacuuuuuugaaauaauaaaucugguagaaaaaugagaucucaaaggcucuuuucagagccaccaaaaaaaaaaaaaaaaaaaaaaaaaaaaaaaaaaaaaaaaaaaaaaaaaaaaaaaaaaaaaaaaaaaaaaaaaaaaaaaaaaaaaaaaaaaaaaaaaaaaa

SEQ ID NO: 32568 - RNA, 1809 nt, Artificial Sequence
  mRNA product Design b-4 (hSL-A100) comprising derived and/or modified sequence from LASV(LASV253-NIG-2011;Clade II)__AIT17670__GPCmut7 (opt4)
aggagagucccgcagucggcguccagcggcucugcuuguucgugugugugucguugcaggccuuauucaagcuuaccaugggccagaucaucaccuucuuccaggaggugccccacgugaucgaggaggugaugaacaucgugcugaucgcccugagccugcuggccauccugaagggcaucuacaacguggccaccugcggccuguucggccuggugagcuuccugcugcugugcggcagaagcugcagcaccaccuacaagggcguguacgagcugcagacccuggagcuggacauggccagccugaacaugaccaugccccugagcugcaccaagaacaacagccaccacuacaucauggugggcaacgagaccggccuggagcugacccugaccaacaccagcaucaucaaccacaaguucugcaaccugagcgacgcccacaagaagaaccuguacgaccacgcccugaugagcaucaucagcaccuuccaccugagcauccccaacuucaaccaguacgaggccaugagcugcgacuucaacggcggcaagaucagcgugcaguacaaccugagccacaccuacgccguggacgccgccaaccacugcggcaccaucgccaacggcgugcugcagaccuucaugagaauggccuggggcggcagcuacaucgcccuggacagcggcaagggcagcugggacugcaucaugaccagcuaccaguaccugaucauccagaacaccaccugggaggaccacugccaguucagcagacccagccccaucggcuaccugggccugcugagccagagaaccagagacaucuacaucagcagaagacugcugggcaccuucaccuggacccugagcgacagcgagggcaacgagacccccggcggcuacugccugaccagauggaugcugaucgaggccgagcugaagugcuucggcaacaccgccguggccaagugcaacgagaagcacgacgaggaguucugcgacaugcugagacuguucgacuucaacaagcaggccaucagaagacugaaggcccccgcccagaugagcauccagcugaucaacaaggccgugaacgcccugaucaacgaccagcugaucaugaagaaccaccugagagacaucaugggcauccccuacugcaacuacagcaaguacugcuaccugaaccacaccgugaccggcagaaccagccugcccagaugcugccuggugagcaacggcagcuaccugaacgagacccacuucagcgacgacaucgagcagcaggccgacaacaugaucaccgagcugcugcagaaggaguacaucgacagacagggcaagaccccccugggccugguggaccuguucguguucagcaccagcuucuaccugaucagcaucuuccugcaccuggugaagauccccacccacagacacaucaucggcaagcccugccccaagccccacagacugaaccacaugggcaucugcagcugcggccuguacaagcaccccggcgugcccgugaaguggaagagaugaggacuaguaauaaggaaacuguaugaaugucugugggcaggaagugaagagauccuucuguaaagguuuuuggaauuaugucugcugaauaauaaacuuuuuugaaauaauaaaucugguagaaaaaugagaucucaaaggcucuuuucagagccaccaaaaaaaaaaaaaaaaaaaaaaaaaaaaaaaaaaaaaaaaaaaaaaaaaaaaaaaaaaaaaaaaaaaaaaaaaaaaaaaaaaaaaaaaaaaaaaaaaaaaa

SEQ ID NO: 32569 - RNA, 1809 nt, Artificial Sequence
  mRNA product Design b-4 (hSL-A100) comprising derived and/or modified sequence from LASV(LASV254-NIG-2011;Clade II)__AIT17674__GPCmut7 (opt4)
aggagagucccgcagucggcguccagcggcucugcuuguucgugugugugucguugcaggccuuauucaagcuuaccaugggccagaucaucaccuucuuccaggaggugccccacgugaucgaggaggugaugaacaucgugcugaucgcccugagccugcuggccauccugaagggcaucuacaacguggccaccugcggccuguucggccuggugagcuuccugcugcugugcggcagaagcugcagcaccaccuacaagggcguguacgagcugcagacccuggagcuggacaugaccaaccugaacaugaccaugccccugagcugcaccaagaacaacagccaccacuacaucauggugggcaacgagaccggccuggagcugacccugaccaacaccagcaucaucaaccacaaguucugcaaccugagcgacgcccacaagaagaaccuguacaaccacgcccugaugagcaucaucagcaccuuccaccugagcauccccaacuucaaccaguacgaggccaugagcugcgacuucaacggcggcaagaucagcgugcaguacaaccugagccacagcuacgccguggacgccgccaaccacugcggcaccaucgccaacggcgugcugcagaccuucaugagaauggccuggggcggcagcuacaucgcccuggacagcggcaagggcaacugggacugcaucaugaccagcuaccaguaccugaucauccagaacaccaccugggaggaccacugccaguucagcagacccagccccaucggcuaccugggccugcugagccagagaaccagagacaucuacaucagcagaagacugcugggcaccuucaccuggacccugagcgacagcgagggcaacgagacccccggcggcuacugccugaccagauggaugcugaucgaggccgagcugaagugcuucggcaacaccgccguggccaagugcaacgagaagcacgacgaggaguucugcgacaugcugagacuguucgacuucaacaagcaggccaucagaagacugaagacccccgcccaggccaacauccagcugaucaacaaggccgugaacgcccugaucaacgaccagcugaucaugaagaaccaccugagagacaucaugggcauccccuacugcaacuacagcaaguacugcuaccugaaccacaccgugaccggcaagaccagccugcccagaugcugccuggugagcaacggcagcuaccugaacgagacccacuucagcgacgacaucgagcagcaggccgacaacaugaucaccgagcugcugcagaaggaguacauggacagacagggcaagaccccccugggccugguggaccuguucguguucagcaccagcuucuaccugaucagcaucuuccugcaccuggugaagauccccacccacagacacgugaucggcaagcccugccccaagccccacagacugaaccacaugggcaucugcagcugcggccuguacaagcaccccggcgugcccgugaaguggaagagaugaggacuaguaauaaggaaacuguaugaaugucugugggcaggaagugaagagauccuucuguaaagguuuuuggaauuaugucugcugaauaauaaacuuuuuugaaauaauaaaucugguagaaaaaugagaucucaaaggcucuuuucagagccaccaaaaaaaaaaaaaaaaaaaaaaaaaaaaaaaaaaaaaaaaaaaaaaaaaaaaaaaaaaaaaaaaaaaaaaaaaaaaaaaaaaaaaaaaaaaaaaaaaaaaa

SEQ ID NO: 32570 - RNA, 1809 nt, Artificial Sequence
  mRNA product Design b-4 (hSL-A100) comprising derived and/or modified sequence from LASV(Nig08-A19;Clade III)__ADU56618__GPCmut7 (opt4)
aggagagucccgcagucggcguccagcggcucugcuuguucgugugugugucguugcaggccuuauucaagcuuaccaugggccagaucgugaccuucuuccaggaggugccccacgugaucgaggaggugaugaacaucgugcugaucgcccugagcauccuggccauccugaagggccuguacaacaucgccaccugcggccugaucggccuggugaccuuccugcugcugagcggcagaagcugcagcaugaccuacaagggcguguacgagcugcagacccuggagcugaacaugaacacccugaacaugaccaugccccugagcugcaccaagaacaacagccaccacuacaucauggugggcaacgagaccggccuggagcugacccugaccaacaccagccugcugcaccacaaguucugcaaccugagcgacgcccacaagaagaaccuguacgaccacacccugaugagcaucaucagcaccuuccaccugagcauccccaacuucaaccaguacgaggccaugagcugcgacuucaacggcggcaagaucaccgugcaguacaaccugagccacagcuacgccaucgacgccgccaaccacugcggcaccguggccaacggcgugcugcagaccuucaugagaauggccuggggcggcagcuacaucgcccuggacagcggcagaggcaagugggacugcaucaugaccagcuaccaguaccugaucauccagaacaccaccugggaggaccacugccaguucagcagacccagccccaucggcuaccugggccugcugagccagagaaccagagacaucuacaucagcagaagacugcugggcaccuucaccuggacccugagcgacagcgagggcaacgagacccccggcggcuacugccugaccagauggaugcugaucgaggccgagcugaagugcuucggcaacaccgccguggccaagugcaacgagaagcacgacgaggaguucugcgacaugcugagacuguucgacuucaacaagcaggccaucagaagacugaaggcccccgcccagaugagcauccagcugaucaacaaggccgugaacgcccugaucaacgaccagcugaucaugaagaaccaccugagagacaucaugggcauccccuacugcaacuacagcaaguacugcuaccugaaccacaccagcaccggcagaaccagccugcccagaugcugccuggugagcaacggcagcuaccugaacgagacccacuucagcgacgacaucgagcagcaggccgacaacaugaucaccgagaugcugcagaaggaguaccuggacagacagggcaagaccccccugggccugguggaccuguucguguucagcaccagcuucuaccugaucagcaucuuccugcaccuggugaagauccccacccacagacacaucgugggcaagcccugccccaagccccacagacugaaccacaugggcaucugcagcugcggccuguacaagcagcccggcgugcccgugagauggaagagaugaggacuaguaauaaggaaacuguaugaaugucugugggcaggaagugaagagauccuucuguaaagguuuuuggaauuaugucugcugaauaauaaacuuuuuugaaauaauaaaucugguagaaaaaugagaucucaaaggcucuuuucagagccaccaaaaaaaaaaaaaaaaaaaaaaaaaaaaaaaaaaaaaaaaaaaaaaaaaaaaaaaaaaaaaaaaaaaaaaaaaaaaaaaaaaaaaaaaaaaaaaaaaaaaa

SEQ ID NO: 32571 - RNA, 1812 nt, Artificial Sequence
  mRNA product Design b-4 (hSL-A100) comprising derived and/or modified sequence from LASV(G1180-SLE-2010;Clade IV)__AIT17168__GPCmut7 (opt4)
aggagagucccgcagucggcguccagcggcucugcuuguucgugugugugucguugcaggccuuauucaagcuuaccaugggccagaucgugaccuucuuccaggaggugccccacgugaucgaggaggugaugaacaucgugcugaucgcccugagcauccuggccgugcugaagggccuguacaacuucgccaccugcggccuggugggccugcugaccuuccugcugcugugcggcagaagcugcaccgccagcagauacaagggcguguacgagcugcagacccuggagcugaacauggagacccugaacaugaccaugccccugagcugcaccaagaacaacagccaccacuacaucauggugggcaacgagaccggccuggagcugacccugaccaacaccagcaucaucaaccacaaguucugcaaccugagcgacgcccacaagaagaaccuguacgaccacgcccugaugagcaucaucagcaccuuccaccugagcauccccaacuucaaccaguacgaggccaugagcugcgacuucaacggcggcaagaucagcgugcaguacaaccugagccacagcuacgccggcgacgccgccaaccacugcggcaccguggccaacggcgugcugcagaccuucaugagaauggccuggggcggcagcuacaucgcccuggacagcggccacggcagcugggacugcaucaugaccagcuaccaguaccugaucauccagaacaccaccugggaggaccacugccaguucagcagacccagccccaucggcuaccugggccugcugagccagagaaccagagacaucuacaucagcagaagacugcugggcaccuucaccuggacccugagcgacagcgagggcaaggacacccccggcggcuacugccugaccagauggaugcugaucgaggccgagcugaagugcuucggcaacaccgccguggccaagugcaacgagaagcacgacgaggaguucugcgacaugcugagacuguucgacuucaacaagcaggccauccagagacugaaggcccccgcccagaugagcauccagcugaucaacaaggccgugaacgcccugaucaacgaccagcugaucaugaagaaccaccugagagacaucaugggcauccccuacugcaacuacagcaaguacugcuaccugaaccacaccaccaccggcaagaccagccugcccaagugcugccuggugagcaacggcagcuaccugaacgagacccacuucagcgacgacaucgagcagcaggccgacaacaugaucaccgagaugcugcagaaggaguacauggagagacagggcaagaccccccugggccugguggaccuguucguguucagcaccagcuucuaccugaucagcaucuuccugcaccuggugaagauccccacccacagacacaucgugggcaagagcugccccaagccccacagacugaaccacaugggcaucugcagcugcggccuguacaagcagcccggcgugcccgugaaguggaagagaugaggacuaguaauaaggaaacuguaugaaugucugugggcaggaagugaagagauccuucuguaaagguuuuuggaauuaugucugcugaauaauaaacuuuuuugaaauaauaaaucugguagaaaaaugagaucucaaaggcucuuuucagagccaccaaaaaaaaaaaaaaaaaaaaaaaaaaaaaaaaaaaaaaaaaaaaaaaaaaaaaaaaaaaaaaaaaaaaaaaaaaaaaaaaaaaaaaaaaaaaaaaaaaaaa

SEQ ID NO: 32572 - RNA, 1812 nt, Artificial Sequence
  mRNA product Design b-4 (hSL-A100) comprising derived and/or modified sequence from LASV(G1442-SLE-2011;Clade IV)__AIT17180__GPCmut7 (opt4)
aggagagucccgcagucggcguccagcggcucugcuuguucgugugugugucguugcaggccuuauucaagcuuaccaugggccagaucgugaccuucuuccaggaggugccccacgugaucgaggaggugaugaacaucgugcugaucgcccugagcauccuggccgugcugaagggccuguacaacguggccaccugcggccugaucggccuggugaccuuccugcugcugugcggcagaagcugcaccaccacccuguacaagggcguguacgagcugcagacccuggagcugaacauggagacccugaacaugaccaugccccugagcugcaccaagaacaacagccaccacuacaucagagugggcaacgagaccggccuggagcugacccugaccaacaccagcaucaucaaccacaaguucugcaaccugagcgacgcccacaagaagaaccuguacgaccacgcccugaugagcaucaucagcaccuuccaccugagcauccccaacuucaaccaguacgaggccaugagcugcgacuucaacggcggcaagaucagcgugcaguacaaccugagccacagcuacgccggcgacgccgccaaccacugcggcaccguggccaacggcgugcugcagaccuucaugagaauggccuggggcggcagcuacaucgcccuggacagcggcagaggcaacugggacugcaucaugaccagcuaccaguaccugaucauccagaacaccaccugggacgaccacugccaguucagcagacccagccccaucggcuaccugggccugcugagccagagaaccagagacguguacaucagcagaagacugcugggcaccuucaccuggacccugagcgacagcgagggcaaggacacccccggcggcuacugccugaccagauggaugcugaucgaggccgagcugaagugcuucggcaacaccgccguggccaagugcaacgagaagcacgacgaggaguucugcgacaugcugagacuguucgacuucaacaagcaggccauccagagacugaaggcccccgcccagaugagcauccagcugaucaacaaggccgugaacgcccugaucaacgaccagcugaucaugaagaaccaccugagagacaucaugggcauccccuacugcaacuacagcaaguacugcuaccugaacaacaccgccaccggcaagaccagccugcccaagugcugccugaucagcaacggcagcuaccugaacgagacccacuucagcgacgacaucgagcaggaggccgacaacaugaucaccgagaugcugcagaaggaguacauggagagacagggcaagaccccccugggccugguggaccuguucguguucagcaccagcuucuaccugaucagcaucuuccugcaccuggugaagauccccacccacagacacaucgugggcaagagcugccccaagccccacagacugaaccacaugggcaucugcagcugcggccuguacaagcagcccggcgugcccgugagauggaagagaugaggacuaguaauaaggaaacuguaugaaugucugugggcaggaagugaagagauccuucuguaaagguuuuuggaauuaugucugcugaauaauaaacuuuuuugaaauaauaaaucugguagaaaaaugagaucucaaaggcucuuuucagagccaccaaaaaaaaaaaaaaaaaaaaaaaaaaaaaaaaaaaaaaaaaaaaaaaaaaaaaaaaaaaaaaaaaaaaaaaaaaaaaaaaaaaaaaaaaaaaaaaaaaaaa

SEQ ID NO: 32573 - RNA, 1812 nt, Artificial Sequence
  mRNA product Design b-4 (hSL-A100) comprising derived and/or modified sequence from LASV(G3010-SLE-2013;Clade IV)__AIT17344__GPCmut7 (opt4)
aggagagucccgcagucggcguccagcggcucugcuuguucgugugugugucguugcaggccuuauucaagcuuaccaugggccagaucgugaccuucuuccaggaggugccccacgugaucgaggaggugaugaacaucgugcugaucgcccugagcauccuggccgugcugaagggccuguacaacuucgccaccugcggccuggugggccuggugaccuuccugcugcugugcggcagaagcugcaccaccagccuguacaagggcguguacgagcugcagacccuggagcugaacauggagacccugaacaugaccaugccccugagcugcaccaagaacaacagccaccacuacaucauggugggcaacgagaccggccuggagcugacccugaccaacaccagcaucaucaaccacaaguucugcaaccugagcgacgcccacaagaagaaccuguacaaccacgcccugaugagcaucaucagcaccuuccaccugagcauccccaacuucaaccaguacgaggccaugagcugcgacuucaacggcggcaagaucagcgugcaguacaaccugagccacagcuacgccggcgacgccgccagccacugcggcaccguggccaacggcgugcugcagaccuucaugagaauggccuggggcggcagcuacaucgcccuggacagcggcuacggcaagugggacugcaucaugaccagcuaccaguaccugaucauccagaacaccaccugggaggaccacugccaguucagcagacccagccccaucggcuaccugggccugcugagccagagaaccagagacaucuacaucagcagaagacugcugggcaccuucaccuggacccugagcgacagcgagggcaaggacacccccggcggcuacugccugaccagauggaugcugaucgaggccgagcugaagugcuucggcaacaccgccguggccaagugcaacgagaagcacgacgaggaguucugcgacaugcugagacuguucgacuucaacaagcaggccauccagagacugaagacccccgcccagaugagcauccagcugaucaacaaggccgugaacgcccugaucaacgaccagcugaucaugaagaaccaccugagagacaucaugggcauccccuacugcaacuacagcaaguacugcuaccugaaccacaccaccaccggcaagaccagccugcccaagugcugccuggugagcaacggcagcuaccugaacgagacccacuucagcgacgacaucgagcagcaggccgacaacaugaucaccgagaugcugcagaaggaguacauggagagacagggcaagaccccccugggccugguggaccuguucguguucagcaccagcuucuaccugaucagcaucuuccugcaccuggugaagauccccacccacagacacaucgugggcaagagcugccccaagccccacagacugaaccacaugggcaucugcagcugcggccuguacaagcagcccggcgugcccgugagauggaagagaugaggacuaguaauaaggaaacuguaugaaugucugugggcaggaagugaagagauccuucuguaaagguuuuuggaauuaugucugcugaauaauaaacuuuuuugaaauaauaaaucugguagaaaaaugagaucucaaaggcucuuuucagagccaccaaaaaaaaaaaaaaaaaaaaaaaaaaaaaaaaaaaaaaaaaaaaaaaaaaaaaaaaaaaaaaaaaaaaaaaaaaaaaaaaaaaaaaaaaaaaaaaaaaaaa

SEQ ID NO: 32574 - RNA, 1812 nt, Artificial Sequence
  mRNA product Design b-4 (hSL-A100) comprising derived and/or modified sequence from LASV(G502-SLE-2009;Clade IV)__AIT17126__GPCmut7 (opt4)
aggagagucccgcagucggcguccagcggcucugcuuguucgugugugugucguugcaggccuuauucaagcuuaccaugggccagaucgugaccuucuuccaggaggugccccacgugaucgaggaggugaugaacaucgugcugaucgcccugagcauccuggccgugcugaagggccuguacaacuucgccaccugcggccuggugggccugcugaccuuccugcugcugugcggcagaagcugcaccaccggccuguacaagggcguguacgagcugcagacccuggagcugaacauggagacccugaacaugaccaugccccugagcugcaccaagaacaacagccaccacuacaucauggugggcaacgagaccggccuggagcugacccugaccaacaccagcaucaucaaccacaaguucugcaaccugagcgacgcccacaagaagaaccuguacgaccacgcccugaugagcaucaucagcaccuuccaccugagcauccccaacuucaaccaguacgaggccaugagcugcgacuucaacggcggcaagaucagcgugcaguacaaccugagccacagcuacgccggcgacgccgccgaccacugcggcaccguggccaacggcgugcugcagaccuucaugagaauggccuggggcggcagcuacaucgcccuggacagcggcagaggcagaugggacugcaucaugaccagcuaccaguaccugaucauccagaacaccaccugggaggaccacugccaguucagcagacccagccccaucggcuaccugggccugcugagccagagaaccagagacaucuacaucagcagaagacugcugggcaccuucaccuggacccugagcgacagcgagggcaaggacacccccggcggcuacugccugaccagauggaugcugaucgaggccgagcugaagugcuucggcaacaccgccguggccaagugcaacgagaagcacgacgaggaguucugcgacaugcugagacuguucgacuucaacaagcaggccauccagagacugaaggcccccgcccagaugagcauccagcugaucaacaaggccgugaacgcccugaucaacgaccagcuggugaugaagaaccaccugagagacaucaugggcauccccuacugcaacuacagcagauacugcuaccugaaccacaccaccaccggcagaaccagccugcccaagugcugccuggugagcaacggcagcuaccugaacgagacccacuucagcgacgacaucgagcagcaggccgacaacaugaucaccgagaugcugcagaaggaguacauggagagacagggcaagaccccccugggccugguggaccuguucguguucagcaccagcuucuaccugaucagcaucuuccugcaccuggugaagauccccacccacagacacaucgugggcaagagcugccccaagccccacagacugaaccacaugggcaucugcagcugcggccuguacaagcagcccggcgugcccgugaaguggaagagaugaggacuaguaauaaggaaacuguaugaaugucugugggcaggaagugaagagauccuucuguaaagguuuuuggaauuaugucugcugaauaauaaacuuuuuugaaauaauaaaucugguagaaaaaugagaucucaaaggcucuuuucagagccaccaaaaaaaaaaaaaaaaaaaaaaaaaaaaaaaaaaaaaaaaaaaaaaaaaaaaaaaaaaaaaaaaaaaaaaaaaaaaaaaaaaaaaaaaaaaaaaaaaaaaa

SEQ ID NO: 32575 - RNA, 1812 nt, Artificial Sequence
  mRNA product Design b-4 (hSL-A100) comprising derived and/or modified sequence from LASV(G733-SLE-2010;Clade IV)__AIT17154__GPCmut7 (opt4)
aggagagucccgcagucggcguccagcggcucugcuuguucgugugugugucguugcaggccuuauucaagcuuaccaugggccagaucgugaccuucuuccaggaggugccccacgugaucgaggaggugaugaacaucgugcugaucgcccugagcauccuggccgugcugaagggccuguacaacuucgccaccugcggcaucgugggccuggugagcuuccugcugcugugcggcagaagcugcaccaccagccuguacaagggcguguacgagcugcagacccuggagcugaacauggagacccugaacaugaccaugccccugagcugcaccaagaacaacagccaccacuacaucauggugggcaacgagaccggccuggagcugacccugaccaacaccagcaucaucaaccacaaguucugcaaccugagcgacgcccacaagaagaaccuguacgaccacgcccugaugagcaucaucagcaccuuccaccugagcauccccaacuucaaccaguacgaggccaugagcugcgacuucaacggcggcaagaucagcgugcaguacaaccugagccacagcuacgccggcgacgccgccaaccacugcggcaccaucgccaacggcgugcugcagaccuucaugagaauggccuggggcggcagcuacaucgcccuggacagcggcagagacagaugggacugcaucaugaccagcuaccaguaccugaucauccagaacaccaccugggaggaccacugccaguucagcagacccagccccaucggcuaccugggccugcugagccagagaaccagagacaucuacaucagcagaagacugcugggcaccuucaccuggacccugagcgacagcgagggcaaggacacccccggcggcuacugccugaccagauggaugcugaucgaggccgagcugaagugcuucggcaacaccgccguggccaagugcaacgagaagcacgacgaggaguucugcgacaugcugagacuguucgacuucaacaagcaggccauccagagacugaaggcccccgcccagaugagcauccagcugaucaacaaggccgugaacgcccugaucaacgaccagcugaucaugaagaaccaccugagagacaucaugggcauccccuacugcaacuacagcaaguacugcuaccugaaccacaccaccaccggcaagaccagccugcccaagugcugccuggugagcaacggcagcuaccugaacgagacccacuucagcgacgacaucgagcagcaggccgacaacaugaucaccgagaugcugcagaaggaguacauggagagacagggcaagaccccccugggccugguggaccuguucguguucagcaccagcuucuaccugaucagcaucuuccugcaccuggugaagauccccacccacagacacguggugggcaagagcugccccaagccccacagacugaaccacaugggcaucugcagcugcggccuguacggccagcccggcgugcccgugaaguggaagagaugaggacuaguaauaaggaaacuguaugaaugucugugggcaggaagugaagagauccuucuguaaagguuuuuggaauuaugucugcugaauaauaaacuuuuuugaaauaauaaaucugguagaaaaaugagaucucaaaggcucuuuucagagccaccaaaaaaaaaaaaaaaaaaaaaaaaaaaaaaaaaaaaaaaaaaaaaaaaaaaaaaaaaaaaaaaaaaaaaaaaaaaaaaaaaaaaaaaaaaaaaaaaaaaaa

SEQ ID NO: 32576 - RNA, 1812 nt, Artificial Sequence
  mRNA product Design b-4 (hSL-A100) comprising derived and/or modified sequence from MOPV/LASV reassortant(IGS-1;Clade IV)__AFY05576__GPCmut7 (opt4)
aggagagucccgcagucggcguccagcggcucugcuuguucgugugugugucguugcaggccuuauucaagcuuaccaugggccagaucgugaccuucuuccaggaggugccccacgugaucgaggaggugaugaacaucgugcugaucgcccugagcgugcuggccgugcugaagggccuguacaacuucgccaccugcggccuggugggccuggugaccuuccugcugcugugcggcagaagcugcaccaccagccuguacaagggcguguacgagcugcagacccuggagcugaacauggagacccugaacaugaccaugccccugagcugcaccaagaacaacagccaccacuacaucauggugggcaacgagaccggccuggagcugacccugaccaacaccagcaucaucaaccacaaguucugcaaccugagcgacgcccacaagaagaaccuguacgaccacgcccugaugagcaucaucagcaccuuccaccugagcauccccaacuucaaccaguacgaggccaugagcugcgacuucaacggcggcaagaucagcgugcaguacaaccugagccacagcuacgccggcgacgccgccaaccacugcggcaccguggccaacggcgugcugcagaccuucaugagaauggccuggggcggcagcuacaucgcccuggacagcggcagaggcaacugggacugcaucaugaccagcuaccaguaccugaucauccagaacaccaccugggaggaccacugccaguucagcagacccagccccaucggcuaccugggccugcugagccagagaaccagagacaucuacaucagcagaagacugcugggcaccuucaccuggacccugagcgacagcgagggcgaggacacccccggcggcuacugccugaccagauggaugcugaucgaggccgagcugaagugcuucggcaacaccgccguggccaagugcaacgagaagcacgacgaggaguucugcgacaugcugagacuguucgacuucaacaagcaggccauccagagacugaaggcccccgcccagaugagcauccagcugaucaacaaggccgugaacgcccugaucaacgaccagcugaucaugaagaaccaccugagagacaucaugggcauccccuacugcaacuacagcaaguacugcuaccugaaccacaccaccaccggcagaaccagccugcccaagugcugccuggugagcaacggcagcuaccugaacgagacccacuucagcgacgacaucgagcagcaggccgacaacaugaucaccgagaugcugcagaaggaguacauggagagacagggcaagaccccccugggccugguggaccuguucguguucagcaccagcuucuaccugaucagcaucuuccugcaccuggugaagauccccacccacagacacaucgugggcaagagcugccccaagccccacagacugaaccacaugggcaucugcagcugcggccuguacaagcagcccggcgugcccgugaaguggaagagaugaggacuaguaauaaggaaacuguaugaaugucugugggcaggaagugaagagauccuucuguaaagguuuuuggaauuaugucugcugaauaauaaacuuuuuugaaauaauaaaucugguagaaaaaugagaucucaaaggcucuuuucagagccaccaaaaaaaaaaaaaaaaaaaaaaaaaaaaaaaaaaaaaaaaaaaaaaaaaaaaaaaaaaaaaaaaaaaaaaaaaaaaaaaaaaaaaaaaaaaaaaaaaaaaa

SEQ ID NO: 32577 - RNA, 1812 nt, Artificial Sequence
  mRNA product Design b-4 (hSL-A100) comprising derived and/or modified sequence from LASV(LM765-SLE-2012;Clade IV)__AIT17814__GPCmut7 (opt4)
aggagagucccgcagucggcguccagcggcucugcuuguucgugugugugucguugcaggccuuauucaagcuuaccaugggccagaucgugaccuucuuccaggaggugccccacgugaucgaggaggugaugaacaucgugcugaucgcccugagcauccuggccgugcugaagggccuguacaacuucgccaccugcggccuggugggccuggugaccuuccugcugcugugcggcagaagcugcaccaccagccuguacaagggcguguacgagcugcagacccuggagcugaacauggagacccugaacaugaccaugccccugagcugcaccaagaacaacagccaccacuacaucauggugggcaacgagaccggccuggagcugacccugaccaacaccagcaucaucgaccacaaguucugcaaccugagcgacgcccacagaaagaaccuguacgaccacgcccugaugagcaucaucagcaccuuccaccugagcauccccaacuucaaccaguacgaggccaugagcugcgacuucaacggcggcaagaucagcgugcaguacaaccugagccacagcuacgccaaggacgccgccgaccacugcggcaccguggccaacggcgugcugcagaccuucaugagaauggccuggggcggcagcuacaucgcccuggacagcggcagaggcagaugggacugcaucaugaccagcuaccaguaccugaucauccagaacaccaccugggaggaccacugccaguucagcagacccagccccaucggcuaccugggccugcugagccagagaaccagagacaucuacaucagcagaagacugcugggcaccuucaccuggacccugagcgacagcgagggcaaggacacccccggcggcuacugccugaccagauggaugcugaucgaggccgagcugaagugcuucggcaacaccgccguggccaagugcaacgagaagcacgacgaggaguucugcgacaugcugagacuguucgacuucaacaagcaggccauccagagacugaaggcccccgcccagaugagcauccagcugaucaacaaggccgugaacgcccugaucaacgaccagcugaucaugaagaaccaccugagagacaucaugggcauccccuacugcaacuacagcaaguacugcuaccugaaccacaccaccaccggcaagaccagccugcccaagugcugccuggugagcaacggcagcuaccugaacgagacccacuucagcgacgacaucgagcagcaggccgacaacaugaucaccgagaugcugcagaaggaguacauggagagacagggcaagaccccccugggccugguggaccuguucguguucagcaccagcuucuaccugaucagcaucuuccugcaccuggugaagauccccacccacagacacaucgugggcaagcccugccccaagccccacagacugaaccacaugggcaucugcagcugcggccuguacaagcagcccggcgugcccgugaaguggaagagaugaggacuaguaauaaggaaacuguaugaaugucugugggcaggaagugaagagauccuucuguaaagguuuuuggaauuaugucugcugaauaauaaacuuuuuugaaauaauaaaucugguagaaaaaugagaucucaaaggcucuuuucagagccaccaaaaaaaaaaaaaaaaaaaaaaaaaaaaaaaaaaaaaaaaaaaaaaaaaaaaaaaaaaaaaaaaaaaaaaaaaaaaaaaaaaaaaaaaaaaaaaaaaaaaa

SEQ ID NO: 32578 - RNA, 1812 nt, Artificial Sequence
  mRNA product Design b-4 (hSL-A100) comprising derived and/or modified sequence from LASV(LM776-SLE-2012;Clade IV)__AIT17824__GPCmut7 (opt4)
aggagagucccgcagucggcguccagcggcucugcuuguucgugugugugucguugcaggccuuauucaagcuuaccaugggccagaucgugaccuucuuccaggaggugccccacgugaucgaggaggugaugaacaucgugcugaucgcccugagcauccuggccgugcugaagggccuguacaacuucgccaccugcggccuggugggccuggugaccuuccugcugcugugcggcagaagcugcaccaccagcguguacaagggcguguacgagcugcagacccuggagcugaacauggagacccugaacaugaccaugccccugagcugcaccaagaacaacagccaccacuacaucauggugggcaacgagaccggccuggagcugacccugaccaacaccagcaucaucaaccacaaguucugcaaccugagcgacgcccacaagaagaaccuguacgaccacgcccugaugagcaucaucagcaccuuccaccugagcauccccaacuucaaccaguacgaggccaugagcugcgacuucaacggcggcaagaucagcgugcaguacaaccugagccacagcuacgccggcgacgccgccaaccacugcggcaccguggccaacggcgugcugcagaccuucaugagaauggccuggggcggcagcuacaucgcccuggacagcggccacggcaagugggacugcaucaugaccagcuaccaguaccugaucauccagaacaccaccugggaggaccacugccaguucagcagacccagccccaucggcuaccugggccugcugagccagagaaccagagacaucuacaucagcagaagacugcugggcaccuucaccuggacccugagcgacagcgagggcaaggacacccccggcggcuacugccugaccagauggaugcugaucgaggccgagcugaagugcuucggcaacaccgccguggccaagugcaacgagaagcacgacgaggaguucugcgacaugcugagacuguucgacuucaacaagcaggccauccagagacugaaggcccccgcccagaugagcauccagcugaucaacaaggccgugaacgcccugaucaacgaccagcugaucaugaagaaccaccugagagacaucaugggcauccccuacugcaacuacagcaaguacugcuaccugaaccacaccaccaccggcaagaccagccugcccaagugcugccuggugagcaacggcagcuaccugaacgagacccacuucagcgacgacaucgagcagcaggccgacaacaugaucaccgagaugcugcagaaggaguacauggagagacagggcaagaccccccugggccugguggaccuguucguguucagcaccagcuucuaccugaucagcaucuuccugcaccuggugaagauccccacccacagacacaucgugggcaagagcugccccaagccccacagacugaaccacaugggcaucugcagcugcggccuguacaagcagcccggcgugcccgugagauggaagagaugaggacuaguaauaaggaaacuguaugaaugucugugggcaggaagugaagagauccuucuguaaagguuuuuggaauuaugucugcugaauaauaaacuuuuuugaaauaauaaaucugguagaaaaaugagaucucaaaggcucuuuucagagccaccaaaaaaaaaaaaaaaaaaaaaaaaaaaaaaaaaaaaaaaaaaaaaaaaaaaaaaaaaaaaaaaaaaaaaaaaaaaaaaaaaaaaaaaaaaaaaaaaaaaaa

SEQ ID NO: 32579 - RNA, 1812 nt, Artificial Sequence
  mRNA product Design b-4 (hSL-A100) comprising derived and/or modified sequence from LASV(Mad39;Clade IV)__ANH09722__GPCmut7 (opt4)
aggagagucccgcagucggcguccagcggcucugcuuguucgugugugugucguugcaggccuuauucaagcuuaccaugggccagaucgugaccuucuuccaggaggugccccacgugaucgaggaggugaugaacaucgugcugaucgcccugagcauccuggccgugcugaagggccuguacaacguggccaccugcggccugaucggccuggugaccuuccugcugcugugcggcagaagcugcaccaccacccuguacaagggcguguacgagcugcaggcccuggagcugaacauggagacccugaacaugaccaugccccugagcugcaccaagaacaacagccaccacuacaucagagugggcaacgagaccggccuggagcugacccugaccaacaccagccugaucaaccacaaguucugcaaccugagcgacgcccacaagaagaaccuguacgaccacgcccugaugagcaucaucagcaccuuccaccugagcauccccaacuucaaccaguacgaggccaugagcugcgacuucaacgacggcaagaucagcgugcaguacaaccugagccacaccuacgccggcgacaccgccaaccacugcggcaccguggccaacggcgugcugcagaccuucaugagaauggccuggggcggcagcuacaucgcccuggacagcggcagaggcggcugggacugcaucaugaccagcuaccaguaccugaucauccagaacaccaccugggaggaccacugccaguucagcagacccagccccaucggcuaccugggccugcugagccagagaaccagagacaucuacaucagcagaagacugcugggcaccuucaccuggacccugagcgacagcgagggcaaggacacccccggcggcuacugccugaccagauggaugcugaucgaggccgagcugaagugcuucggcaacaccgccguggccaagugcaacgagaagcacgacgaggaguucugcgacaugcugagacuguucgacuucaacaagcaggccauccagagacugaaggcccccgcccagaugagcauccagcugaucaacaaggccgugaacgcccugaucaacgaccagcugaucaugaagaaccaccugagagacaucaugggcauccccuacugcaacuacagcaaguacugcuaccugaaccacaccgugaccggcaagaccagccugcccaagugcugccuggugagcaacggcagcuaccugaacgagacccacuucagcgacgacaucgagcagcaggccgacaacaugaucaccgagaugcugcagaaggaguacauggagagacagggcaagaccccccugggccugguggaccuguucguguucagcaccagcuucuaccugaucagcaucuuccugcaccuggugaagauccccacccacagacacguggugggcaagcccugccccaagccccacagacugaaccacaugggcaucugcagcugcggcuucuacaagcagcccggcgugcccgugagauggaagagaugaggacuaguaauaaggaaacuguaugaaugucugugggcaggaagugaagagauccuucuguaaagguuuuuggaauuaugucugcugaauaauaaacuuuuuugaaauaauaaaucugguagaaaaaugagaucucaaaggcucuuuucagagccaccaaaaaaaaaaaaaaaaaaaaaaaaaaaaaaaaaaaaaaaaaaaaaaaaaaaaaaaaaaaaaaaaaaaaaaaaaaaaaaaaaaaaaaaaaaaaaaaaaaaaa

SEQ ID NO: 32580 - RNA, 1812 nt, Artificial Sequence
  mRNA product Design b-4 (hSL-A100) comprising derived and/or modified sequence from LASV(Z0947-SLE-2011;Clade IV)__AIT17840__GPCmut7 (opt4)
aggagagucccgcagucggcguccagcggcucugcuuguucgugugugugucguugcaggccuuauucaagcuuaccaugggccagaucgugaccuucuuccaggaggugccccacgugaucgaggaggugaugaacaucgugcugaucgcccugagcauccuggccgugcugaagggccuguacaacuucgccaccugcggccuggugggccuggugaccuuccugcugcugugcggcagaagcugcaccaucagccuguacaagggcguguacgagcugcagacccuggagcugaacauggagacccugaacaugaccaugccccugagcugcaccaagaacaacagccaccacuacaucauggugggcaacgagaccggccuggagcugacccugaccaacaccagcaucaucaaccacaaguucugcaaccugagcgacgcccacaagaagaaccuguacgaccacgcccugaugagcaucaucagcaccuuccaccugagcauccccaacuucaaccaguacgaggccaugagcugcgacuucaacggcggcaagaucagcgugcaguacaaccugagccacagcuacgccggcgacgccgccaaccacugcggcaccguggccaacggcgugcugcagaccuucaugagaauggccuggggcggcagcuacaucgcccuggacagcggcagagacagaugggacugcaucaugaccagcuaccaguaccugaucauccagaacaccaccugggaggaccacugccaguucagcagacccagccccaucggcuaccugggccugcugagccagagaaccagagacaucuacaucagcagaagacugcugggcaccuucaccuggacccugagcgacagcgagggcaaggacacccccggcggcuacugccugaccagauggaugcugaucgaggccgagcugaagugcuucggcaacaccgccguggccaagugcaacgagaagcacgacgaggaguucugcgacaugcugagacuguucgacuucaacaagcaggccauccagagacugaaggcccccgcccagaugagcauccagcugaucaacaaggccgugaacgcccugaucaacgaccagcugaucaugaagaaccaccugagagacaucaugggcauccccuacugcaacuacagcaaguacugcuaccugaaccacaccaccaccggcaagaccagccugcccaagugcugccuggugagcaacggcagcuaccugaacgagacccacuucagcgacgacaucgagcagcaggccgacaacaugaucaccgagaugcugcagaaggaguacauggagagacagggcaagaccccccugggccugguggaccuguucguguucagcaccagcuucuaccugaucagcaucuuccugcaccuggugaagauccccacccacagacacaucgugggcaagcccugccccaagccccacagacugaaccacaugggcaucugcagcugcggccuguacaagcagcccggcgugcccgugaaguggaagagaugaggacuaguaauaaggaaacuguaugaaugucugugggcaggaagugaagagauccuucuguaaagguuuuuggaauuaugucugcugaauaauaaacuuuuuugaaauaauaaaucugguagaaaaaugagaucucaaaggcucuuuucagagccaccaaaaaaaaaaaaaaaaaaaaaaaaaaaaaaaaaaaaaaaaaaaaaaaaaaaaaaaaaaaaaaaaaaaaaaaaaaaaaaaaaaaaaaaaaaaaaaaaaaaaa

SEQ ID NO: 32581 - RNA, 1812 nt, Artificial Sequence
  mRNA product Design b-4 (hSL-A100) comprising derived and/or modified sequence from LASV(Josiah;Clade IV)__NP_694870__GPCmut7 (opt5)
aggagagucccgcagucggcguccagcggcucugcuuguucgugugugugucguugcaggccuuauucaagcuuaccaugggccagaucgugaccuucuuucaagaggucccccacguuauugaagaggugaugaacaucgugcugauugcccucagcguccuggcugugcuuaaggggcuguacaauuucgccacaugcggacucguuggccuggugacguuucuucugcucugugggagauccugcaccacaucucuguauaaaggagucuacgaacugcagacccucgagcugaacauggaaacacuuaauaugaccaugccucugagcuguacaaagaacaauucccaucacuauaucauggugggcaacgagaccgggcucgagcugacgcuuaccaauacaucuauuaucaaccauaaauucugcaaucugagcgacgcgcacaagaaaaaccucuacgaucaugcucugauguccaucauuucuaccuuucaccugagcaucccgaauuucaaccaguaugaagccauguccugugacuuuaauggaggcaagauuagcguucaguacaaccucucucacuccuaugccggcgaugcugccaaucauugcgggacaguggcuaacggaguccugcaaaccuucaugcggauggccuggggcgggagcuacaucgcgcuugacucuggacgcggcaacugggauuguauuaugacguccuaccaguaucugaucauucagaauacaaccugggaggaccacugccaguuuagcagacccucuccuaucggguaccucggacugcuuucccaacggacacgcgauaucuauauuagcagacggcugcucggcaccuucaccuggacacuguccgacucugaaggcaaggauacgcccgggggauacugucugacccgcuggaugcucaucgaggccgagcugaaaugcuuuggcaacacagcuguggccaaguguaaugaaaaacaugacgaggaguucugcgauaugcuuagacuguuugacuucaacaagcaggcuauucagcggcucaaagccccugcgcagaugagcauccaacugauuaauaaggccgugaacgcucuuaucaaugaucagcugaucaugaagaaccaccuccgcgacauuauggggauccccuauugcaauuacuccaaauauuguuaccugaaccacaccacaaccggaagaacgagccugccuaagugcugucucgucucuaauggcuccuaccugaacgaaacacauuucagcgacgauauugaacagcaagccgacaauaugaucaccgagaugcuucagaaagaguauauggaacggcaggggaagaccccgcugggacucguugaucuguuuguguucucuaccagcuuuuaccugauuuccaucuuccuucaccucgugaaaauccccacacaucgccacauugucggcaagucuugcccuaaaccccauagacugaaccacaugggcaucuguagcugcgggcuguauaagcagccuggagugcccguuaaguggaaacggugaggacuaguaauaaggaaacuguaugaaugucugugggcaggaagugaagagauccuucuguaaagguuuuuggaauuaugucugcugaauaauaaacuuuuuugaaauaauaaaucugguagaaaaaugagaucucaaaggcucuuuucagagccaccaaaaaaaaaaaaaaaaaaaaaaaaaaaaaaaaaaaaaaaaaaaaaaaaaaaaaaaaaaaaaaaaaaaaaaaaaaaaaaaaaaaaaaaaaaaaaaaaaaaaa

SEQ ID NO: 32582 - RNA, 1809 nt, Artificial Sequence
  mRNA product Design b-4 (hSL-A100) comprising derived and/or modified sequence from LASV(LP;Clade I)__AAF86701__GPCmut7 (opt5)
aggagagucccgcagucggcguccagcggcucugcuuguucgugugugugucguugcaggccuuauucaagcuuaccaugggccagaucauuaccuucuuucaagaggugccccacgucaucgaagagguuaugaacauugugcugaucgcccucagccugcuugcuauucugaaggggcucuacaauaucgccacaugcggaaucauuggccugguggcguuccuuuuucugugugggaaauccugcucucucacgcugaagggaggcuaugaacugcagacccucgagcugaacauggaaacacuuaauaugaccaugccucugagcuguaccaaaaacuccucucaucacuacaucagagucgggaaugagacaggacucgagcugacacuuaccaacacgagcauuaucaaucauaaguucugcaaccuguccgacgcucacaaaaagaaucucuaugaucaugcccugaugucuauuaucagcaccuuucaccuguccauuccgaacuucaaucaguacgaagccaugagcugugacuuuaacggcggcaagaucucugugcaguauaaucucucccacagcuacgcuggggaugccgcugagcauugcggaacaguugccaacggcgugcugcaaaccuucaugcggauggcguggggagggcgcuauaucgcccuugacucuggcaaagggaauugggauuguauuaugacauccuaccaguaccugaucauucagaacaccacgugggaagaccacugccaguuuagcagacccucuccuaucggauaucucggccugcuuucccaacggacacgcgauauuuacaucagcagacggcugcucggcaccuucacauggacccuguccgacucugaggggaacgagacccccggaggcuauugucugacacgcuggaugcucaucgaagcugagcugaagugcuuugggaauacggccgucgcuaaauguaacgaaaagcaugaugaggaguucugcgacaugcuuagacuguuugauuucaauaaacaggccauucggcgccucaaggcgccugcccagaugagcauccagcugauuaacaaggcugugaaugcccuuaucaacgaccaacugauuaugaaaaaucaccucagagauaucaugggaauccccuacugcaacuauuccaaguacuguuaucugaaucacaccagcucuggccggacaucccugccuaaaugcugucucauuagcaacgggucuuaccugaaugaaacccaguucagcgacgacaucgagcagcaagcugauaacaugauuacagaaaugcuucagaaggaguacaucgaacgccagggaaaaaccccgcugggccucguugacauuuuuaucuucuccacgucuuuuuaucugauuagcaucuuccugcaucuuaucaagauucccacacacagacauaucgugggcaaaccuugccccaagccucaccggcucaaucauaugggggucuguuccugcggacuguacaagcaccccggcgugccgaccaaauggaagcgcugaggacuaguaauaaggaaacuguaugaaugucugugggcaggaagugaagagauccuucuguaaagguuuuuggaauuaugucugcugaauaauaaacuuuuuugaaauaauaaaucugguagaaaaaugagaucucaaaggcucuuuucagagccaccaaaaaaaaaaaaaaaaaaaaaaaaaaaaaaaaaaaaaaaaaaaaaaaaaaaaaaaaaaaaaaaaaaaaaaaaaaaaaaaaaaaaaaaaaaaaaaaaaaaaa

SEQ ID NO: 32583 - RNA, 1809 nt, Artificial Sequence
  mRNA product Design b-4 (hSL-A100) comprising derived and/or modified sequence from LASV(803213;Clade II)__AAF86703__GPCmut7 (opt5)
aggagagucccgcagucggcguccagcggcucugcuuguucgugugugugucguugcaggccuuauucaagcuuaccaugggccagaucauuaccuucuuucaagaggugccccacgucaucgaagagguuaugaacauugugcugaucgcccucagccugcuugcuauucugaaggggaucuacaauguggccacaugcggacucuucggccugaucuccuuucuucugcucugugggagaucuugcagcgucacguauaaaggaguguacgaacugcagacccuggagcucaacauggcgaaucugaacaugacaaugccucuuuccuguaccaagaauaacucucaucacuauauuaugguuggcaaugaaacagggcuggagcucacccugacaaacaccagcaucauuaaucauaaauucugcaaccuuuccgacgcucacaagaaaaaucuguacgaucaugcccucaugucuaucauuagcacguuucaccuguccaucccgaacuucaaucaguaugaggccaugagcugugacuuuaacggaggcaagauuucugugcaguacaaucugucccacagcuucgcugucgaugccgcuaaccauugcggcaccaucgccaacggggugcuccaaacauuuaugcggauggcguggggaggcucuuauaucgcccuggacuccgggaagggaaauugggauuguauuaugaccagcuaccaguaccuuaucauucagaacacaaccugggaagaccacugccaguucucucgccccuccccuaucggcuaucuggggcuccugagccaaagaacgcgggauauuuacaucucccgcagacuucugggaacauuuaccuggacacucucugacagcgagggcaaugaagcucccggcggguauugucugacccgguggaugcugaucgaggccgagcucaaaugcuucggaaacaccgcuguugccaaguguaaugaaaaacaugaugaggaauuuugcgacaugcugcgccuuuucgauuucaacaagcaggcgauuaaaagacugaagacgccugcccagauguccauccagcucauuaauaaggcugugaacgcccugaucaaugaccaacuuauuaugaaaaaccaucugcgggauaucaugggcauccccuacugcaauuauagccgcuacuguuaucucaaccacacagucaccgggaagacaucucugccuagaugcugucugguguccaauggaagcuaccucaacgagacccacuuuucugacgacauugaacagcaggcugauaauaugaucacagagaugcugcaaaaagaguacauggaccggcagggcaagaccccgcuugggcugguggaucucuucgucuuuagcacguccuucuaucugauuucuaucuuucugcaccuuguuaaaauucccacacaucgccacaucgugggaaagccuugccccaaaccucauagacucaaccacaugggcauuuguagcugcggccuguacaagcaccccggggugccggucaaguggaaacggugaggacuaguaauaaggaaacuguaugaaugucugugggcaggaagugaagagauccuucuguaaagguuuuuggaauuaugucugcugaauaauaaacuuuuuugaaauaauaaaucugguagaaaaaugagaucucaaaggcucuuuucagagccaccaaaaaaaaaaaaaaaaaaaaaaaaaaaaaaaaaaaaaaaaaaaaaaaaaaaaaaaaaaaaaaaaaaaaaaaaaaaaaaaaaaaaaaaaaaaaaaaaaaaaa

SEQ ID NO: 32584 - RNA, 1809 nt, Artificial Sequence
  mRNA product Design b-4 (hSL-A100) comprising derived and/or modified sequence from LASV(GA391;Clade III)__CAA36645__GPCmut7 (opt5)
aggagagucccgcagucggcguccagcggcucugcuuguucgugugugugucguugcaggccuuauucaagcuuaccaugggccagaucgugaccuucuuucaagaggucccccacguuauugaagaggugaugaacaucgugcugauugcccucagcauccuggcuauucuuaaggggcuguacaaugucgccacaugcggacucaucggccuggugacguuccuucugcucuccgggagaucuuguagccugaucuauaaaggaaccuacgaacugcagacacucgagcugaacauggaaacccuuaauaugacaaugccucuguccugcaccaagaacaauucucaucacuauauucggguuggcaacgagacagggcucgagcugacccuuacgaauaccagcauccugaaccauaaauuuuguaaucucuccgacgcgcacaagcgcaaccuguacgaucauucucugaugagcauuaucuccacauuccaccucagcauuccgaauuuuaaccaguaugaagcuaugucuugcgacuucaauggaggcaaaaucaccgugcaguacaaccugucccacagcuuugccgucgaugccgcuggccauugugggacacuugccaauggagugcugcaaaccuucaugagaauggcuuggggcgggucuuauauugcccucgacuccggacggggcaacugggauugcaucaugacgagcuaccaguaccugaucauucagaacacaaccugggacgaucacugucaguuuucucgccccuccccuaucggguaucuuggacugcucagccaaagaacacgggacauuuacaucucccgcagacugcugggcaccuucaccuggacacucucugauagcgagggcaaugaaacgcccgggggauauugccugacccgguggaugcuuauugaggcggagcugaaguguuuuggcaacacagccguugcuaagugcaaugaaaaacaugacgaggaguucugugauaugcuccgccuguuugacuucaacaagcaggccaucagacggcuuaaaaccccugcucagauguccauccagcugauuaauaaggccgugaacgcgcucaucaaugaucaacugauuaugaaaaaccaucugcgcgacaucauggggauucccuacugcaauuauagcagauacugcuaucucaaccacacaucuaccggaaagacgucccugccucgguguugccuuaucagcaauggcucuuaccugaacgaaacaaaguucagcgacgauaucgaacagcaggccgacaauaugauuaccgagaugcuccaaaaagaguacaucgaucgccaggggaagaccccgcugggacuggucgaccuuuuuguguucuccacaucuuuuuaucucauuagcaucuuccugcaccuggugaaaauucccacccacagacauaucgucggcaagccuugucccaaaccucaccggcucaaccauaugggcauuugcuccugugggcuguacaagcagcccggaguuccggugagauggaaacgcugaggacuaguaauaaggaaacuguaugaaugucugugggcaggaagugaagagauccuucuguaaagguuuuuggaauuaugucugcugaauaauaaacuuuuuugaaauaauaaaucugguagaaaaaugagaucucaaaggcucuuuucagagccaccaaaaaaaaaaaaaaaaaaaaaaaaaaaaaaaaaaaaaaaaaaaaaaaaaaaaaaaaaaaaaaaaaaaaaaaaaaaaaaaaaaaaaaaaaaaaaaaaaaaaa

SEQ ID NO: 32585 - RNA, 1812 nt, Artificial Sequence
  mRNA product Design b-4 (hSL-A100) comprising derived and/or modified sequence from LASV(AV;Clade V)__CCA30314__GPCmut7 (opt5)
aggagagucccgcagucggcguccagcggcucugcuuguucgugugugugucguugcaggccuuauucaagcuuaccaugggccagaucgugaccuucuuucaagaggucccccacguuauugaagaggugaugaacaucgugcugauugcccucagcauccuggcuguccuuaaggggcuguacaauauugccacaugcggacucaucggccugaucacguuccuucugcucugugggagauccugcucuagcaaccuguauaaaggaguguacgaacugcagucccucgaccugaauauggagacccuuaacaugacaaugccucugucuuguaccaagaauaacagccaucacuauauucggguuggcaaugauacagggcucgaacugacccuuacaaacaccuccauccugaaucauaaauuuugcaaccucucugacgcgcacaagaaagaucuguacgaccaugcucugaugagcauuaucuccacguuccaccucagcauuccgaauuuuaaccaguaugaggccaugucuugugauuucaauggaggcaagaucuccgugcaguacaaccugagccacucuuaugccauugacgcugccaaucauugcggcaccgucgcuaacgggauccuucaaacauuuaugcgcauggccuggggaggcuccuacaucgcgcuggauagcgggagaggaaacugggacuguauuaugaccucuuaccaguaucucaucauucagaauacaaccugggagaaccacugccaguucucccggcccagcccuaucggcuaccuggggcuucugucccaacgcacgagagauauuuauaucucucggcgccuccugggaacauuuaccuggacacugagcgacuccgaaggcaaugccacccccggcggguacugucucaccagauggaugcugaucgaggcugaacuuaagugcuucggaaacacagccguggcuaaauguaaugagaagcaugaugaggaauuuugcgacaugcugcgccucuucgauuuuaacaaacaggccauuagccggcugaagucuccugcgcagauguccauccagcuuauuaauaaagccguuaacgcucugaucaaugaccaacucauuaugaagaaccaccugagagacaucaugggcauccccuauugcaauuacagcaaguauuguuaccugaaccacacgauuaccgggaaaacaucucucccuaagugcugucuggugagcaauggauccuaccuuaacgagacccauuucucugaugacaucgaacagcaggccgauaauaugauuacagagaugcugcaaaaagaauauauggagcggcagggcaagaccccgcucgggcuggucgaccuguucguguuuagcacguccuucuaccuuaucagcauuuuucuccgccuggugaaaauccccacacacagacauauugucggaaagccuugccccaaaccucaccggcugaaccauaugggcaucuguucuugcggccucuauaagcagcccgggguuccggugcgcuggaagagaugaggacuaguaauaaggaaacuguaugaaugucugugggcaggaagugaagagauccuucuguaaagguuuuuggaauuaugucugcugaauaauaaacuuuuuugaaauaauaaaucugguagaaaaaugagaucucaaaggcucuuuucagagccaccaaaaaaaaaaaaaaaaaaaaaaaaaaaaaaaaaaaaaaaaaaaaaaaaaaaaaaaaaaaaaaaaaaaaaaaaaaaaaaaaaaaaaaaaaaaaaaaaaaaaa

SEQ ID NO: 32586 - RNA, 1809 nt, Artificial Sequence
  mRNA product Design b-4 (hSL-A100) comprising derived and/or modified sequence from LASV(Togo/2016/7082;Clade VI)__AMR44577__GPCmut7 (opt5)
aggagagucccgcagucggcguccagcggcucugcuuguucgugugugugucguugcaggccuuauucaagcuuaccaugggccagaucauuaccuucuuucaagaggugccccacgucaucgaagagguuaugaacauugugcugaucgcccucagccugcuugcuauucugaaggggguguacaaugucgccacaugcggaaucaucggccucgugacguuccuguuucuuugugggagauccugcucucugauuuauaaaggaagcuacgaacuccagacccuggagcugaacauggaaacacucaauaugaccaugccucuguccuguacaaagaacucuagccaucacuauauccggguuggcaaugagaccgggcuugagcugacacucaccaacacguccauuaucaaucauaaauucugcaaccugucugacgcgcacaagcgcaaucuuuacgaucaugcucugaugagcauucucuccaccuuucaccugagcaucccgaacuucaaucaguaugaagccaugucuugugacuuuaacggaggcaaaauuuccgugcaguacaaucugagccacgccuaugcugucgaugccgcugagcauugcggcacaguggccaacgggguucuccaaaccuucaugagaauggcguggggaggcucuuacaucgcccuggacuccgggcggggaaauugggauuguaucaugacaagcuaccaguaucuuauuauccagaacaccacgugggaagaccacugccaguuuucucgccccuccccuauuggcuaccuggggcuccugagccaaagaacacgggauaucuauauuucccgcagacuucugggaaccuucacauggacccucucugacagcgagggcaacgagacccccggcggguacugucugacacgguggaugcugaucgaagcugagcucaagugcuuuggaaauacggccguggcuaaguguaacgaaaaacaugaugaggaguucugcgacaugcugcgccuuuuugauuucaauaagcaggccauccagagacugaaauccccugcgcagaugagcauucaacucaucaacaaggccgucaaugcucugauuaacgaccagcuuaucaugaaaaaucaucugcgggauaugaugggcauucccuauugcaacuacucuaaguauuguuaccucaaucacaccuccagcgggcgcacaucucugccuaagugcugucuggugagcaacggauccuaccucaaugaaacccacuucucugacgacaucgagcagcaagccgauaacaugaucacagaaaugcugcagaaagaguauauugacagacagggcaagaccccgcuugggcugguggaucucuuugucuucagcacguccuuuuaccugaucagcauuuuccugcaccuuaucaaaauucccacacaucggcacaucguuggaaagccuugccccaaaccucaucgccucaaucacaugggcauuuguucuugcggccuguauaagcagcccggggugccgaccagauggaaacggugaggacuaguaauaaggaaacuguaugaaugucugugggcaggaagugaagagauccuucuguaaagguuuuuggaauuaugucugcugaauaauaaacuuuuuugaaauaauaaaucugguagaaaaaugagaucucaaaggcucuuuucagagccaccaaaaaaaaaaaaaaaaaaaaaaaaaaaaaaaaaaaaaaaaaaaaaaaaaaaaaaaaaaaaaaaaaaaaaaaaaaaaaaaaaaaaaaaaaaaaaaaaaaaaa

SEQ ID NO: 32587 - RNA, 1809 nt, Artificial Sequence
  mRNA product Design b-4 (hSL-A100) comprising derived and/or modified sequence from LASV(KAK-428;Clade n.d. (VII))__ANH09740__GPCmut7 (opt5)
aggagagucccgcagucggcguccagcggcucugcuuguucgugugugugucguugcaggccuuauucaagcuuaccaugggccagaucgugaccuucuuucaagaggucccccacguuauugaagaggugaugaacaucgugcugauugcccucagccugcuugcuauccugaaggggcucuacaauuucgccacaugcggagucauuggccugaucacguuucuucugcucugugggagauccugcucugcgaccuauaaaggacaguacgaacugcagacacuggagcucaacauggaaagccugaauaugaccaugccucuuuccuguacaaagaacaauucucaucacuauauccgggcuggcaacaauaccgggcuggagcucacacugaccaacacgagcauuaucucccauaaauucugcaaucuuucugacgcccacaagaaaaaccuguacgaucauacccucaugagcauuaucacaaccuuucaccuguccauuccgaauuucaaccaguaugaggccaugagcugugacuuuaauggaggcaagaucucuauucaauacaaccugucccacagcuaugcuggcgaugccgcucagcauugcgggacaguggccaauggaguucuccagaccuucaugcgcauggcguggggcgggucuuaccuggcccuugacuccggaagacggggcugggauuguaucaucagcucuuaccaguaucugauuauccaaaacacgacaugggacgaucacugccaguuuucccgccccagcccuauuggguaccucggauucgugucccagaagaccagagacaucuauauuucucggcgccugcuuggcacauuuaccuggacccugagcgauuccgaaggccaugacaugcccgggggauacugucucacaagauggaugcugaucgaggcugaucugaaaugcuucggcaacacggccgucgcuaaguguaaugaaaaacacgacgaggaguuuugcgauauguggcgccucuucgacuucaacaagcaggccauccaacggcugaaagcgccugcccagaugaauauucagcuuaucaacaaggcugugaaugcccugauuaacgaccaacucaugaugaagaaucaccugagagauaucauggggauucccuauugcaacuacagcaaauuuuguuaucuuaauaacaccacaaccggacggacaucucugccucgcugcugucucaucuccaauggcagcuaccugaacgaaacccauuucucugacgauaucgagcagcaggcugacaauaugauuacggaaaugcugcagaaggaguacauggauagacaagggaaaacaccgcucggacugguugaccuuuuuguguucagcaccuccuuuuaucugaucaccauuuuccuccaccuggucaagauccccacacaucggcacauugugggcaaaccuugccccaagccucaucgccugaaccacaugggcaucuguucuugcgggcuuuacaaacagcccggagugccggucagauggaagcggugaggacuaguaauaaggaaacuguaugaaugucugugggcaggaagugaagagauccuucuguaaagguuuuuggaauuaugucugcugaauaauaaacuuuuuugaaauaauaaaucugguagaaaaaugagaucucaaaggcucuuuucagagccaccaaaaaaaaaaaaaaaaaaaaaaaaaaaaaaaaaaaaaaaaaaaaaaaaaaaaaaaaaaaaaaaaaaaaaaaaaaaaaaaaaaaaaaaaaaaaaaaaaaaaa

SEQ ID NO: 32588 - RNA, 1809 nt, Artificial Sequence; identical to SEQ ID NO: 32582
  mRNA product Design b-4 (hSL-A100) comprising derived and/or modified sequence from LASV(Pinneo-NIG-1969;Clade I)__AIT17836__GPCmut7 (opt5)

SEQ ID NO: 32589 - RNA, 1809 nt, Artificial Sequence
  mRNA product Design b-4 (hSL-A100) comprising derived and/or modified sequence from LASV(ISTH0009-NIG-2011;Clade II)__AIT17404__GPCmut7 (opt5)
aggagagucccgcagucggcguccagcggcucugcuuguucgugugugugucguugcaggccuuauucaagcuuaccaugggccagaucauuaccuucuuucaagaggugccccacgucaucgaagagguuaugaacauugugcugaucgcccucagccugcuugcuauucugaaggggaucuacaauguggccacaugcggacucuucggccuggucuccuuucuucugcucugugggagaucuugcagcacgaccuauaaaggaguguacgaacugcagacacuggagcucgacauggcgucccugaacaugaccaugccucuuucuuguacaaagaauaacagccaucacuauaucaugguuggcaaugaaaccgggcuggagcucacacugaccaacacguccauuaucaaucauaaauucugcaaccuuucugaugcucacaagaaaaaucuguacgaccaugcccucaugagcauuaucuccaccuuucaccugagcauuccgaacuucaaucaguaugaggccaugucuugugauuuuaacggaggcaagaucuccgugcaguacaaucugagccacgcuuaugccgucgacgcugccaaccauugcggcacaauugcgaauggggugcuccaaaccuucaugcggauggccuggggaggcucuuacaucgcucuggauuccgggaagggaagcugggacuguaucaugacaucuuaccaguaucuuauuauccagaacaccacgugggaagaucacugccaguuuucccgccccagcccuauuggcuaccuggggcuccugucccaaagaacacgggacaucuauauuucucgcagacuucugggaaccuucacauggacccucagcgauuccgagggcaacgaaacccccggcggguacugucugacacgguggaugcugaucgaggccgagcucaaaugcuuuggaaauacggcuguugccaaguguaacgaaaaacaugacgaggaguucugcgauaugcugcgccuuuuugacuucaauaagcaggcgaucagacggcugaaaaccccugcccagaugagcauucagcucaucaacaaggcugugaaugcccugauuaacgaucaacuuaucaugaagaaucaucugcgcgacauuaugggcauccccuauugcaacuacucuaaauauuguuaccucaaucacacagucaccgggaagacaucccugccuagaugcugucuggugagcaacggaucuuaccucaaugaaacccacuucagcgacgauaucgaacagcaggcugacaacaugauuacggagcugcuucaaaaagaguauauggaucggcagggcaagacaccgcuggggcucguggaccuguuugucuucuccaccucuuuuuaccugaucagcauuuuccuucaccucaucaaaauucccacccaucgccacaucacaggaaagccuugccccaaaccucauagacugaaucacaugggcauuuguuccugcggccuguauaagcaccccgggguuccggugaaguggaaacggugaggacuaguaauaaggaaacuguaugaaugucugugggcaggaagugaagagauccuucuguaaagguuuuuggaauuaugucugcugaauaauaaacuuuuuugaaauaauaaaucugguagaaaaaugagaucucaaaggcucuuuucagagccaccaaaaaaaaaaaaaaaaaaaaaaaaaaaaaaaaaaaaaaaaaaaaaaaaaaaaaaaaaaaaaaaaaaaaaaaaaaaaaaaaaaaaaaaaaaaaaaaaaaaaa

SEQ ID NO: 32590 - RNA, 1809 nt, Artificial Sequence
  mRNA product Design b-4 (hSL-A100) comprising derived and/or modified sequence from LASV(ISTH2010-NIG-2012;Clade II)__AIT17482__GPCmut7 (opt5)
aggagagucccgcagucggcguccagcggcucugcuuguucgugugugugucguugcaggccuuauucaagcuuaccaugggccagaucauuaccuucuuucaagaggugccccacgucaucgaagagguuaugaacauugugcugaucgcccucagccugcuugcuauucugaaggggaucuacaauguggccacaugcggacucuucggccuggucuccuuucuucugcucugugggagaucuugcagcacgaccuauaaaggaguguacgaacugcagacacuggagcucgacauggcgucccugaacaugaccaugccucuuucuuguacaaagaauaacagccaucacuauaucaugguuggcaaugaaaccgggcuggagcucacacugaccaacacguccauuaucaaucauaaauucugcaaccuuucugaugcucacaagaaaaaucuguacgaccaugcccucaugagcauuaucuccaccuuucaccugagcauuccgaacuucaaucaguaugaggccaugucuugugauuuuaacggaggcaagaucuccgugcaguacaaucugagccacgcuuaugccgucgacgcugccaaccauugcggcacaauugcgaauggggugcuccaaaccuucaugcggauggccuggggaggcucuuacaucgcucuggauuccgggaagggaagcugggacuguaucaugacaucuuaccaguaucuuauuauccagaacauuaccugggaagaucacugccaguuuucccgccccagcccuaucggcuaccuggggcuccugucccaaagaacgcgggacauuuauaucucucgcagacuucugggaacauucaccuggacacucagcgauuccgagggcaacgaaacccccggcggguacugucugacccgguggaugcugaucgaggccgagcucaaaugcuuuggaaauacagcuguugccaaguguaacgaaaaacaugacgaggaguucugcgauaugcugcgccuuuuugacuucaauaagcaggcgauuagacggcugaaaacgccugcccagaugagcauccagcucauuaacaaggcugugaaugcccugaucaacgaucaacuuauuaugaagaaucaucugcgcgacaucaugggcauccccuauugcaacuacucuaaauauuguuaccucaaucacaccgucacagggaagaccucccugccuagaugcugucuggugagcaacggaucuuaccucaaugaaacacacuucagcgacgauauugaacagcaggcugacaacaugaucaccgagcugcuucaaaaagaguauauugaucggcagggcaagacgccgcuggggcucguggaccuguuugucuucuccacaucuuuuuaccugaucagcauuuuccuucaccucguuaaaauccccacccaucgccacguggugggaaagccuugccccaaaccucauagacugaaucacaugggcauuuguuccugcggccuguauaagcaccccggggucccggugaaguggaaacggugaggacuaguaauaaggaaacuguaugaaugucugugggcaggaagugaagagauccuucuguaaagguuuuuggaauuaugucugcugaauaauaaacuuuuuugaaauaauaaaucugguagaaaaaugagaucucaaaggcucuuuucagagccaccaaaaaaaaaaaaaaaaaaaaaaaaaaaaaaaaaaaaaaaaaaaaaaaaaaaaaaaaaaaaaaaaaaaaaaaaaaaaaaaaaaaaaaaaaaaaaaaaaaaaa

SEQ ID NO: 32591 - RNA, 1809 nt, Artificial Sequence
  mRNA product Design b-4 (hSL-A100) comprising derived and/or modified sequence from LASV(Lassa virus/H.sapiens-wt/NGA/2015/ISTH_0543;Clade II)__AVO03639__GPCmut7 (opt5)
aggagagucccgcagucggcguccagcggcucugcuuguucgugugugugucguugcaggccuuauucaagcuuaccaugggccagaucauuaccuucuuucaagaggugccccacgucaucgaagagguuaugaacauugugcugaucgcccucagccugcuugcuauucugaaggggaucuacaauguggccacaugcggacucuucggccuggucuccuuucuucugcucugugggagaucuugcagcacgaccuauaaaggaguguacgaacugcagacacuggagcucgacauggcgaaccugaauaugaccaugccucuuuccuguacaaagaacaauucucaucacuauaucaugguuggcaacgaaaccgggcuggagcucacacugaccaauacgagcauuaucaaccauaaauucugcaaucuuuccgaugcucacaagaaaaaccuguacgaccaugcccucaugucuauuaucagcaccuuucaccuguccauuccgaauuucaaccaguaugaggccaugagcugugauuuuaauggaggcaagaucucugugcaguacaaccugucccacacauaugcugucgacgccgcuaaucauugcggcaccauugccaacggggugcuccaaacauucaugcggauggcguggggaggcagcuacaucgcccuggauucugggaagggauccugggacuguaucaugaccagcuaccaguaucuuguuauucagaacacgacaugggaagaucacugccaguuuucucgccccuccccuaucggcuaccuggggcuccugagccaaagaacccgggacauuuauaucucccgcagacuucugggaacauucaccuggacccucucugauagcgagggcaaugaaacacccggcggguacugucugacgcgguggaugcugauugaggcugagcucaaaugcuuuggaaacaccgccguggcuaaguguaaugaaaaacaugacgaggaguucugcgauaugcugcgccuuuuugacuucaacaagcaggccaucagacggcugaaaaccccugcgcagauguccauccagcucauuaauaaggccgucaacgcucugaucaaugaucaacuuauuaugaagaaccaucugcgcgacaucaugggcauucccuauugcaauuacagcaaauauuguuaccucaaccacacagugacagggaagaccucucugccuagaugcugucugguguccaauggaagcuaccucaacgaaacgcacuucucugacgauaucgaacagcaggccgacaauaugaucacagagcugcuucaaaaagaguauauugaucggcagggcaagaccccgcuggggcucgucgaccuguuuguuuucagcaccuccuuuuaccugaucucuauuuuccuucaccucgugaaaauccccacacaucgccacauuaccggaaagccuugccccaaaccucauagacugaaccacaugggcaucuguagcugcggccuguauaagcaccccggggugccggucaaguggaaacggugaggacuaguaauaaggaaacuguaugaaugucugugggcaggaagugaagagauccuucuguaaagguuuuuggaauuaugucugcugaauaauaaacuuuuuugaaauaauaaaucugguagaaaaaugagaucucaaaggcucuuuucagagccaccaaaaaaaaaaaaaaaaaaaaaaaaaaaaaaaaaaaaaaaaaaaaaaaaaaaaaaaaaaaaaaaaaaaaaaaaaaaaaaaaaaaaaaaaaaaaaaaaaaaaa

SEQ ID NO: 32592 - RNA, 1809 nt, Artificial Sequence
  mRNA product Design b-4 (hSL-A100) comprising derived and/or modified sequence from LASV(Lassa virus/H.sapiens-wt/NGA/2016/ISTH_0009;Clade II)__AVO03571__GPCmut7 (opt5)
aggagagucccgcagucggcguccagcggcucugcuuguucgugugugugucguugcaggccuuauucaagcuuaccaugggccagaucauuaccuucuuucaagaggugccccacgucaucgaagagguuaugaacauugugcugaucgcccucagccugcuugcuauucugaaggggaucuacaauguggccacaugcggacuccugggccuugucuccuuccugcuccugugugggagaucuugcagcacgaccuauaaaggaguguacgaacugcagacacucgagcuggacauggcgucccuuaacaugaccaugccucugucuuguacaaagaauaacagccaucacuauaucaugguuggcaaugaaaccgggcucgagcugacacuuaccaacacguccauuaucaaucauaaauuuugcaaccugucugaugcucacaagaaaaaucucuacgaccaugcccugaugagcauuaucuccaccuuccaccugagcauuccgaacuuuaaucaguaugaggccaugucuugugauuucaacggaggccggaucuccgugcaguacaaucucagccacucuuaugcugucgacgccgcuaaccauugcggcacaauugccaauggggugcugcaaaccuuuaugcgcauggcguggggaggcuccuacaucgcccuugauagcgggaagggaucuugggacuguaucaugacauccuaccaguaucugauuauccagaacaccacgugggaagaucacugccaguucagcagacccuccccuauuggcuaccucgggcugcuuucucaacggacacgcgacaucuauauuagcagacggcugcucggaaccuuuacauggacccuguccgauagcgagggcaacgaaacccccggcggguacugucugacacgcuggaugcucaucgaggcugagcugaagugcuucggaaauacggccguugcuaaauguaacgaaaagcaugacgaggaauuuugcgauaugcuuagacuguucgacuuuaauaaacaggccauccggcgccucaagaccccugcgcagaugucuauucagcugaucaacaaagccgugaaugcucuuauuaacgaucaacugaucaugaagaaucaccucagagacauuaugggcauccccuauugcaacuacuccaaguauuguuaccugaaucacacagucaccgggaaaacaagccugccucggugcugucucgugucuaacggaagcuaccugaaugagacccauuucuccgacgauaucgaacagcaggccgacaacaugauuacggagcuucugcaaaaggaguauaucgaucgccagggcaaaacaccgcucgggcugguggaccuguucgucuuuucuaccagcuucuaccuuauuuccaucuuucuccaccugguuaagauucccacccauagacacaucacaggaaaaccuugccccaagccucaucggcugaaucacaugggcauuuguagcugcggccucuauaaccaccccggggugccggugaaauggaagcgcugaggacuaguaauaaggaaacuguaugaaugucugugggcaggaagugaagagauccuucuguaaagguuuuuggaauuaugucugcugaauaauaaacuuuuuugaaauaauaaaucugguagaaaaaugagaucucaaaggcucuuuucagagccaccaaaaaaaaaaaaaaaaaaaaaaaaaaaaaaaaaaaaaaaaaaaaaaaaaaaaaaaaaaaaaaaaaaaaaaaaaaaaaaaaaaaaaaaaaaaaaaaaaaaaa

SEQ ID NO: 32593 - RNA, 1809 nt, Artificial Sequence
  mRNA product Design b-4 (hSL-A100) comprising derived and/or modified sequence from LASV(Lassa virus/H.sapiens-wt/NGA/2016/ISTH_0017;Clade II)__AVO03567__GPCmut7 (opt5)
aggagagucccgcagucggcguccagcggcucugcuuguucgugugugugucguugcaggccuuauucaagcuuaccaugggccagaucauuaccuucuuucaagaggugccccacgucaucgaagagguuaugaacauugugcugaucgcccucagccugcuugcuauucugaaggggaucuacaauguggccacaugcggacucuucggccuggucuccuuucuucugcucugugggagaucuugcagcacgaccuauaaaggaguguacgaacugcagacacuggagcucgacauggcgucccugaacaugaccaugccucuuucuuguacaaagaauaacagccaucacuauaucaugguuggcaaugaaaccgggcuggagcucacacugaccaacacguccauuaucaaucauaaauucugcaaccuuucugaugcucacaagaaaaaucuguacgaccaugcccucaugagcauuaucuccaccuuucaccugagcauuccgaacuucaaucaguaugaggccaugucuugugauuuuaacggaggcaagaucuccgugcaguacaaucugagccacacauaugcuauugacgccgcuaaccauugcggcaccaucgccaaugggguccuccaaacauucaugcggauggcguggggaggcucuuacaucgcccuggauuccgggaagggaagcugggacuguauuaugaccucuuaccaguaucuuaucauucagaacacgacaugggaagaucacugccaguuuucccgccccagcccuaucggcuaccuggggcuccugucccaaagaacccgggacauuuauaucucucgcagacuucugggaacauucaccuggacccucagcgauuccgagggcaacgaaacacccggcggguacugucugacgcgguggaugcugaucgaggcugagcucaaaugcuuuggaaauaccgccguggcuaaguguaacgaaaaacaugacgaggaguucugcgauaugcugcgccuuuuugacuucaauaagcaggccauuagacggcugaaaaccccugcgcagaugagcauccagcucauuaacaaggccguuaaugcucugaucaacgaucaacuuauuaugaagaaucaucugcgcgacaucaugggcauccccuauugcaacuacucuaaauauuguuaccucaaucacacagugacagggaagaccucccugccuagaugcugucuggucagcaacggaucuuaccucaaugaaacgcacuucagcgacgauauugaacagcaggccgacaacaugaucacagagcugcuucaaaaagaguauauggaucggcagggcaagaccccgcuggggcucguggaccuguuuguguucuccaccucuuuuuaccugauuagcaucuuccuucaccucguccgcauucccacacauagacacguuaucggaaaaccuugccccaagccucaucggcugaaucacaugggcauuuguuccugcggccuguauaaacaccccggggugccggugaaguggaagcgcugaggacuaguaauaaggaaacuguaugaaugucugugggcaggaagugaagagauccuucuguaaagguuuuuggaauuaugucugcugaauaauaaacuuuuuugaaauaauaaaucugguagaaaaaugagaucucaaaggcucuuuucagagccaccaaaaaaaaaaaaaaaaaaaaaaaaaaaaaaaaaaaaaaaaaaaaaaaaaaaaaaaaaaaaaaaaaaaaaaaaaaaaaaaaaaaaaaaaaaaaaaaaaaaaa

SEQ ID NO: 32594 - RNA, 1809 nt, Artificial Sequence
  mRNA product Design b-4 (hSL-A100) comprising derived and/or modified sequence from LASV(Lassa virus/H.sapiens-wt/NGA/2018/ISTH_0959;Clade II)__AVV65099__GPCmut7 (opt5)
aggagagucccgcagucggcguccagcggcucugcuuguucgugugugugucguugcaggccuuauucaagcuuaccaugggccagaucauuaccuucuuucaagaggugccccacgucaucgaagagguuaugaacauugugcugaucgcccucagccugcuugcuauucugaaggggaucuacaauguggucacaugcggacucuucggccugguguccuuucuucugcucugugggagaucuugcagcacgaccuauaaaggaguuuacgaacugcagacacuggagcucgacauggccucccugaacaugaccaugccucuuucuuguacaaagaauaacagccaucacuauaucauggugggcaaugaaaccgggcuggagcucacacugaccaacacguccauuaucaaucauaaauucugcaaccuuucugaugcgcacaagaaaaaucuguacgaccaugcucucaugagcauuaucuccaccuuucaccugagcauuccgaacuucaaucaguaugaggccaugucuugugauuuuaacggaggcaagaucuccguccaguacaaucugagccacgccuaugcuauugacgccgcuaaccauugcggcacaaucgccaauggggugcuccaaaccuucaugcggauggcguggggaggcucuuacaucgcccuggauuccgggaagggaagcugggacuguauuaugacaucuuaccaguaucuuaucauucagaacaccacgugggaagaucacugccaguuuucccgccccagcccuaucggcuaccuggggcuccugucccaaagaacacgggacauuuauaucucucgcagacuucugggaaccuucacauggacccucagcgauuccgagggcaacgaaacccccggcggguacugucugacacgguggaugcugaucgaggcugagcucaaaugcuuuggaaauacggccguugcuaaguguaacgaaaaacaugacgaggaguucugcgauaugcugcgccuuuuugacuucaauaagcaggccauuagacggcugaaaaccccugcgcagaugagcauccagcucauuaacaaggccgugaaugcucugaucaacgaucaacuuauuaugaagaaucaucugcgcgacaucaugggcauccccuauugcaacuacucuaaauauuguuaccucaaucacacagucaccgggaagacaucccugccuagaugcugucuggugagcaacggaucuuaccucaaugaaacccacuucagcgacgauauugaacagcaggccgacaacaugaucacggagcugcuucaaaaagaguauauugaucggcagggcaagacaccgcuggggcucguggaccuguuugucuucuccaccucuuuuuaccugaucagcauuuuccuucaccucguuaaaauccccacccaucgccacgugauuggaaagccuugccccaaaccucauagacugaaucacaugggcaucuguuccugcggccuguauaagcaccccggggugccggucaaguggaaacggugaggacuaguaauaaggaaacuguaugaaugucugugggcaggaagugaagagauccuucuguaaagguuuuuggaauuaugucugcugaauaauaaacuuuuuugaaauaauaaaucugguagaaaaaugagaucucaaaggcucuuuucagagccaccaaaaaaaaaaaaaaaaaaaaaaaaaaaaaaaaaaaaaaaaaaaaaaaaaaaaaaaaaaaaaaaaaaaaaaaaaaaaaaaaaaaaaaaaaaaaaaaaaaaaa

SEQ ID NO: 32595 - RNA, 1809 nt, Artificial Sequence
  mRNA product Design b-4 (hSL-A100) comprising derived and/or modified sequence from LASV(LASV003-NIG-2008;Clade II)__AIT17580__GPCmut7 (opt5)
aggagagucccgcagucggcguccagcggcucugcuuguucgugugugugucguugcaggccuuauucaagcuuaccaugggccagaucauuaccuucuuucaagaggugccccacgucaucgaagagguuaugaacauugugcugaucgcccucagccugcuugcuauucugaaggggaucuacaauguggccacaugcggacucuucggccuggucuccuuucuucugcucugugggagaucuugcagcacgaccuauaaaggaguguacgaacugcagacacuggagcucgacauggcgucccugaacaugaccaugccucuuucuuguacaaagaauaacagccaucacuauaucaugguuggcaaugaaaccgggcuggagcucacacugaccaacacguccauuaucaaucauaaauucugcaaccuuucugaugcucacaagaaaaaucuguacgaccaugcccucaugagcauuaucuccaccuuucaccugagcauuccgaacuucaaucaguaugaggccaugucuugugauuuuaacggaggcaagaucuccgugcaguacaaucugagccacacauaugcugucgacgccgcuaaccauugcggcaccauugccaauggggugcuccaaacauucaugcggauggcguggggaggcucuuacaucgcccuggauuccgggaagggaagcugggacuguaucaugaccucuuaccaguaucuuauuauccagaacacgacaugggaagaucacugccaguuuucccgccccagcccuauuggcuaccuggggcuccugucccaaagaacccgggacaucuauauuucucgcagacuucugggaacauucaccuggacccucagcgauuccgagagcaacgaaacacccggcggcuacugucugacgcgguggaugcugaucgaggcugagcucaaaugcuuugggaauaccgccguugcuaaguguaacgaaaaacaugacgaggaguucugcgauaugcugcgccuuuuugacuucaauaagcaggccaucagacggcugaaagcgccugcccagaugucuauucagcucaucaacaaggcugugaaugcccugauuaacgaucaacuuaucaugaagaaucaucugcgcgacauuaugggaauccccuauugcaacuacuccaaauauuguuaccucaaucacacagucaccggcagaacaagccugccucggugcugucuggugucuaacgggagcuaccucaaugaaacccacuucuccgacgauaucgaacagcaggcugacaacaugauuacggagcugcuucaaaaggaguauauggaucgccagggaaaaacaccgcugggccucguggaccuguuugucuucucuaccagcuuuuaccugaucuccauuuuccuucaccucguuaagauccccacccauagacacgugauugggaaaccuugccccaagccucaucggcugaaucacaugggaaucuguagcugcggccuguauaaacaccccggcgugccggucaaguggaagcgcugaggacuaguaauaaggaaacuguaugaaugucugugggcaggaagugaagagauccuucuguaaagguuuuuggaauuaugucugcugaauaauaaacuuuuuugaaauaauaaaucugguagaaaaaugagaucucaaaggcucuuuucagagccaccaaaaaaaaaaaaaaaaaaaaaaaaaaaaaaaaaaaaaaaaaaaaaaaaaaaaaaaaaaaaaaaaaaaaaaaaaaaaaaaaaaaaaaaaaaaaaaaaaaaaa

SEQ ID NO: 32596 - RNA, 1809 nt, Artificial Sequence
  mRNA product Design b-4 (hSL-A100) comprising derived and/or modified sequence from LASV(LASV035-NIG-2009;Clade II)__AIT17588__GPCmut7 (opt5)
aggagagucccgcagucggcguccagcggcucugcuuguucgugugugugucguugcaggccuuauucaagcuuaccaugggccagaucauuaccuucuuucaagaggugccccacgucaucgaagagguuaugaacauugugcugaucgcccucagccugcuugcuauucugaaggggaucuacaauguggccacaugcggacucuucggccuggucuccuuucuucugcucugugggagaucuugcagcacgaccuauaaaggaguguacgaacugcagacacuggagcucgacauggcgucccugaacaugaccaugccucuuucuuguacaaagaauaacagccaucacuauaucaugguuggcaaugaaaccgggcuggagcucacacugaccaacacguccauuaucaaucauaaauucugcaaccuuucugaugcucacaagaaaaaucuguacgaccaugcccucaugagcauuaucuccaccuuucaccugagcauuccgaacuucaaucaguaugaggccaugucuugugauuuuaacggaggcaagaucuccgugcaguacaaucugagccacgcuuaugccgucgacgcugccaaccauugcggcacaauugcgaauggggugcuccaaaccuucaugcggauggccuggggaggcucuuacaucgcucuggauuccgggaagggaagcugggacuguaucaugacaucuuaccaguaucuuauuauccagaacaccacgugggaagaucacugccaguuuucccgccccagcccuauuggcuaccuggggcuccugucccaaagaacacgggacaucuauauuucucgcagacuucugggaaccuucacauggacccucagcgauuccgagggcaacgaaacccccggcggguacugucugacacgguggaugcugaucgaggccgagcucaaaugcuuuggaaauacggcuguugccaaguguaacgaaaaacaugacgaggaguucugcgauaugcugcgccuuuuugacuucaauaagcaggcgaucagacggcugaaagccccugcucagaugagcauucagcucaucaacaaggccgugaaugcucugauuaacgaucaacuuaucaugaagaaucaucugcgcgacauuaugggcauccccuauugcaacuacucuaaauauuguuaccucaaucacaccgucacagggaagaccucccugccuagaugcugucuggugagcaacggaucuuaccucaaugaaacacacuucagcgacgauaucgaacagcaggccgacaacaugauuaccgagcugcuucaaaaagaguauaucgaucggcagggcaagacgccgcuggggcucguggaccuguuugucuucuccacaucuuuuuaccugauuagcaucuuccuucaccucguuaaaauucccacccaucgccacgugaucggaaagccuugccccaaaccucauagacugaaucacaugggcauuuguuccugcggccuguauaagcaccccggggugccggucaaguggaaacggugaggacuaguaauaaggaaacuguaugaaugucugugggcaggaagugaagagauccuucuguaaagguuuuuggaauuaugucugcugaauaauaaacuuuuuugaaauaauaaaucugguagaaaaaugagaucucaaaggcucuuuucagagccaccaaaaaaaaaaaaaaaaaaaaaaaaaaaaaaaaaaaaaaaaaaaaaaaaaaaaaaaaaaaaaaaaaaaaaaaaaaaaaaaaaaaaaaaaaaaaaaaaaaaaa

SEQ ID NO: 32597 - RNA, 1809 nt, Artificial Sequence
  mRNA product Design b-4 (hSL-A100) comprising derived and/or modified sequence from LASV(LASV1000-NIG-2009;Clade II)__AIT17782__GPCmut7 (opt5)
aggagagucccgcagucggcguccagcggcucugcuuguucgugugugugucguugcaggccuuauucaagcuuaccaugggccagaucauuaccuucuuucaagaggugccccacgucaucgaagagguuaugaacauugugcugaucgcccucagccugcuugcuauucugaaggggaucuacaauguggccacaugcggacucuucggccuggucuccuuucuucugcucugugggagaucuugcagcacgaccuauaaaggaguguacgaacugcagacacuggagcucgacauggcgucccugaacaugaccaugccucuuucuuguacaaagaauaacagccaucacuauaucaugguuggcaaugaaaccgggcuggagcucacacugaccaacacguccauuaucaaucauaaauucugcaaccuuucugaugcucacaagaaaaaucuguacgaccaugcccucaugagcauuaucuccaccuuucaccugagcauuccgaacuucaaucaguaugaggccaugucuugugauuuuaacggaggcaagaucuccgugcaguacaaucugagccacacauaugcugucgacgccgcuaaccauugcggcaccauugccaauggggugcuccaaacauucaugcggauggcguggggaggcucuuacaucgcccuggauuccgggaagggaagcugggacuguaucaugaccucuuaccaguaucuuauuauccagaacacgacaugggaagaucacugccaguuuucccgccccagcccuauuggcuaccuggggcuccugucccaaagaacccgggacaucuauauuucucgcagacuucugggaacauucaccuggacccucagcgauuccgagggcaacgaaacacccggcggguacugucugacgcgguggaugcugaucgaggcugagcucaaaugcuuuggaaauaccgccguugcuaaguguaacgaaaaacaugacgaggaguucugcgauaugcugcgccuuuuugacuucaauaagcaggccaucaaaagacugaagaccccugcgcagaugagcauucagcucaucaacaaggccgugaaugcucugauuaacgaucaacuuaucaugaaaaaucaucugcgggacauuaugggcauccccuauugcaacuacucuaaguauuguuaccucaaucacacagucacagggaaaaccucccugccucgcugcugucuggugagcaacggaucuuaccucaaugaaacgcacuucagcgacgauaucgaacagcaggccgacaacaugauuacagagcugcuucaaaaggaguauaucgauagacagggcaaaaccccgcuggggcucguggaccuguuugucuucuccaccucuuuuuaccugauuagcaucuuccuucaccucguuaagauucccacacaucggcacguggugggaaaaccuugccccaagccucaucgccugaaucacaugggcaucuguuccugcggccuguauaagcaccccggggucccggugaaauggaagagaugaggacuaguaauaaggaaacuguaugaaugucugugggcaggaagugaagagauccuucuguaaagguuuuuggaauuaugucugcugaauaauaaacuuuuuugaaauaauaaaucugguagaaaaaugagaucucaaaggcucuuuucagagccaccaaaaaaaaaaaaaaaaaaaaaaaaaaaaaaaaaaaaaaaaaaaaaaaaaaaaaaaaaaaaaaaaaaaaaaaaaaaaaaaaaaaaaaaaaaaaaaaaaaaaa

SEQ ID NO: 32598 - RNA, 1809 nt, Artificial Sequence
  mRNA product Design b-4 (hSL-A100) comprising derived and/or modified sequence from LASV(LASV221-NIG-2010;Clade II)__AIT17624__GPCmut7 (opt5)
aggagagucccgcagucggcguccagcggcucugcuuguucgugugugugucguugcaggccuuauucaagcuuaccaugggccagaucauuaccuucuuucaagaggugccccacgucaucgaagagguuaugaacauugugcugaucgcccucagccugcuugcuauucugaaggggaucuacaauguggccacaugcggacucuucggccuggucuccuuucuucugcucugugggagaucuugcagcacgaccuauaaaggaguguacgaacugcagacacuggagcucgacauggcgucccugaacaugaccaugccucuuucuuguacaaagaauaacagccaucacuauaucaugguuggcaaugaaaccgggcuggagcucacacugaccaacacguccauuaucaaucauaaauucugcaaccuuucugaugcucacaagaaaaaucuguacgaccaugcccucaugagcauuaucuccaccuuucaccugagcauuccgaacuucaaucaguaugaggccaugucuugugauuuuaacggaggcaagaucuccgugcaguacaaucugagccacacauaugcuauugacgccgcuaaccauugcggcaccaucgccaaugggguccuccaaacauucaugcggauggcguggggaggcucuuacaucgcccuggauuccgggaagggaagcugggacuguauuaugaccucuuaccaguaucuuaucauucagaacacgacaugggaagaucacugccaguuuucccgccccagcccuaucggcuaccuggggcuccugucccaaagaacccgggacauuuauaucucucgcagacuucugggaacauucaccuggacccucagcgauuccgagggcaacgaaacacccggcggguacugucugacgcgguggaugcugaucgaggcugagcucaaaugcuuuggaaauaccgccguggcuaaguguaacgaaaaacaugacgaggaguucugcgauaugcugcgccuuuuugacuucaauaagcaggccauuagacggcugaaaaccccugcgcagaugagcauccagcucauuaacaaggccguuaaugcucugaucaacgaucaacuuauuaugaagaaucaucugcgcgacaucaugggcauccccuauugcaacuacucuaaauauuguuaccucaaucacacagugacagggaagaccucccugccuagaugcugucuggucagcaacggaucuuaccucaaugaaacgcacuucagcgacgauauugaacagcaggccgacaacaugaucacagagaugcugcaaaaagaguauauggaucggcagggcaagaccccgcuugggcugguggaccucuuuguguucuccaccucuuuuuaccugauuagcaucuuccugcaccuugucaaaauucccacacaucgccacguuaucggaaagccuugccccaaaccucauagacucaaucacaugggcauuuguuccugcggccuguauaagcaccccggggugccggugaaguggaaacggugaggacuaguaauaaggaaacuguaugaaugucugugggcaggaagugaagagauccuucuguaaagguuuuuggaauuaugucugcugaauaauaaacuuuuuugaaauaauaaaucugguagaaaaaugagaucucaaaggcucuuuucagagccaccaaaaaaaaaaaaaaaaaaaaaaaaaaaaaaaaaaaaaaaaaaaaaaaaaaaaaaaaaaaaaaaaaaaaaaaaaaaaaaaaaaaaaaaaaaaaaaaaaaaaa

SEQ ID NO: 32599 - RNA, 1809 nt, Artificial Sequence
  mRNA product Design b-4 (hSL-A100) comprising derived and/or modified sequence from LASV(LASV237-NIG-2010;Clade II)__AIT17638__GPCmut7 (opt5)
aggagagucccgcagucggcguccagcggcucugcuuguucgugugugugucguugcaggccuuauucaagcuuaccaugggccagaucauuaccuucuuucaagaggugccccacgucaucgaagagguuaugaacauugugcugaucgcccucagccugcuugcuauucugaaggggaucuacaauguggccacaugcggacucuucggccuggucuccuuucuucugcucugugggagaucuugcagcacgaccuauaaaggaguguacgaacugcagacacuggagcucgacauggcgucccugaacaugaccaugccucuuucuuguacaaagaauaacagccaucacuauaucaugguuggcaaugaaaccgggcuggagcucacacugaccaacacguccauuaucaaucauaaauucugcaaccuuucugaugcucacaagaaagaccuguacgaucaugcccucaugagcauuaucuccaccuuucaccugagcauuccgaauuucaaccaguaugaggccaugucuugugacuuuaauggaggcaagaucuccgugcaguacaaccugagccacacauaugcugucgaugccgcuaaucauugcggcaccauugccaacggggugcuccaaacauucaugcggauggcguggggaggcucuuacaucgcccuggacuccgggaagggaagcugggauuguaucaugaccucuuaccaguaucuuauuauccagaauacgacaugggaagaccacugccaguuuucccgccccagcccuauuggcuaccuggggcuccugucccaaagaacccgggauaucuauauuucucgcagacuucugggaacauucaccuggacccucagcgacuccgagggcaacgaaacacccggcggguacugucugacgcgguggaugcugaucgaggcugagcucaaaugcuuuggaaacaccgccguugcuaaguguaaugaaaaacaugaugaggaguucugcgacaugcugcgccuuuuugauuucaacaagcaggccaucagacggcugaaaaccccugcgcagaugagcauucagcucaucaauaaggccgugaacgcucugauuaaugaccaacuuaucaugaagaaccaucugcgcgacauuaugggcauccccuauugcaauuacucuaaauauuguuaccucaaccacacagucacagggaagaccucccugccuagaugcugucuggugagcaauggaucuuaccucaacgaaacgcacuucagcgaugacaucgaacagcaggccgauaauaugauuacagagcugcuucaaaaagaguauauggaccggcagggcaagaccccgcuggggcucguggaucuguuugucuucuccaccucuuuuuaccugaucagcauuuuccuucaccucaucaaaauucccacacaucgccacaucaccggaaagccuugccccaaaccucauagacugaaccacaugggcauuuguuccugcggccuguauaagcaccccgggguuccggugaaguggaaacggugaggacuaguaauaaggaaacuguaugaaugucugugggcaggaagugaagagauccuucuguaaagguuuuuggaauuaugucugcugaauaauaaacuuuuuugaaauaauaaaucugguagaaaaaugagaucucaaaggcucuuuucagagccaccaaaaaaaaaaaaaaaaaaaaaaaaaaaaaaaaaaaaaaaaaaaaaaaaaaaaaaaaaaaaaaaaaaaaaaaaaaaaaaaaaaaaaaaaaaaaaaaaaaaaa

SEQ ID NO: 32600 - RNA, 1809 nt, Artificial Sequence
  mRNA product Design b-4 (hSL-A100) comprising derived and/or modified sequence from LASV(LASV253-NIG-2011;Clade II)__AIT17670__GPCmut7 (opt5)
aggagagucccgcagucggcguccagcggcucugcuuguucgugugugugucguugcaggccuuauucaagcuuaccaugggccagaucauuaccuucuuucaagaggugccccacgucaucgaagagguuaugaacauugugcugaucgcccucagccugcuugcuauucugaaggggaucuacaauguggccacaugcggacucuucggccuggucuccuuucuucugcucugugggagaucuugcagcacgaccuauaaaggaguguacgaacugcagacacuggagcucgacauggcgucccugaacaugaccaugccucuuucuuguacaaagaauaacagccaucacuauaucaugguuggcaaugaaaccgggcuggagcucacacugaccaacacguccauuaucaaucauaaauucugcaaccuuucugaugcucacaagaaaaaucuguacgaccaugcccucaugagcauuaucuccaccuuucaccugagcauuccgaacuucaaucaguaugaggccaugucuugugauuuuaacggaggcaagaucuccgugcaguacaaucugagccacacauaugcugucgacgccgcuaaccauugcggcaccauugccaauggggugcuccaaacauucaugcggauggcguggggaggcucuuacaucgcccuggauuccgggaagggaagcugggacuguaucaugaccucuuaccaguaucuuauuauccagaacacgacaugggaagaucacugccaguuuucccgccccagcccuauuggcuaccuggggcuccugucccaaagaacccgggacaucuauauuucucgcagacuucugggaacauucaccuggacccucagcgauuccgagggcaacgaaacacccggcggguacugucugacgcgguggaugcugaucgaggcugagcucaaaugcuuuggaaauaccgccguugcuaaguguaacgaaaaacaugacgaggaguucugcgauaugcugcgccuuuuugacuucaauaagcaggccaucagacggcugaaagcgccugcccagaugagcauucagcucaucaacaaggcugugaaugcccugauuaacgaucaacuuaucaugaagaaucaucugcgcgacauuaugggcauccccuauugcaacuacucuaaauauuguuaccucaaucacacagucaccgggagaacaucccugccucggugcugucuggugagcaacggaucuuaccucaaugaaacccacuucagcgacgauaucgaacagcaggcugacaacaugauuacggagcugcuucaaaaggaguauaucgaucgccagggcaaaacaccgcuggggcucguggaccuguuugucuucuccaccucuuuuuaccugauuagcaucuuccuucaccucguuaagauucccacccauagacacaucauuggaaaaccuugccccaagccucaucggcugaaucacaugggcaucuguuccugcggccuguauaaacaccccggggugccggugaaguggaagcgcugaggacuaguaauaaggaaacuguaugaaugucugugggcaggaagugaagagauccuucuguaaagguuuuuggaauuaugucugcugaauaauaaacuuuuuugaaauaauaaaucugguagaaaaaugagaucucaaaggcucuuuucagagccaccaaaaaaaaaaaaaaaaaaaaaaaaaaaaaaaaaaaaaaaaaaaaaaaaaaaaaaaaaaaaaaaaaaaaaaaaaaaaaaaaaaaaaaaaaaaaaaaaaaaaa

SEQ ID NO: 32601 - RNA, 1809 nt, Artificial Sequence
  mRNA product Design b-4 (hSL-A100) comprising derived and/or modified sequence from LASV(LASV254-NIG-2011;Clade II)__AIT17674__GPCmut7 (opt5)
aggagagucccgcagucggcguccagcggcucugcuuguucgugugugugucguugcaggccuuauucaagcuuaccaugggccagaucauuaccuucuuucaagaggugccccacgucaucgaagagguuaugaacauugugcugaucgcccucagccugcuugcuauucugaaggggaucuacaauguggccacaugcggacucuucggccuggucuccuuucuucugcucugugggagaucuugcagcacgaccuauaaaggaguguacgaacugcagacacuggagcucgacaugaccaaccugaauaugacaaugccucuuuccuguaccaagaacaauucucaucacuauaucaugguuggcaacgaaacagggcuggagcucacccugacgaauaccagcauuaucaaccauaaauucugcaaucuuuccgaugcgcacaagaaaaaccuguacaaucaugcucucaugucuauuaucagcacauuucaccuguccauuccgaacuucaaucaguaugaggccaugagcugugacuuuaacggaggcaagaucucugugcaguacaaucugucccacagcuaugccgucgaugcugccaaccauugcggcaccauugcuaacggggugcuccaaacauucaugcggauggccuggggaggcucuuacaucgcgcuggacuccgggaagggaaauugggauuguaucaugaccagcuaccaguaucuuauuauccagaacacgacaugggaagaccacugccaguuuucucgccccuccccuauuggcuaccuggggcuccugagccaaagaacccgggauaucuauauuucccgcagacuucugggaacauucaccuggacccucucugacagcgagggcaaugaaacacccggcggguacugucugacgcgguggaugcugaucgaggccgagcucaaaugcuuuggaaacaccgcuguugccaaguguaaugaaaaacaugaugaggaguucugcgacaugcugcgccuuuuugauuucaacaagcaggcuaucagacggcugaaaaccccugcccaggcgaauauucagcucaucaacaaggccgugaaugcucugauuaacgaccaacuuaucaugaagaaucaucugcgcgauauuaugggcauccccuauugcaacuacuccaaauauuguuaccucaaucacacagucacagggaagaccagccugccuagaugcugucuggugucuaacggauccuaccucaaugaaacgcacuucagcgacgacaucgaacagcaggccgauaacaugauuacagagcugcuucaaaaagaguauauggaccggcagggcaagaccccgcuggggcucguggaucuguuugucuucucuaccagcuuuuaccugaucuccauuuuccuucaccucguuaaaauccccacacaucgccacgugauuggaaagccuugccccaaaccucauagacugaaccacaugggcaucuguucuugcggccuguauaagcaccccggggugccggucaaguggaaacggugaggacuaguaauaaggaaacuguaugaaugucugugggcaggaagugaagagauccuucuguaaagguuuuuggaauuaugucugcugaauaauaaacuuuuuugaaauaauaaaucugguagaaaaaugagaucucaaaggcucuuuucagagccaccaaaaaaaaaaaaaaaaaaaaaaaaaaaaaaaaaaaaaaaaaaaaaaaaaaaaaaaaaaaaaaaaaaaaaaaaaaaaaaaaaaaaaaaaaaaaaaaaaaaaa

SEQ ID NO: 32602 - RNA, 1809 nt, Artificial Sequence
  mRNA product Design b-4 (hSL-A100) comprising derived and/or modified sequence from LASV(Nig08-A19;Clade III)__ADU56618__GPCmut7 (opt5)
aggagagucccgcagucggcguccagcggcucugcuuguucgugugugugucguugcaggccuuauucaagcuuaccaugggccagaucgugaccuucuuucaagaggucccccacguuauugaagaggugaugaacaucgugcugauugcccucagcauccuggcuauucuuaaggggcuguacaauaucgccacaugcggacucaucggccuggucacguuccuucugcucuccgggagaucuuguagcaugaccuauaaaggaguguacgaacugcagacacuggagcucaacaugaauacccugaacaugacaaugccucuuuccugcaccaagaauaacucucaucacuauauuaugguuggcaaugaaacagggcuggagcucacccugacgaacaccagccuucugcaucacaaauuuuguaaucucuccgacgcgcauaagaaaaaccuguacgaucacacacugaugucuaucauuagcaccuuccaccucuccaucccgaauuuuaaccaguaugaggcuaugagcugcgacuucaauggaggcaagauuacagugcaguacaaccugucucauuccuaugccaucgaugccgcuaaucacuguggcaccgucgccaacggggugcuucaaacguuuaugcggauggcuuggggaggcagcuacauugcccuggacucugggcgcggaaagugggauugcaucaugacauccuaccaguaucucaucauucagaacaccacaugggaagaccauugucaguucagcagacccucuccuaucggcuaccuggggcuucugucccaacggacccgcgauauuuauaucagcagacggcuccugggaaccuuuacauggacgcuguccgacucugagggcaaugaaacccccggcggguacugccucacacgcuggaugcugauugaggcggagcuuaaauguuucggaaacaccgccguugcuaagugcaaugaaaaacacgaugaggaauuuugugacaugcugagacucuucgauuuuaacaagcaggccauccggcgccugaaagcuccugcccagaugagcauccagcuuauuaauaaggcggugaacgcccugaucaaugaccaacucauuaugaagaaccaccugagagauaucaugggcauucccuauugcaauuacuccaaauauugcuaccugaaccauacaagcaccgggcggacgucucucccucgcuguugccuggucuccaauggaagcuaccuuaacgagacacacuucucugacgacaucgaacagcaggcugauaauaugaucaccgagaugcugcaaaaggaguaucucgacagacagggcaaaaccccgcuggggcugguggaucuuuucguguuuagcacauccuucuaccucauuucuaucuuucugcaucuggucaagauucccacccaccggcauaucguuggaaaaccuugucccaagccucaccgccucaaccacaugggcauuugcagcuguggccuguauaaacagcccggggugccggugagauggaagcggugaggacuaguaauaaggaaacuguaugaaugucugugggcaggaagugaagagauccuucuguaaagguuuuuggaauuaugucugcugaauaauaaacuuuuuugaaauaauaaaucugguagaaaaaugagaucucaaaggcucuuuucagagccaccaaaaaaaaaaaaaaaaaaaaaaaaaaaaaaaaaaaaaaaaaaaaaaaaaaaaaaaaaaaaaaaaaaaaaaaaaaaaaaaaaaaaaaaaaaaaaaaaaaaaa

SEQ ID NO: 32603 - RNA, 1812 nt, Artificial Sequence
  mRNA product Design b-4 (hSL-A100) comprising derived and/or modified sequence from LASV(G1180-SLE-2010;Clade IV)__AIT17168__GPCmut7 (opt5)
aggagagucccgcagucggcguccagcggcucugcuuguucgugugugugucguugcaggccuuauucaagcuuaccaugggccagaucgugaccuucuuucaagaggucccccacguuauugaagaggugaugaacaucgugcugauugcccucagcauccuggcuguccuuaaggggcuguacaauuucgccacaugcggacucgugggccugcuuacguuucugcuccugugugggagauccugcaccgcgucucgguauaaaggaguuuacgaacugcagacacucgagcugaacauggaaacccuuaauaugacaaugccucugagcuguaccaagaacaauucccaucacuauauuauggugggcaacgagacagggcucgagcugacccuuacgaauaccucuaucaucaaccauaaauucugcaaucugagcgacgcucacaagaaaaaccucuacgaucaugcccugauguccauuaucucuacauuucaccugagcauuccgaauuucaaccaguaugaagccauguccugugacuuuaauggaggcaagaucagcguccaguacaaccucucucacuccuaugcuggcgaugccgcuaaucauugcgggaccguggccaacggaguucugcaaacauucaugcgcauggcguggggcgggagcuacauugcccuugacucuggacacggcuccugggauuguaucaugaccagcuaccaguaucugauuauccagaacacgacaugggaggaccauugccaguuuucuagacccuccccuaucggguaccucggacugcuuagccaacggacccgcgauauuuauaucuccagacggcugcucggcacauucaccuggacccugucugacagcgaaggcaaggauacacccgggggauacugucugacgcgcuggaugcucauugaggcugagcugaaaugcuuuggcaauaccgccguggcuaaguguaacgaaaaacacgacgaggaguucugcgauaugcuuagacuguuugacuucaauaagcaggccauccagcggcucaaagcgccugcccagauguccauucaacugaucaacaaggcugucaaugcccuuaucaacgaucagcugauuaugaagaaucaccuccgcgacaucauggggauucccuauugcaacuacagcaaauauuguuaccugaaucauacaaccacaggaaagaccucucugccuaaaugcugucucguguccaacggcagcuaccugaaugaaacgcacuucucugacgauaucgaacagcaagcugacaacaugauuacagagaugcuucagaaggaguauauggaaagacaggggaaaaccccgcugggacucguggaucuguuugucuucagcaccuccuuuuaccugaucucuaucuuccuucaucucguuaagauucccacacaccggcauaucgugggcaaaagcugcccuaagccccaccgccugaaucacaugggcauuuguuccugcgggcuguauaagcagccuggagugcccgucaaauggaagagaugaggacuaguaauaaggaaacuguaugaaugucugugggcaggaagugaagagauccuucuguaaagguuuuuggaauuaugucugcugaauaauaaacuuuuuugaaauaauaaaucugguagaaaaaugagaucucaaaggcucuuuucagagccaccaaaaaaaaaaaaaaaaaaaaaaaaaaaaaaaaaaaaaaaaaaaaaaaaaaaaaaaaaaaaaaaaaaaaaaaaaaaaaaaaaaaaaaaaaaaaaaaaaaaaa

SEQ ID NO: 32604 - RNA, 1812 nt, Artificial Sequence
  mRNA product Design b-4 (hSL-A100) comprising derived and/or modified sequence from LASV(G1442-SLE-2011;Clade IV)__AIT17180__GPCmut7 (opt5)
aggagagucccgcagucggcguccagcggcucugcuuguucgugugugugucguugcaggccuuauucaagcuuaccaugggccagaucgugaccuucuuucaagaggucccccacguuauugaagaggugaugaacaucgugcugauugcccucagcauccuggcuguccuuaaggggcuguacaauguggccacaugcggacucauuggccugguuacguuccuucugcucugugggagauccugcaccacaacccuguauaaaggaguguacgaacugcagacacucgagcugaacauggaaacccuuaauaugacaaugccucugucuuguaccaagaacaauagccaucacuauauccgggucggcaacgagacggggcucgagcugacccuuacaaauaccuccaucauuaaccauaaauuuugcaaucugucugacgcgcacaagaaaaaccucuacgaucaugcucugaugagcaucauuuccacauuccaccugucuaucccgaauuuuaaccaguaugaagccaugagcugugacuucaauggaggcaagauuuccgugcaguacaaccucagccacucuuaugccggcgaugcugccaaucauugcgggaccguugcuaacggagugcugcaaacguuuaugcgcauggccuggggcggguccuacaucgcgcuugacagcggaagaggcaacugggauuguauuaugacaucuuaccaguaucugaucauccagaauaccacaugggacgaucacugccaguucucccggcccagcccuauuggguaccucggacugcuuucucaacgcaccagagacgucuauaucucccggcgccugcucggcaccuuuacauggacgcugagcgauuccgagggcaaggacacccccgggggauacugucugacaagauggaugcucauugaagccgagcugaaaugcuucggcaacaccgcuguggccaaguguaaugagaaacaugaugaagaguuuugcgacaugcuucggcuguucgauuuuaacaagcaggcuauccagcgccucaaagccccugcgcagaugucuauucaacugaucaauaaggccgugaacgcucuuaucaaugaccagcugauuaugaagaaccaccucagagacaucauggggauucccuauugcaauuacagcaaauauuguuaccugaacaauacagccaccggaaagacgucccugccuaaaugcugucucaucagcaacggcucuuaccugaaugaaacacacuucuccgaugacauugagcaggaagcugauaacaugaucaccgagaugcuucaaaaggaguauauggaacggcaggggaaaaccccgcugggacucgucgaccuguucguuuuuagcacaucuuucuaccugaucagcauuuuucuucaucucgugaagauccccacccaccgccauauugugggcaaauccugcccuaagccccacagacugaaucauaugggcaucuguucuugcgggcuguauaagcagccuggaguccccgugcgguggaaacgcugaggacuaguaauaaggaaacuguaugaaugucugugggcaggaagugaagagauccuucuguaaagguuuuuggaauuaugucugcugaauaauaaacuuuuuugaaauaauaaaucugguagaaaaaugagaucucaaaggcucuuuucagagccaccaaaaaaaaaaaaaaaaaaaaaaaaaaaaaaaaaaaaaaaaaaaaaaaaaaaaaaaaaaaaaaaaaaaaaaaaaaaaaaaaaaaaaaaaaaaaaaaaaaaaa

SEQ ID NO: 32605 - RNA, 1812 nt, Artificial Sequence
  mRNA product Design b-4 (hSL-A100) comprising derived and/or modified sequence from LASV(G3010-SLE-2013;Clade IV)__AIT17344__GPCmut7 (opt5)
aggagagucccgcagucggcguccagcggcucugcuuguucgugugugugucguugcaggccuuauucaagcuuaccaugggccagaucgugaccuucuuucaagaggucccccacguuauugaagaggugaugaacaucgugcugauugcccucagcauccuggcuguccuuaaggggcuguacaauuucgccacaugcggacucgugggccugguuacguuucuucugcucugugggagauccugcaccacaucucuguauaaaggaguguacgaacugcagacccucgagcugaacauggaaacacuuaauaugaccaugccucugagcuguacaaagaacaauucccaucacuauauuauggucggcaacgagaccgggcucgagcugacgcuuaccaauacaucuaucaucaaccauaaauucugcaaucugagcgacgcgcacaagaaaaaccucuacaaucaugcucugauguccauuaucucuaccuuucaccugagcauuccgaacuucaaucaguaugaagccauguccugugauuuuaacggaggcaagaucagcgugcaguacaaucucucucacuccuaugccggcgacgcugccagccauugcgggacaguugcuaacggagugcugcaaaccuucaugcggauggccuggggcgggucuuacauugcgcuugauuccggauacggcaagugggacuguaucaugacgagcuaucaguaccugauuauccagaacacaaccugggaggaucacugccaguuuucucgccccuccccuaucggguaucucggacugcuuagccaaagaacacgggacauuuacaucucccgcagacugcucggcaccuucaccuggacacugucugauagcgaaggcaaagacacgcccgggggauauugucugacccgguggaugcucauugaggccgagcugaagugcuuuggcaauacagcugucgccaaauguaacgaaaagcaugaugaggaguucugcgacaugcuucgccuguuugauuucaauaaacaggcuauccagagacucaagaccccugcccagauguccauucaacugaucaacaaggcggugaaugcccuuaucaacgaccagcugauuaugaaaaaucaccuccgggauaucauggggauucccuacugcaacuauagcaaguacuguuaccugaaucacacaaccacgggaaaaacaucucugccuaagugcugucucguguccaacggcagcuaucugaaugaaacccauuucucugacgacaucgaacagcaagcugauaacaugauuaccgagaugcuucagaaagaguacauggaacgccaggggaagacaccgcugggacucgucgaccuguuuguuuucagcaccuccuuuuaucugaucucuaucuuccuucaccucgugaaaauucccacacauagacacaucgugggcaagagcugcccuaagccccaucggcugaaucacaugggcauuuguuccugcgggcuguacaaacagccuggaguccccgugcgcuggaagagaugaggacuaguaauaaggaaacuguaugaaugucugugggcaggaagugaagagauccuucuguaaagguuuuuggaauuaugucugcugaauaauaaacuuuuuugaaauaauaaaucugguagaaaaaugagaucucaaaggcucuuuucagagccaccaaaaaaaaaaaaaaaaaaaaaaaaaaaaaaaaaaaaaaaaaaaaaaaaaaaaaaaaaaaaaaaaaaaaaaaaaaaaaaaaaaaaaaaaaaaaaaaaaaaaa

SEQ ID NO: 32606 - RNA, 1812 nt, Artificial Sequence
  mRNA product Design b-4 (hSL-A100) comprising derived and/or modified sequence from LASV(G502-SLE-2009;Clade IV)__AIT17126__GPCmut7 (opt5)
aggagagucccgcagucggcguccagcggcucugcuuguucgugugugugucguugcaggccuuauucaagcuuaccaugggccagaucgugaccuucuuucaagaggucccccacguuauugaagaggugaugaacaucgugcugauugcccucagcauccuggcuguccuuaaggggcuguacaauuucgccacaugcggacucgugggccugcuuacguuucugcuccugugugggagauccugcaccacaggacuguauaaaggcguuuacgaacuccagacccuggagcuuaacauggaaacacugaauaugaccaugccucucucuuguacaaagaacaauagccaucacuauauuaugguggggaacgagaccggacuggagcuuacgcugaccaauacauccaucaucaaccauaaauucugcaaucucucugacgcgcacaagaaaaaccuguacgaucaugcucugaugagcauuaucuccaccuuucaccucucuauuccgaauuucaaccaguaugaagccaugagcugugacuuuaauggcggcaagaucuccguccaguacaaccugagccacucuuaugccggggaugcugccgaccauugcggaacaguggcuaauggcguucuucaaaccuucaugcggauggccuggggaggguccuacauugcgcuggauagcggccgcgggagaugggacuguaucaugacgucuuaccaguaucucauuauccagaacacaaccugggaggaucacugccaguuuucccggcccagcccuaucggauaccugggccuucugucucaacgcacaagagacauuuauaucucccggcgccuccugggcaccuucaccuggacacugagcgauuccgaagggaaggacacgcccggaggcuacugucucaccagauggaugcugauugaggccgagcuuaaaugcuuugggaacacagcuguggccaaguguaaugaaaaacaugaugaggaguucugcgacaugcugcggcucuuugauuucaacaagcaggcuauccagcgccugaaagccccugcgcagaugucuauucaacuuaucaauaaggccgucaacgcucugaucaaugaccagcucgugaugaagaaccaccugagagacauuaugggaauccccuauugcaauuacagccgguauuguuaccugaaccacaccacaaccggccgcacgucccucccuaaaugcugucuggugagcaaugggucuuaccuuaacgaaacacauuucuccgaugacauugaacagcaagccgauaauaugaucaccgagaugcugcagaaggaguauauggaaagacagggaaaaaccccgcucggccuggucgaccuguuuguuuucagcacaucuuuuuaccuuauuagcaucuuccuccaccuggugaagauccccacccaucggcacauugugggcaaauccugcccuaagccccaucgccugaaccacauggggaucuguucuugcggacucuauaaacagccuggcguccccgugaaguggaagagaugaggacuaguaauaaggaaacuguaugaaugucugugggcaggaagugaagagauccuucuguaaagguuuuuggaauuaugucugcugaauaauaaacuuuuuugaaauaauaaaucugguagaaaaaugagaucucaaaggcucuuuucagagccaccaaaaaaaaaaaaaaaaaaaaaaaaaaaaaaaaaaaaaaaaaaaaaaaaaaaaaaaaaaaaaaaaaaaaaaaaaaaaaaaaaaaaaaaaaaaaaaaaaaaaa

SEQ ID NO: 32607 - RNA, 1812 nt, Artificial Sequence
  mRNA product Design b-4 (hSL-A100) comprising derived and/or modified sequence from LASV(G733-SLE-2010;Clade IV)__AIT17154__GPCmut7 (opt5)
aggagagucccgcagucggcguccagcggcucugcuuguucgugugugugucguugcaggccuuauucaagcuuaccaugggccagaucgugaccuucuuucaagaggucccccacguuauugaagaggugaugaacaucgugcugauugcccucagcauccuggcuguccuuaaggggcuguacaauuucgccacaugcggaauugugggccucguuuccuuucugcuucugugugggagaucuugcacgaccagccucuauaaaggaguguacgaacugcagacacuggagcucaacauggaaacccugaauaugacaaugccucuuuccuguaccaagaacaauucucaucacuauaucauggucggcaacgagacagggcuggagcucacccugacgaauaccagcaucauuaaccauaaauucugcaaucuuuccgacgcgcacaagaaaaaccuguacgaucaugcucucaugucuaucauuagcacauuucaccuguccaucccgaauuucaaccaguaugaagccaugagcugugacuuuaauggaggcaagauuucugugcaguacaaccugucccacagcuaugccggcgaugcugccaaucauugcgggaccaucgcuaacggaguucuccaaacauucaugcggauggccuggggcgggucuuacauugcgcuggacuccggacgcgauagaugggacuguaucaugaccagcuaccaguaucuuaucauucagaacacgacaugggaggaucacugccaguuuucucggcccuccccuaucggcuaccuggggcuccugagccaacgcaccagagacauuuauaucucccggcgccuucugggaacauucaccuggacccucucugauagcgaaggcaaggacacacccggcggguacugucugacgagauggaugcugauugaggccgagcucaaaugcuuuggaaauaccgcuguggccaaguguaacgaaaaacaugaugaggaguucugcgacaugcugcggcuuuuugauuucaauaagcaggcuauccagcgccugaaagccccugcgcagauguccauccaacucauuaacaaggccgucaaugcucugaucaacgaccagcuuauuaugaagaaucaccugagagacaucaugggcauucccuauugcaacuacagcaaauauuguuaccucaaucacacaaccacagggaagaccucucugccuaaaugcugucugguguccaacggaagcuaccucaaugaaacgcauuucucugaugacaucgaacagcaagccgauaacaugaucacagagaugcugcagaaggaguauauggaacggcagggcaaaaccccgcuugggcugguggaccucuuugucuucagcaccuccuuuuaccugauuucuaucuuccugcaccuuguuaagauucccacacaucgccacguggugggaaaaagcugcccuaagccccauagacucaaucacaugggcaucuguuccugcggccuguaugggcagccuggaguccccgugaaguggaaacggugaggacuaguaauaaggaaacuguaugaaugucugugggcaggaagugaagagauccuucuguaaagguuuuuggaauuaugucugcugaauaauaaacuuuuuugaaauaauaaaucugguagaaaaaugagaucucaaaggcucuuuucagagccaccaaaaaaaaaaaaaaaaaaaaaaaaaaaaaaaaaaaaaaaaaaaaaaaaaaaaaaaaaaaaaaaaaaaaaaaaaaaaaaaaaaaaaaaaaaaaaaaaaaaaa

SEQ ID NO: 32608 - RNA, 1812 nt, Artificial Sequence
  mRNA product Design b-4 (hSL-A100) comprising derived and/or modified sequence from MOPV/LASV reassortant(IGS-1;Clade IV)__AFY05576__GPCmut7 (opt5)
aggagagucccgcagucggcguccagcggcucugcuuguucgugugugugucguugcaggccuuauucaagcuuaccaugggccagaucgugaccuucuuucaagaggucccccacguuauugaagaggugaugaacaucgugcugauugcccucagcguccuggcugugcuuaaggggcuguacaauuucgccacaugcggacucguuggccuggugacguuucuucugcucugugggagauccugcaccacaucucuguauaaaggagucuacgaacugcagacccucgagcugaacauggaaacacuuaauaugaccaugccucugagcuguacaaagaacaauucccaucacuauaucauggugggcaacgagaccgggcucgagcugacgcuuaccaauacaucuauuaucaaccauaaauucugcaaucugagcgacgcgcacaagaaaaaccucuacgaucaugcucugauguccaucauuucuaccuuucaccugagcaucccgaauuucaaccaguaugaagccauguccugugacuuuaauggaggcaagauuagcguucaguacaaccucucucacuccuaugccggcgaugcugccaaucauugcgggacaguggcuaacggaguccugcaaaccuucaugcggauggccuggggcgggagcuacaucgcgcuugacucuggacgcggcaacugggauuguauuaugacguccuaccaguaucugaucauucagaauacaaccugggaggaccacugccaguuuagcagacccucuccuaucggguaccucggacugcuuucccaacggacacgcgauaucuauauuagcagacggcugcucggcaccuucaccuggacacuguccgacucugaaggcgaggauacgcccgggggauacugucugacccgcuggaugcucaucgaggccgaacugaagugcuuuggcaacacagcuguggccaaauguaaugagaagcaugacgaagaguucugcgauaugcuuagacuguuugacuucaacaaacaggcuauucagcggcucaaggccccugcgcagaugagcauccaacugauuaauaaagccgugaacgcucuuaucaaugaucagcugaucaugaagaaccaccuccgcgacauuauggggauccccuauugcaauuacuccaaguauuguuaccugaaccacaccacaaccggaagaacgagccugccuaaaugcugucucgucucuaauggcuccuaccugaacgaaacacauuucagcgacgauauugagcagcaagccgacaauaugaucaccgagaugcuucagaaggaauauauggagcggcaggggaaaaccccgcugggacucguugaucuguuuguguucucuaccagcuuuuaccugauuuccaucuuccuucaccucgugaagauccccacacaucgccacauugucggcaaaucuugcccuaagccccauagacugaaccacaugggcaucuguagcugcgggcuguauaaacagccuggagugcccguuaaguggaagcggugaggacuaguaauaaggaaacuguaugaaugucugugggcaggaagugaagagauccuucuguaaagguuuuuggaauuaugucugcugaauaauaaacuuuuuugaaauaauaaaucugguagaaaaaugagaucucaaaggcucuuuucagagccaccaaaaaaaaaaaaaaaaaaaaaaaaaaaaaaaaaaaaaaaaaaaaaaaaaaaaaaaaaaaaaaaaaaaaaaaaaaaaaaaaaaaaaaaaaaaaaaaaaaaaa

SEQ ID NO: 32609 - RNA, 1812 nt, Artificial Sequence
  mRNA product Design b-4 (hSL-A100) comprising derived and/or modified sequence from LASV(LM765-SLE-2012;Clade IV)__AIT17814__GPCmut7 (opt5)
aggagagucccgcagucggcguccagcggcucugcuuguucgugugugugucguugcaggccuuauucaagcuuaccaugggccagaucgugaccuucuuucaagaggucccccacguuauugaagaggugaugaacaucgugcugauugcccucagcauccuggcuguccuuaaggggcuguacaauuucgccacaugcggacucgugggccugguuacguuucuucugcucugugggagauccugcaccacaucucuguauaaaggaguguacgaacugcagacccucgagcugaacauggaaacacuuaauaugaccaugccucugagcuguacaaagaacaauucccaucacuauauuauggucggcaacgagaccgggcucgagcugacgcuuaccaauacaucuaucaucgaccauaaauucugcaaccugagcgaugcgcaccggaagaaucucuacgaccaugcucugauguccauuaucucuaccuuucaccugagcauuccgaacuucaaucaguaugaagccauguccugugauuuuaacggaggcaaaaucagcgugcaguacaaucucucucacuccuaugccaaggacgcugccgaucauugcggcacaguugcuaacggggugcugcaaaccuucaugcgcauggccuggggaggcagcuacauugcgcuugacucugggagaggacggugggauuguaucaugacguccuaccaguaucugauuauccagaauacaaccugggaggaccacugccaguuuagccgccccucuccuaucggcuaccucgggcugcuuucccaaagaacacgggauauuuauaucagccgcagacugcucggaaccuucaccuggacacuguccgacucugaaggcaaggauacgcccggcggguacugucugacccgguggaugcucauugaggccgagcugaaaugcuuuggaaacacagcugucgccaaguguaacgaaaaacaugacgaggaguucugcgauaugcuucgccuguuugacuucaauaagcaggcuauccagagacucaaagccccugcgcagaugagcauucaacugaucaacaaggccgugaaugcucuuaucaacgaccagcugauuaugaagaaucaccuccgggauaucaugggcauucccuauugcaacuacuccaaauauuguuaccugaaucacaccacaaccgggaagacgagccugccuaaaugcugucucgugucuaacggauccuaccugaaugaaacacauuucagcgacgauaucgaacagcaagccgacaacaugauuaccgagaugcuucagaaggaguauauggaacgccagggcaaaaccccgcuggggcucgucgaucuguuuguuuucucuaccagcuuuuaccugaucuccaucuuccuucaccucgugaagauucccacacauagacacaucgugggaaaaccuugccccaagccucaucggcugaaucacaugggcauuuguucuugcggccuguauaagcagcccggggucccggugaaauggaagcgcugaggacuaguaauaaggaaacuguaugaaugucugugggcaggaagugaagagauccuucuguaaagguuuuuggaauuaugucugcugaauaauaaacuuuuuugaaauaauaaaucugguagaaaaaugagaucucaaaggcucuuuucagagccaccaaaaaaaaaaaaaaaaaaaaaaaaaaaaaaaaaaaaaaaaaaaaaaaaaaaaaaaaaaaaaaaaaaaaaaaaaaaaaaaaaaaaaaaaaaaaaaaaaaaaa

SEQ ID NO: 32610 - RNA, 1812 nt, Artificial Sequence
  mRNA product Design b-4 (hSL-A100) comprising derived and/or modified sequence from LASV(LM776-SLE-2012;Clade IV)__AIT17824__GPCmut7 (opt5)
aggagagucccgcagucggcguccagcggcucugcuuguucgugugugugucguugcaggccuuauucaagcuuaccaugggccagaucgugaccuucuuucaagaggucccccacguuauugaagaggugaugaacaucgugcugauugcccucagcauccuggcuguccuuaaggggcuguacaauuucgccacaugcggacucgugggccugguuacguuucuucugcucugugggagauccugcaccacaucuguguauaaaggagucuacgaacugcagacccuggagcucaacauggaaacacugaauaugaccaugccucuuagcuguacaaagaacaauucccaucacuauauuauggugggcaacgagaccgggcuggagcucacgcugaccaauacaucuaucaucaaccauaaauucugcaaucuuagcgacgcgcacaagaaaaaccuguacgaucaugcucucauguccauuaucucuaccuuucaccugagcauuccgaauuucaaccaguaugaagccauguccugugacuuuaauggaggcaagaucagcguucaguacaaccugucucacuccuaugccggcgaugcugccaaucauugcgggacaguggcuaacggaguccuccaaaccuucaugcggauggccuggggcgggagcuacauugcgcuggacucuggacacggcaagugggauuguaucaugacguccuaccaguaucuuauuauccagaacacaaccugggaggaccauugccaguuuagccgccccucuccuaucggguaccugggacuccugucccaaagaacacgggauauuuauaucagccgcagacuucugggcaccuucaccuggacacucuccgacucugaaggcaaagauacgcccgggggauacugucugacccgguggaugcugauugaggccgagcucaagugcuuuggcaauacagcuguggccaaauguaacgaaaagcacgacgaggaguucugcgauaugcugcgccuuuuugacuucaauaaacaggcuauccagagacugaaggccccugcgcagaugagcauucaacucaucaacaaggccgugaaugcucugaucaacgaucagcuuauuaugaaaaaucaucugcgggacaucauggggauucccuauugcaacuacuccaaguauuguuaccucaaucacaccacaaccggaaaaacgagccugccuaagugcugucuggucucuaacggcuccuaccucaaugaaacacacuucagcgacgauaucgaacagcaagccgacaacaugauuaccgagaugcugcagaaagaguauauggaacgccaggggaagaccccgcuuggacugguugaucucuuuguguucucuaccagcuuuuaccugaucuccaucuuccugcaucuugugaaaauucccacacacagacauaucgucggcaagucuugcccuaagccccaccggcucaaucacaugggcauuuguagcugcgggcuguauaaacagccuggagugcccguucgcuggaagagaugaggacuaguaauaaggaaacuguaugaaugucugugggcaggaagugaagagauccuucuguaaagguuuuuggaauuaugucugcugaauaauaaacuuuuuugaaauaauaaaucugguagaaaaaugagaucucaaaggcucuuuucagagccaccaaaaaaaaaaaaaaaaaaaaaaaaaaaaaaaaaaaaaaaaaaaaaaaaaaaaaaaaaaaaaaaaaaaaaaaaaaaaaaaaaaaaaaaaaaaaaaaaaaaaa

SEQ ID NO: 32611 - RNA, 1812 nt, Artificial Sequence
  mRNA product Design b-4 (hSL-A100) comprising derived and/or modified sequence from LASV(Mad39;Clade IV)__ANH09722__GPCmut7 (opt5)
aggagagucccgcagucggcguccagcggcucugcuuguucgugugugugucguugcaggccuuauucaagcuuaccaugggccagaucgugaccuucuuucaagaggucccccacguuauugaagaggugaugaacaucgugcugauugcccucagcauccuggcuguccuuaaggggcuguacaauguggccacaugcggacucauuggccugguuacguuccuucugcucugugggagauccugcaccacaacccuguauaaaggaguguacgaacugcaggcgcucgagcugaacauggaaacacuuaauaugaccaugccucugucuuguacaaagaacaauagccaucacuauauccgggucggcaacgagaccgggcucgagcugacgcuuaccaauacaucccugaucaaccauaaauuuugcaaucucucugacgcucacaagaaaaaccuguacgaucaugcccugaugagcauuaucuccaccuuccaccucucuauuccgaauuuuaaccaguaugaagccaugagcugugacuucaaugauggaaagaucuccgugcaguacaaccugagccacacauaugcuggcgacaccgccaaucauugcggcacgguugcuaacggggugcuucaaacauuuaugcgcauggccuggggaggcucuuacauugcgcuggauuccgggagaggaggcugggacuguaucaugaccagcuaccaguaucucauuauccagaacacaaccugggaggaucacugccaguucucucggcccuccccuaucggguaccugggacuucugagccaacgcaccagagacauuuauaucucucggcgccuccugggcacauuuacguggacccuguccgauagcgaaggcaaggacacacccgggggauacugucucaccagauggaugcugauugaggccgagcuuaaaugcuucggcaauacagcugucgccaaguguaacgaaaaacaugaugaggaauuuugcgacaugcugcgccucuucgauuuuaauaagcaggcuauccagcggcugaaagccccugcgcagauguccauucaacuuaucaacaaggccgugaaugcucugaucaacgaccagcucauuaugaagaaucaccugagagacaucauggggauucccuauugcaacuacucuaaauauuguuaccugaaucacaccgugacgggaaagacaagccucccuaaaugcugucuggucuccaacggcagcuaccuuaaugagacccauuucucugaugacaucgaacagcaagccgauaacaugauuaccgagaugcugcagaaggaguauauggaacggcaggggaaaacaccgcucggacugguugaccuguucguguuuuccaccagcuucuaccuuaucucuaucuuucuccaccuggugaagauucccacacaucgccacgucgugggcaaaccuugccccaagccucauagacugaaucacaugggcaucuguagcugcggguucuauaagcagcccggaguuccggugcgguggaaacgcugaggacuaguaauaaggaaacuguaugaaugucugugggcaggaagugaagagauccuucuguaaagguuuuuggaauuaugucugcugaauaauaaacuuuuuugaaauaauaaaucugguagaaaaaugagaucucaaaggcucuuuucagagccaccaaaaaaaaaaaaaaaaaaaaaaaaaaaaaaaaaaaaaaaaaaaaaaaaaaaaaaaaaaaaaaaaaaaaaaaaaaaaaaaaaaaaaaaaaaaaaaaaaaaaa

SEQ ID NO: 32612 - RNA, 1812 nt, Artificial Sequence
  mRNA product Design b-4 (hSL-A100) comprising derived and/or modified sequence from LASV(Z0947-SLE-2011;Clade IV)__AIT17840__GPCmut7 (opt5)
aggagagucccgcagucggcguccagcggcucugcuuguucgugugugugucguugcaggccuuauucaagcuuaccaugggccagaucgugaccuucuuucaagaggucccccacguuauugaagaggugaugaacaucgugcugauugcccucagcauccuggcuguccuuaaggggcuguacaauuucgccacaugcggacucgugggccugguuacguuucuucugcucugugggagauccugcaccauuucucuguauaaaggaguguacgaacugcagacacucgagcugaacauggaaacccuuaauaugacaaugccucugagcuguaccaagaacaauucccaucacuauaucauggucggcaacgagacagggcucgagcugacccuuacgaauaccucuaucauuaaccauaaauucugcaaucugagcgacgcgcacaagaaaaaccucuacgaucaugcucugauguccaucauuucuacauuucaccugagcaucccgaauuucaaccaguaugaagccauguccugugacuuuaauggaggcaagauuagcgugcaguacaaccucucucacuccuaugccggcgaugcugccaaucauugcgggaccguugcuaacggagugcugcaaacauucaugcggauggccuggggcgggagcuacaucgcgcuugacucuggacgcgauagaugggacuguauuaugaccuccuaccaguaucugaucauccagaacacgacaugggaggaucacugccaguuuagccggcccucuccuauuggcuaccucgggcugcuuucccaacgcaccagagacaucuauauuagccggcgccugcucggaacauucaccuggacccuguccgauucugaaggcaaggacacacccggcggguacugucugacgagauggaugcucaucgaggccgagcugaaaugcuuuggaaauaccgcugucgccaaguguaacgaaaaacaugaugaggaguucugcgacaugcuucggcuguuugauuucaauaagcaggcuauucagcgccucaaagccccugcgcagaugagcauccaacugaucaacaaggccgugaaugcucuuauuaacgaccagcugaucaugaagaaucaccucagagacauuaugggcauccccuauugcaacuacuccaaauauuguuaccugaaucacacaaccacagggaagaccagccugccuaaaugcugucucgugucuaacggauccuaccugaaugaaacgcauuucagcgaugacauugaacagcaagccgauaacaugaucacagagaugcuucagaaggaguauauggaacggcagggcaaaaccccgcuggggcucgucgaccuguuuguuuucucuaccagcuuuuaccugaucuccauuuuccuucaccucgugaagauccccacacaucgccacauugugggaaaaccuugccccaagccucauagacugaaucacaugggcaucuguucuugcggccuguauaagcagcccggggucccggugaaauggaagcggugaggacuaguaauaaggaaacuguaugaaugucugugggcaggaagugaagagauccuucuguaaagguuuuuggaauuaugucugcugaauaauaaacuuuuuugaaauaauaaaucugguagaaaaaugagaucucaaaggcucuuuucagagccaccaaaaaaaaaaaaaaaaaaaaaaaaaaaaaaaaaaaaaaaaaaaaaaaaaaaaaaaaaaaaaaaaaaaaaaaaaaaaaaaaaaaaaaaaaaaaaaaaaaaaa

SEQ ID NO: 32613 - RNA, 1788 nt, Artificial Sequence
  mRNA product Design b-4 (A100) comprising derived and/or modified sequence from LASV(Josiah;Clade IV)__NP_694870__GPCmut7 (opt1)
aggagagucccgcagucggcguccagcggcucugcuuguucgugugugugucguugcaggccuuauucaagcuuaccaugggccagaucgugaccuucuuccaggaggucccccacgugaucgaggaggugaugaacaucguccugaucgcccucagcgugcuggccgugcugaaggggcucuacaacuucgcgaccugcggccuggucgggcuggugacguuccuccugcugugcggccgcuccugcaccaccagccucuacaaggggguguacgagcugcagacccuggagcucaacauggagacgcugaacaugaccaugccgcuguccugcaccaagaacaacagccaccacuacaucauggucggcaacgagaccggccucgagcugacgcugaccaacaccuccaucaucaaccacaaguucugcaaccucagcgacgcccacaagaagaaccuguacgaccacgcccugauguccaucaucagcaccuuccaccucuccauccccaacuucaaccaguacgaggccaugagcugcgacuucaacgggggcaagaucuccgugcaguacaaccugagccacuccuacgccggggacgcggccaaccacugcggcacgguggccaacgggguccugcagaccuucaugcggauggccuggggcggcagcuacaucgcgcucgacuccgggcgcggcaacugggacugcaucaugaccagcuaccaguaccugaucauccagaacaccacgugggaggaccacugccaguucucccggcccagccccaucggguaccugggccuccugucccagcgcacccgggacaucuacaucagccgccggcugcucggcaccuucaccuggacgcugagcgacuccgaggggaaggacaccccgggcggguacugccugacccgcuggaugcucaucgaggccgagcugaagugcuucggcaacaccgccguggccaagugcaacgagaagcacgacgaggaguucugcgacaugcugcggcuguucgacuucaacaagcaggccauccagcgccugaaggcgcccgcccagaugagcauccagcugaucaacaaggccgugaacgcccucaucaacgaccagcugaucaugaagaaccaccuccgggacaucauggggauccccuacugcaacuacuccaaguacugcuaccucaaccacacgaccaccggccgcaccagccugcccaagugcugccuggucuccaacggcagcuaccucaacgagacgcacuucuccgacgacaucgagcagcaggccgacaacaugaucaccgagaugcugcagaaggaguacauggagcggcaggggaagacgccccugggccucguggaccuguucguguucagcaccuccuucuaccugaucagcaucuuccugcaccucgucaagaucccgacccaccgccacaucguggggaaguccugccccaagccccaccggcugaaccacaugggcaucugcagcugcgggcuguacaagcagcccggcgugccggucaaguggaagcgcugaggacuaguaauaaggaaacuguaugaaugucugugggcaggaagugaagagauccuucuguaaagguuuuuggaauuaugucugcugaauaauaaacuuuuuugaaauaauaaaucugguagaaaaaugagaucuaaaaaaaaaaaaaaaaaaaaaaaaaaaaaaaaaaaaaaaaaaaaaaaaaaaaaaaaaaaaaaaaaaaaaaaaaaaaaaaaaaaaaaaaaaaaaaaaaaaa

SEQ ID NO: 32614 - RNA, 1785 nt, Artificial Sequence
  mRNA product Design b-4 (A100) comprising derived and/or modified sequence from LASV(LP;Clade I)__AAF86701__GPCmut7 (opt1)
aggagagucccgcagucggcguccagcggcucugcuuguucgugugugugucguugcaggccuuauucaagcuuaccaugggccagaucaucaccuucuuccaggaggugccccacgucaucgaggaggugaugaacaucgugcugaucgcccucagccugcuggccauccucaaggggcuguacaacaucgcgaccugcggcaucaucgggcuggucgccuuccucuuccugugcggcaaguccugcagccugacgcucaagggcggguacgagcugcagacccuggagcucaacauggagacccugaacaugaccaugccgcuguccugcacgaagaacagcucccaccacuacauccgcgugggcaacgagaccgggcucgagcugacccugaccaacacgagcaucaucaaccacaaguucugcaaccucuccgacgcccacaagaagaaccuguacgaccacgcccugaugagcaucaucuccaccuuccaccucagcauccccaacuucaaccaguacgaggccauguccugcgacuucaacggcgggaagaucagcgugcaguacaaccugucccacagcuacgcgggcgacgccgccgagcacugcgggaccgucgccaacggcgugcugcagaccuucaugcggauggcguggggcgggcgcuacaucgcccucgacuccggcaaggggaacugggacugcaucaugacgagcuaccaguaccugaucauccagaacaccaccugggaggaccacugccaguucucccggcccagccccaucggcuaccugggccuccugucccagcgcacccgggacaucuacaucagccgccggcugcucgggacguucaccuggacccugagcgacuccgagggcaacgagacccccgggggcuacugccugacgcgcuggaugcucaucgaggccgagcugaagugcuucgggaacaccgccguggccaagugcaacgagaagcacgacgaggaguucugcgacaugcugcggcuguucgacuucaacaagcaggcgauccgccggcugaaggcccccgcccagaugagcauccagcugaucaacaaggccgucaacgcccucaucaacgaccagcugaucaugaagaaccaccuccgcgacaucaugggcauccccuacugcaacuacuccaaguacugcuaccucaaccacaccagcuccggccggaccagccugcccaagugcugccugaucuccaacgggagcuaccucaacgagacgcaguucuccgacgacaucgagcagcaggcggacaacaugaucaccgagaugcugcagaaggaguacaucgagcgccagggcaagaccccgcuggggcucguggacaucuucaucuucagcaccuccuucuaccugaucagcaucuuccugcaccugaucaagaucccgacgcaccggcacaucgugggcaagcccugccccaagccccaccgccucaaccacaugggggucugcuccugcggccuguacaagcacccgggcgugcccaccaaguggaagcggugaggacuaguaauaaggaaacuguaugaaugucugugggcaggaagugaagagauccuucuguaaagguuuuuggaauuaugucugcugaauaauaaacuuuuuugaaauaauaaaucugguagaaaaaugagaucuaaaaaaaaaaaaaaaaaaaaaaaaaaaaaaaaaaaaaaaaaaaaaaaaaaaaaaaaaaaaaaaaaaaaaaaaaaaaaaaaaaaaaaaaaaaaaaaaaaaa

SEQ ID NO: 32615 - RNA, 1785 nt, Artificial Sequence
  mRNA product Design b-4 (A100) comprising derived and/or modified sequence from LASV(803213;Clade II)__AAF86703__GPCmut7 (opt1)
aggagagucccgcagucggcguccagcggcucugcuuguucgugugugugucguugcaggccuuauucaagcuuaccaugggccagaucaucaccuucuuccaggaggugccccacgucaucgaggaggugaugaacaucgugcugaucgcccucagccugcuggccauccucaaggggaucuacaacgucgcgaccugcggccuguucgggcugaucuccuuccuccugcugugcggccgcagcugcuccgugacguacaaggggguguacgagcuccagacccuggagcugaacauggccaaccucaacaugaccaugccgcugagcugcaccaagaacaacucccaccacuacaucauggucggcaacgagacgggccuggagcucacccugaccaacaccagcaucaucaaccacaaguucugcaaccuguccgacgcccacaagaagaaccucuacgaccacgcccugaugagcaucaucuccacguuccaccugagcauccccaacuucaaccaguacgaggccauguccugcgacuucaacgggggcaagaucagcgugcaguacaaccucucccacagcuucgcgguggacgccgccaaccacugcgggaccaucgccaacggcguccugcagaccuucaugcggauggcguggggcggguccuacaucgcccuggacagcggcaaggggaacugggacugcaucaugaccuccuaccaguaccucaucauccagaacacgaccugggaggaccacugccaguucagccgccccucccccaucggcuaccuggggcugcucagccagcggacccgcgacaucuacaucagccggcgccugcugggcaccuucacguggacccucuccgacagcgagggcaacgaggcccccgggggcuacugccugacccgguggaugcugaucgaggccgagcucaagugcuucgggaacaccgccguggcgaagugcaacgagaagcacgacgaggaguucugcgacaugcugcgccuguucgacuucaacaagcaggccaucaagcggcucaagacgcccgcccagauguccauccagcugaucaacaaggccgugaacgcccugaucaacgaccagcucaucaugaagaaccaccuccgcgacaucaugggcauccccuacugcaacuacagccgguacugcuaccugaaccacaccgucaccgggaagaccucccugccccgcugcugccuggugagcaacggcuccuaccugaacgagacgcacuucagcgacgacaucgagcagcaggcggacaacaugaucaccgagaugcuccagaaggaguacauggaccggcagggcaagaccccgcuggggcugguggaccucuucgucuucuccaccagcuucuaccugaucuccaucuuccugcaccuggugaagaucccgacgcaccgccacaucgugggcaagcccugccccaagccccaccggcucaaccacauggggaucugcagcugcggccuguacaagcacccggggguccccgugaaguggaagcgcugaggacuaguaauaaggaaacuguaugaaugucugugggcaggaagugaagagauccuucuguaaagguuuuuggaauuaugucugcugaauaauaaacuuuuuugaaauaauaaaucugguagaaaaaugagaucuaaaaaaaaaaaaaaaaaaaaaaaaaaaaaaaaaaaaaaaaaaaaaaaaaaaaaaaaaaaaaaaaaaaaaaaaaaaaaaaaaaaaaaaaaaaaaaaaaaaa

SEQ ID NO: 32616 - RNA, 1785 nt, Artificial Sequence
  mRNA product Design b-4 (A100) comprising derived and/or modified sequence from LASV(GA391;Clade III)__CAA36645__GPCmut7 (opt1)
aggagagucccgcagucggcguccagcggcucugcuuguucgugugugugucguugcaggccuuauucaagcuuaccaugggccagaucgugaccuucuuccaggaggucccccacgugaucgaggaggugaugaacaucguccugaucgcccucagcauccuggccauccugaaggggcucuacaacguggcgaccugcggccugaucgggcuggugacguuccuccugcuguccggccgcagcugcucccucaucuacaaggggaccuacgagcugcagacccuggagcucaacauggagacccugaacaugacgaugccgcugagcugcaccaagaacaacucccaccacuacauccgggucggcaacgagaccggccucgagcugacccugacgaacaccagcauccucaaccacaaguucugcaaccuguccgacgcccacaagcgcaaccuguacgaccacagccucauguccaucaucagcaccuuccaccuguccauccccaacuucaaccaguacgaggccaugagcugcgacuucaacgggggcaagaucaccgugcaguacaaccugucccacagcuucgccguggacgccgcggggcacugcggcacgcucgccaacgggguccugcagaccuucaugcggauggccuggggcggcuccuacaucgcccuggacagcgggcgcggcaacugggacugcaucaugaccuccuaccaguaccucaucauccagaacaccacgugggacgaccacugccaguucagccggcccucccccaucggguaccugggccugcucagccagcgcacccgggacaucuacaucagccgccggcugcugggcaccuucaccuggacgcucuccgacagcgaggggaacgagaccccgggcggguacugccugacccgcuggaugcugaucgaggcggagcucaagugcuucggcaacaccgccguggccaagugcaacgagaagcacgacgaggaguucugcgacaugcugcggcuguucgacuucaacaagcaggccauccgccggcucaagacgcccgcccagauguccauccagcugaucaacaaggcggugaacgcccugaucaacgaccagcucaucaugaagaaccaccuccgcgacaucauggggauccccuacugcaacuacagccgguacugcuaccugaaccacaccuccaccggcaagaccagccugccccgcugcugccugaucuccaacggcagcuaccugaacgagacgaaguucuccgacgacaucgagcagcaggccgacaacaugaucaccgagaugcuccagaaggaguacaucgaccggcaggggaagacgccccugggccuggucgaccuguucguguucagcaccuccuucuaccucaucagcaucuuccugcaccuggugaagaucccgacccaccgccacaucgucgggaagcccugccccaagccccaccggcucaaccacaugggcaucugcuccugcgggcuguacaagcagccgggcgugcccgugcgcuggaagcggugaggacuaguaauaaggaaacuguaugaaugucugugggcaggaagugaagagauccuucuguaaagguuuuuggaauuaugucugcugaauaauaaacuuuuuugaaauaauaaaucugguagaaaaaugagaucuaaaaaaaaaaaaaaaaaaaaaaaaaaaaaaaaaaaaaaaaaaaaaaaaaaaaaaaaaaaaaaaaaaaaaaaaaaaaaaaaaaaaaaaaaaaaaaaaaaaa

SEQ ID NO: 32617 - RNA, 1788 nt, Artificial Sequence
  mRNA product Design b-4 (A100) comprising derived and/or modified sequence from LASV(AV;Clade V)__CCA30314__GPCmut7 (opt1)
aggagagucccgcagucggcguccagcggcucugcuuguucgugugugugucguugcaggccuuauucaagcuuaccaugggccagaucgugaccuucuuccaggaggucccccacgugaucgaggaggugaugaacaucguccugaucgcccucagcauccuggccgugcugaaggggcucuacaacaucgcgaccugcggccugaucgggcugaucacguuccuccugcugugcggccgcuccugcagcuccaaccucuacaaggggguguacgagcugcagagccuggaccucaacauggagacccugaacaugaccaugccgcuguccugcaccaagaacaacagccaccacuacauccgggucggcaacgacacgggccucgagcugacccugaccaacaccuccauccucaaccacaaguucugcaaccugagcgacgcccacaagaaggaccuguacgaccacgcccucauguccaucaucagcacguuccaccuguccauccccaacuucaaccaguacgaggccaugagcugcgacuucaacgggggcaagaucuccgugcaguacaaccugagccacuccuacgccaucgacgcggccaaccacugcgggaccguggccaacggcauccuccagaccuucaugcgcauggccuggggcgggagcuacaucgcgcuggacuccggccgggggaacugggacugcaucaugaccagcuaccaguaccugaucauccagaacacgaccugggagaaccacugccaguucucccgccccagccccaucggcuaccucgggcugcugagccagcggacccgcgacaucuacaucucccggcgccuccugggcaccuucacguggacccugagcgacuccgagggcaacgccacccccgggggcuacugccucacccgguggaugcugaucgaggccgagcugaagugcuucgggaacacggccgucgccaagugcaacgagaagcacgacgaggaguucugcgacaugcuccgccuguucgacuucaacaagcaggcgaucagccggcugaagucccccgcccagaugagcauccagcucaucaacaaggccgugaacgcccugaucaacgaccagcugaucaugaagaaccaccuccgcgacaucaugggcauccccuacugcaacuacuccaaguacugcuaccugaaccacaccaucaccgggaagaccagccugcccaagugcugccucguguccaacggcagcuaccugaacgagacgcacuucuccgacgacaucgagcagcaggccgacaacaugaucaccgagaugcugcagaaggaguacauggagcggcagggcaagaccccgcucgggcuggucgaccuguucguguucagcaccuccuucuaccugaucagcaucuuccuccgccuggugaagaucccgacgcaccggcacaucgucggcaagcccugccccaagccccaccgccugaaccacauggggaucugcuccugcggccucuacaagcagccgggggugcccgugcgguggaagcgcugaggacuaguaauaaggaaacuguaugaaugucugugggcaggaagugaagagauccuucuguaaagguuuuuggaauuaugucugcugaauaauaaacuuuuuugaaauaauaaaucugguagaaaaaugagaucuaaaaaaaaaaaaaaaaaaaaaaaaaaaaaaaaaaaaaaaaaaaaaaaaaaaaaaaaaaaaaaaaaaaaaaaaaaaaaaaaaaaaaaaaaaaaaaaaaaaa

SEQ ID NO: 32618 - RNA, 1785 nt, Artificial Sequence
  mRNA product Design b-4 (A100) comprising derived and/or modified sequence from LASV(Togo/2016/7082;Clade VI)__AMR44577__GPCmut7 (opt1)
aggagagucccgcagucggcguccagcggcucugcuuguucgugugugugucguugcaggccuuauucaagcuuaccaugggccagaucaucaccuucuuccaggaggugccccacgucaucgaggaggugaugaacaucgugcugaucgcccucagccugcuggccauccucaagggggucuacaacguggcgaccugcggcaucaucgggcuggugacguuccuguuccucugcggccgcuccugcagccugaucuacaagggguccuacgagcugcagacccucgagcugaacauggagacccugaacaugaccaugccgcucagcugcacgaagaacuccagccaccacuacauccgggucggcaacgagaccggccuggagcugacccucaccaacacguccaucaucaaccacaaguucugcaaccugagcgacgcccacaagcgcaaccuguacgaccacgcccucauguccauccugagcaccuuccaccuguccauccccaacuucaaccaguacgaggccaugagcugcgacuucaacgggggcaagaucuccgugcaguacaaccucagccacgccuacgcgguggacgccgccgagcacugcgggaccgucgccaacggcgugcugcagaccuucaugcggauggcguggggcggguccuacaucgcccuggacagcggccgcgggaacugggacugcaucaugacguccuaccaguaccucaucauccagaacaccaccugggaggaccacugccaguucagccggcccucccccaucggcuaccuggggcugcucagccagcgcacccgggacaucuacaucagccgccggcugcugggcacguucaccuggacccucuccgacagcgagggcaacgagacccccgggggcuacugccugacgcgcuggaugcugaucgaggccgagcucaagugcuucgggaacaccgccguggccaagugcaacgagaagcacgacgaggaguucugcgacaugcugcggcuguucgacuucaacaagcaggcgauccagcgccucaagucccccgcccagaugagcauccagcugaucaacaaggccgucaacgcccugaucaacgaccagcucaucaugaagaaccaccuccgggacaugaugggcauccccuacugcaacuacuccaaguacugcuaccugaaccacaccagcuccgggcgcaccagccugcccaagugcugccugguguccaacggcagcuaccugaacgagacgcacuucuccgacgacaucgagcagcaggccgacaacaugaucaccgagaugcuccagaaggaguacaucgaccggcagggcaagaccccgcuggggcugguggaccucuucgucuucagcaccuccuucuaccugaucagcaucuuccugcaccugaucaagaucccgacgcaccgccacaucgugggcaagcccugccccaagccccaccggcucaaccacauggggaucugcuccugcggccuguacaagcagccgggggugcccacccgcuggaagcggugaggacuaguaauaaggaaacuguaugaaugucugugggcaggaagugaagagauccuucuguaaagguuuuuggaauuaugucugcugaauaauaaacuuuuuugaaauaauaaaucugguagaaaaaugagaucuaaaaaaaaaaaaaaaaaaaaaaaaaaaaaaaaaaaaaaaaaaaaaaaaaaaaaaaaaaaaaaaaaaaaaaaaaaaaaaaaaaaaaaaaaaaaaaaaaaaa

SEQ ID NO: 32619 - RNA, 1785 nt, Artificial Sequence
  mRNA product Design b-4 (A100) comprising derived and/or modified sequence from LASV(KAK-428;Clade n.d. (VII))__ANH09740__GPCmut7 (opt1)
aggagagucccgcagucggcguccagcggcucugcuuguucgugugugugucguugcaggccuuauucaagcuuaccaugggccagaucgugaccuucuuccaggaggucccccacgugaucgaggaggugaugaacaucguccugaucgcccucagccugcuggccauccucaaggggcuguacaacuucgcgaccugcggcgugaucgggcugaucacguuccuccugcugugcggccgcuccugcagcgccaccuacaaggggcaguacgagcuccagacccuggagcugaacauggagucccucaacaugaccaugccgcugagcugcacgaagaacaacucccaccacuacauccgggccggcaacaacaccggccuggagcucacccugaccaacacgagcaucaucucccacaaguucugcaaccugagcgacgcccacaagaagaaccucuacgaccacacccugauguccaucaucaccaccuuccaccugagcauccccaacuucaaccaguacgaggccauguccugcgacuucaacgggggcaagaucagcauccaguacaaccucucccacagcuacgcgggggacgccgcccagcacugcggcacgguggccaacgggguccugcagaccuucaugcgcauggcguggggcggcuccuaccuggcccucgacagcgggcggcgcggcugggacugcaucaucuccagcuaccaguaccugaucauccagaacaccaccugggacgaccacugccaguucucccggcccagccccaucggguaccugggcuucgugagccagaagacgcgcgacaucuacaucucccggcgccuccugggcaccuucaccuggacccugagcgacuccgaggggcacgacaugccgggcggguacugccucacgcgguggaugcugaucgaggccgaccugaagugcuucggcaacaccgccguggccaagugcaacgagaagcacgacgaggaguucugcgacauguggcgccucuucgacuucaacaagcaggcgauccagcggcugaaggcccccgcccagaugaacauccagcugaucaacaaggccgucaacgcccucaucaacgaccagcugaugaugaagaaccaccuccgcgacaucauggggauccccuacugcaacuacagcaaguucugcuaccugaacaacaccaccacgggccggaccucccugccccgcugcugccugaucagcaacggcuccuaccucaacgagacccacuucagcgacgacaucgagcagcaggcggacaacaugaucaccgagaugcugcagaaggaguacauggaccggcaggggaagacgccccugggccucguggaccuguucguguucuccaccagcuucuaccugaucaccaucuuccuccaccuggucaagaucccgacccaccgccacaucguggggaagcccugccccaagccccaccggcugaaccacaugggcaucugcuccugcgggcuguacaagcagccgggcgugcccguccgcuggaagcggugaggacuaguaauaaggaaacuguaugaaugucugugggcaggaagugaagagauccuucuguaaagguuuuuggaauuaugucugcugaauaauaaacuuuuuugaaauaauaaaucugguagaaaaaugagaucuaaaaaaaaaaaaaaaaaaaaaaaaaaaaaaaaaaaaaaaaaaaaaaaaaaaaaaaaaaaaaaaaaaaaaaaaaaaaaaaaaaaaaaaaaaaaaaaaaaaa

SEQ ID NO: 32620 - RNA, 1785 nt, Artificial Sequence; identical to SEQ ID NO: 32614
  mRNA product Design b-4 (A100) comprising derived and/or modified sequence from LASV(Pinneo-NIG-1969;Clade I)__AIT17836__GPCmut7 (opt1)

SEQ ID NO: 32621 - RNA, 1785 nt, Artificial Sequence
  mRNA product Design b-4 (A100) comprising derived and/or modified sequence from LASV(ISTH0009-NIG-2011;Clade II)__AIT17404__GPCmut7 (opt1)
aggagagucccgcagucggcguccagcggcucugcuuguucgugugugugucguugcaggccuuauucaagcuuaccaugggccagaucaucaccuucuuccaggaggugccccacgucaucgaggaggugaugaacaucgugcugaucgcccucagccugcuggccauccucaaggggaucuacaacgucgcgaccugcggccuguucgggcugguguccuuccuccugcugugcggccgcagcugcuccacgaccuacaaggggguguacgagcuccagacccuggagcuggacauggccagccucaacaugaccaugccgcuguccugcacgaagaacaacagccaccacuacaucauggucggcaacgagaccggccuggagcucacccugaccaacacguccaucaucaaccacaaguucugcaaccugagcgacgcccacaagaagaaccucuacgaccacgcccugauguccaucaucagcaccuuccaccuguccauccccaacuucaaccaguacgaggccaugagcugcgacuucaacgggggcaagaucuccgugcaguacaaccucagccacgcguacgccguggacgccgccaaccacugcgggaccaucgcgaacggcguccugcagaccuucaugcggauggccuggggcggguccuacaucgcccuggacagcggcaagggguccugggacugcaucaugacgagcuaccaguaccucaucauccagaacaccaccugggaggaccacugccaguucucccgccccagccccaucggcuaccuggggcugcucagccagcggacccgcgacaucuacaucucccggcgccugcugggcacguucaccuggacccucagcgacuccgagggcaacgagacccccgggggcuacugccugacgcgguggaugcugaucgaggccgagcucaagugcuucgggaacaccgccguggcgaagugcaacgagaagcacgacgaggaguucugcgacaugcugcgccuguucgacuucaacaagcaggccauccggcgccucaagacccccgcccagaugagcauccagcugaucaacaaggccgugaacgcccugaucaacgaccagcucaucaugaagaaccaccuccgggacaucaugggcaucccguacugcaacuacuccaaguacugcuaccugaaccacaccgucacggggaagaccagccugccccgcugcugccugguguccaacggcagcuaccugaacgagacccacuucuccgacgacaucgagcagcaggcggacaacaugaucaccgagcuccugcagaaggaguacauggaccggcagggcaagacgccccuggggcucguggaccuguucgucuucagcaccuccuucuaccugaucagcaucuuccugcaccucaucaagaucccgacccaccgccacaucaccggcaagcccugccccaagccccaccggcugaaccacauggggaucugcuccugcggccuguacaagcacccgggggugcccgugaaguggaagcgcugaggacuaguaauaaggaaacuguaugaaugucugugggcaggaagugaagagauccuucuguaaagguuuuuggaauuaugucugcugaauaauaaacuuuuuugaaauaauaaaucugguagaaaaaugagaucuaaaaaaaaaaaaaaaaaaaaaaaaaaaaaaaaaaaaaaaaaaaaaaaaaaaaaaaaaaaaaaaaaaaaaaaaaaaaaaaaaaaaaaaaaaaaaaaaaaaa

SEQ ID NO: 32622 - RNA, 1785 nt, Artificial Sequence
  mRNA product Design b-4 (A100) comprising derived and/or modified sequence from LASV(ISTH2010-NIG-2012;Clade II)__AIT17482__GPCmut7 (opt1)
aggagagucccgcagucggcguccagcggcucugcuuguucgugugugugucguugcaggccuuauucaagcuuaccaugggccagaucaucaccuucuuccaggaggugccccacgucaucgaggaggugaugaacaucgugcugaucgcccucagccugcuggccauccucaaggggaucuacaacgucgcgaccugcggccuguucgggcugguguccuuccuccugcugugcggccgcagcugcuccacgaccuacaaggggguguacgagcuccagacccuggagcuggacauggccagccucaacaugaccaugccgcuguccugcacgaagaacaacagccaccacuacaucauggucggcaacgagaccggccuggagcucacccugaccaacacguccaucaucaaccacaaguucugcaaccugagcgacgcccacaagaagaaccucuacgaccacgcccugauguccaucaucagcaccuuccaccuguccauccccaacuucaaccaguacgaggccaugagcugcgacuucaacgggggcaagaucuccgugcaguacaaccucagccacgcguacgccguggacgccgccaaccacugcgggaccaucgcgaacggcguccugcagaccuucaugcggauggccuggggcggguccuacaucgcccuggacagcggcaagggguccugggacugcaucaugacgagcuaccaguaccucaucauccagaacaucaccugggaggaccacugccaguucucccgccccagccccaucggcuaccuggggcugcucagccagcggacccgcgacaucuacaucucccggcgccugcugggcaccuucacguggacccucagcgacuccgagggcaacgagacccccgggggcuacugccugacccgguggaugcugaucgaggccgagcucaagugcuucgggaacacggccguggcgaagugcaacgagaagcacgacgaggaguucugcgacaugcugcgccuguucgacuucaacaagcaggccauccggcgccucaagacccccgcccagaugagcauccagcugaucaacaaggccgugaacgcccugaucaacgaccagcucaucaugaagaaccaccuccgggacaucaugggcauccccuacugcaacuacuccaaguacugcuaccugaaccacaccgucaccgggaagacgagccugccccgcugcugccugguguccaacggcagcuaccugaacgagacccacuucuccgacgacaucgagcagcaggcggacaacaugaucaccgagcuccugcagaaggaguacaucgaccggcagggcaagaccccgcuggggcucguggaccuguucgucuucagcacguccuucuaccugaucagcaucuuccugcaccucgugaagaucccgacccaccgccacguggucggcaagcccugccccaagccccaccggcugaaccacauggggaucugcuccugcggccuguacaagcacccgggggugcccgugaaguggaagcgcugaggacuaguaauaaggaaacuguaugaaugucugugggcaggaagugaagagauccuucuguaaagguuuuuggaauuaugucugcugaauaauaaacuuuuuugaaauaauaaaucugguagaaaaaugagaucuaaaaaaaaaaaaaaaaaaaaaaaaaaaaaaaaaaaaaaaaaaaaaaaaaaaaaaaaaaaaaaaaaaaaaaaaaaaaaaaaaaaaaaaaaaaaaaaaaaaa

SEQ ID NO: 32623 - RNA, 1785 nt, Artificial Sequence
  mRNA product Design b-4 (A100) comprising derived and/or modified sequence from LASV(Lassa virus/H.sapiens-wt/NGA/2015/ISTH_0543;Clade II)__AVO03639__GPCmut7 (opt1)
aggagagucccgcagucggcguccagcggcucugcuuguucgugugugugucguugcaggccuuauucaagcuuaccaugggccagaucaucaccuucuuccaggaggugccccacgucaucgaggaggugaugaacaucgugcugaucgcccucagccugcuggccauccucaaggggaucuacaacgucgcgaccugcggccuguucgggcugguguccuuccuccugcugugcggccgcagcugcuccacgaccuacaaggggguguacgagcuccagacccuggagcuggacauggccaaccucaacaugaccaugccgcugagcugcacgaagaacaacucccaccacuacaucauggucggcaacgagaccggccuggagcucacccugaccaacacgagcaucaucaaccacaaguucugcaaccuguccgacgcccacaagaagaaccucuacgaccacgcccugaugagcaucaucuccaccuuccaccugagcauccccaacuucaaccaguacgaggccauguccugcgacuucaacgggggcaagaucagcgugcaguacaaccucucccacaccuacgcgguggacgccgccaaccacugcgggaccaucgccaacggcguccugcagacguucaugcggauggcguggggcgggagcuacaucgcccuggacuccggcaaggggagcugggacugcaucaugaccuccuaccaguaccucgugauccagaacaccaccugggaggaccacugccaguucagccgccccucccccaucggcuaccuggggcugcucagccagcggacgcgcgacaucuacaucagccggcgccugcugggcaccuucaccuggacccucuccgacagcgagggcaacgagacgcccgggggcuacugccugacccgguggaugcugaucgaggccgagcucaagugcuucgggaacaccgccguggccaagugcaacgagaagcacgacgaggaguucugcgacaugcugcgccuguucgacuucaacaagcaggcgauccggcgccucaagacccccgcccagauguccauccagcugaucaacaaggccgucaacgcccugaucaacgaccagcucaucaugaagaaccaccuccgggacaucaugggcauccccuacugcaacuacagcaaguacugcuaccugaaccacacggugaccgggaagaccucccugccccgcugcugccuggugagcaacggcuccuaccugaacgagacccacuucagcgacgacaucgagcagcaggccgacaacaugaucacggagcuccugcagaaggaguacaucgaccggcagggcaagaccccgcuggggcucgucgaccuguucguguucuccaccagcuucuaccugaucuccaucuuccugcaccucgugaagaucccgacccaccgccacaucacgggcaagcccugccccaagccccaccggcugaaccacauggggaucugcagcugcggccuguacaagcacccggggguccccgugaaguggaagcgcugaggacuaguaauaaggaaacuguaugaaugucugugggcaggaagugaagagauccuucuguaaagguuuuuggaauuaugucugcugaauaauaaacuuuuuugaaauaauaaaucugguagaaaaaugagaucuaaaaaaaaaaaaaaaaaaaaaaaaaaaaaaaaaaaaaaaaaaaaaaaaaaaaaaaaaaaaaaaaaaaaaaaaaaaaaaaaaaaaaaaaaaaaaaaaaaaa

SEQ ID NO: 32624 - RNA, 1785 nt, Artificial Sequence
  mRNA product Design b-4 (A100) comprising derived and/or modified sequence from LASV(Lassa virus/H.sapiens-wt/NGA/2016/ISTH_0009;Clade II)__AVO03571__GPCmut7 (opt1)
aggagagucccgcagucggcguccagcggcucugcuuguucgugugugugucguugcaggccuuauucaagcuuaccaugggccagaucaucaccuucuuccaggaggugccccacgucaucgaggaggugaugaacaucgugcugaucgcccucagccugcuggccauccucaaggggaucuacaacgucgcgaccugcggccugcuggggcucguguccuuccugcugcucugcggccgcagcugcuccacgaccuacaaggggguguacgagcugcagacccuggagcucgacauggccagccugaacaugaccaugccgcuguccugcacgaagaacaacagccaccacuacaucauggucggcaacgagaccggccucgagcugacccugaccaacacguccaucaucaaccacaaguucugcaaccucagcgacgcccacaagaagaaccuguacgaccacgcccugauguccaucaucagcaccuuccaccucuccauccccaacuucaaccaguacgaggccaugagcugcgacuucaacgggggccggaucuccgugcaguacaaccugagccacuccuacgcgguggacgccgccaaccacugcgggaccaucgccaacggcguccugcagaccuucaugcgcauggcguggggcgggagcuacaucgcccucgacuccggcaaggggagcugggacugcaucaugacguccuaccaguaccugaucauccagaacaccaccugggaggaccacugccaguucagccggcccagccccaucggcuaccuggggcuccugucccagcgcacccgggacaucuacaucagccgccggcugcucggcacguucaccuggacccuguccgacagcgagggcaacgagacccccgggggcuacugccugacgcgcuggaugcucaucgaggccgagcugaagugcuucgggaacaccgccguggccaagugcaacgagaagcacgacgaggaguucugcgacaugcugcggcuguucgacuucaacaagcaggcgauccgccggcugaagacccccgcccagauguccauccagcugaucaacaaggccgugaacgcccucaucaacgaccagcugaucaugaagaaccaccuccgcgacaucaugggcaucccguacugcaacuacagcaaguacugcuaccucaaccacaccgucacggggaagaccucccugccccggugcugccuggugagcaacggcuccuaccucaacgagacccacuucagcgacgacaucgagcagcaggccgacaacaugaucaccgagcugcugcagaaggaguacaucgaccgccagggcaagacgccccucgggcugguggaccuguucgucuucuccaccagcuucuaccugaucuccaucuuccuccaccuggugaagaucccgacccaccggcacaucaccggcaagcccugccccaagccccaccgccugaaccacauggggaucugcagcugcggccucuacaaccacccgggggugcccgucaaguggaagcggugaggacuaguaauaaggaaacuguaugaaugucugugggcaggaagugaagagauccuucuguaaagguuuuuggaauuaugucugcugaauaauaaacuuuuuugaaauaauaaaucugguagaaaaaugagaucuaaaaaaaaaaaaaaaaaaaaaaaaaaaaaaaaaaaaaaaaaaaaaaaaaaaaaaaaaaaaaaaaaaaaaaaaaaaaaaaaaaaaaaaaaaaaaaaaaaaa

SEQ ID NO: 32625 - RNA, 1785 nt, Artificial Sequence
  mRNA product Design b-4 (A100) comprising derived and/or modified sequence from LASV(Lassa virus/H.sapiens-wt/NGA/2016/ISTH_0017;Clade II)__AVO03567__GPCmut7 (opt1)
aggagagucccgcagucggcguccagcggcucugcuuguucgugugugugucguugcaggccuuauucaagcuuaccaugggccagaucaucaccuucuuccaggaggugccccacgucaucgaggaggugaugaacaucgugcugaucgcccucagccugcuggccauccucaaggggaucuacaacgucgcgaccugcggccuguucgggcugguguccuuccuccugcugugcggccgcagcugcuccacgaccuacaaggggguguacgagcuccagacccuggagcuggacauggccagccucaacaugaccaugccgcuguccugcacgaagaacaacagccaccacuacaucauggucggcaacgagaccggccuggagcucacccugaccaacacguccaucaucaaccacaaguucugcaaccugagcgacgcccacaagaagaaccucuacgaccacgcccugauguccaucaucagcaccuuccaccuguccauccccaacuucaaccaguacgaggccaugagcugcgacuucaacgggggcaagaucuccgugcaguacaaccucagccacaccuacgcgaucgacgccgccaaccacugcgggaccaucgccaacggcgugcugcagacguucaugcggauggcguggggcggguccuacaucgcccuggacagcggcaagggguccugggacugcaucaugaccagcuaccaguaccucaucauccagaacaccaccugggaggaccacugccaguucucccgccccagccccaucggcuaccuggggcugcucagccagcggacgcgcgacaucuacaucucccggcgccugcugggcaccuucaccuggacccucagcgacuccgagggcaacgagacgcccgggggcuacugccugacccgguggaugcugaucgaggccgagcucaagugcuucgggaacaccgccgucgccaagugcaacgagaagcacgacgaggaguucugcgacaugcugcgccuguucgacuucaacaagcaggcgauccggcgccucaagacccccgcccagaugagcauccagcugaucaacaaggccgugaacgcccugaucaacgaccagcucaucaugaagaaccaccuccgggacaucaugggcauccccuacugcaacuacuccaaguacugcuaccugaaccacacggugaccgggaagaccagccugccccgcugcugccuggucuccaacggcagcuaccugaacgagacccacuucuccgacgacaucgagcagcaggccgacaacaugaucacggagcuccugcagaaggaguacauggaccggcagggcaagaccccgcuggggcucguggaccuguucguguucagcaccuccuucuaccugaucagcaucuuccugcaccucguccgcaucccgacccaccggcacgugaucggcaagcccugccccaagccccaccgccugaaccacauggggaucugcuccugcggccuguacaagcacccgggggugcccgucaaguggaagcggugaggacuaguaauaaggaaacuguaugaaugucugugggcaggaagugaagagauccuucuguaaagguuuuuggaauuaugucugcugaauaauaaacuuuuuugaaauaauaaaucugguagaaaaaugagaucuaaaaaaaaaaaaaaaaaaaaaaaaaaaaaaaaaaaaaaaaaaaaaaaaaaaaaaaaaaaaaaaaaaaaaaaaaaaaaaaaaaaaaaaaaaaaaaaaaaaa

SEQ ID NO: 32626 - RNA, 1785 nt, Artificial Sequence
  mRNA product Design b-4 (A100) comprising derived and/or modified sequence from LASV(Lassa virus/H.sapiens-wt/NGA/2018/ISTH_0959;Clade II)__AVV65099__GPCmut7 (opt1)
aggagagucccgcagucggcguccagcggcucugcuuguucgugugugugucguugcaggccuuauucaagcuuaccaugggccagaucaucaccuucuuccaggaggugccccacgucaucgaggaggugaugaacaucgugcugaucgcccucagccugcuggccauccucaaggggaucuacaacgucgugaccugcggccuguucgggcugguguccuuccuccugcugugcggccgcagcugcuccacgaccuacaagggggucuacgagcuccagacccuggagcuggacauggcgagccucaacaugaccaugccgcuguccugcacgaagaacaacagccaccacuacaucauggugggcaacgagaccggccuggagcucacccugaccaacacguccaucaucaaccacaaguucugcaaccugagcgacgcccacaagaagaaccucuacgaccacgcccugauguccaucaucagcaccuuccaccuguccauccccaacuucaaccaguacgaggccaugagcugcgacuucaacgggggcaagaucuccgugcaguacaaccucagccacgccuacgcgaucgacgccgccaaccacugcgggaccaucgccaacggcguccugcagaccuucaugcggauggcguggggcggguccuacaucgcccuggacagcggcaagggguccugggacugcaucaugacgagcuaccaguaccucaucauccagaacaccaccugggaggaccacugccaguucucccgccccagccccaucggcuaccuggggcugcucagccagcggacccgcgacaucuacaucucccggcgccugcugggcacguucaccuggacccucagcgacuccgagggcaacgagacccccgggggcuacugccugacgcgguggaugcugaucgaggccgagcucaagugcuucgggaacaccgccguggccaagugcaacgagaagcacgacgaggaguucugcgacaugcugcgccuguucgacuucaacaagcaggcgauccggcgccucaagacccccgcccagaugagcauccagcugaucaacaaggccgugaacgcccugaucaacgaccagcucaucaugaagaaccaccuccgggacaucaugggcaucccguacugcaacuacuccaaguacugcuaccugaaccacaccgucacggggaagaccagccugccccgcugcugccugguguccaacggcagcuaccugaacgagacccacuucuccgacgacaucgagcagcaggccgacaacaugaucaccgagcuccugcagaaggaguacaucgaccggcagggcaagacgccccuggggcucguggaccuguucgucuucagcaccuccuucuaccugaucagcaucuuccugcaccucgugaagaucccgacccaccgccacgugaucggcaagcccugccccaagccccaccggcugaaccacauggggaucugcuccugcggccuguacaagcacccggggguccccgugaaguggaagcgcugaggacuaguaauaaggaaacuguaugaaugucugugggcaggaagugaagagauccuucuguaaagguuuuuggaauuaugucugcugaauaauaaacuuuuuugaaauaauaaaucugguagaaaaaugagaucuaaaaaaaaaaaaaaaaaaaaaaaaaaaaaaaaaaaaaaaaaaaaaaaaaaaaaaaaaaaaaaaaaaaaaaaaaaaaaaaaaaaaaaaaaaaaaaaaaaaa

SEQ ID NO: 32627 - RNA, 1785 nt, Artificial Sequence
  mRNA product Design b-4 (A100) comprising derived and/or modified sequence from LASV(LASV003-NIG-2008;Clade II)__AIT17580__GPCmut7 (opt1)
aggagagucccgcagucggcguccagcggcucugcuuguucgugugugugucguugcaggccuuauucaagcuuaccaugggccagaucaucaccuucuuccaggaggugccccacgucaucgaggaggugaugaacaucgugcugaucgcccucagccugcuggccauccucaaggggaucuacaacgucgcgaccugcggccuguucgggcugguguccuuccuccugcugugcggccgcagcugcuccacgaccuacaaggggguguacgagcuccagacccuggagcuggacauggccagccucaacaugaccaugccgcuguccugcacgaagaacaacagccaccacuacaucauggucggcaacgagaccggccuggagcucacccugaccaacacguccaucaucaaccacaaguucugcaaccugagcgacgcccacaagaagaaccucuacgaccacgcccugauguccaucaucagcaccuuccaccuguccauccccaacuucaaccaguacgaggccaugagcugcgacuucaacgggggcaagaucuccgugcaguacaaccucagccacaccuacgcgguggacgccgccaaccacugcgggaccaucgccaacggcguccugcagacguucaugcggauggcguggggcggguccuacaucgcccuggacagcggcaagggguccugggacugcaucaugaccagcuaccaguaccucaucauccagaacaccaccugggaggaccacugccaguucucccgccccagccccaucggcuaccuggggcugcucagccagcggacgcgcgacaucuacaucucccggcgccugcugggcaccuucaccuggacccucagcgacuccgagagcaacgagacgccgggcggguacugccugacccgguggaugcugaucgaggccgagcucaagugcuucggcaacaccgccguggccaagugcaacgagaagcacgacgaggaguucugcgacaugcugcgccuguucgacuucaacaagcaggcgauccggcgccucaaggcccccgcccagauguccauccagcugaucaacaaggccgugaacgcccugaucaacgaccagcucaucaugaagaaccaccuccgggacaucauggggauccccuacugcaacuacagcaaguacugcuaccugaaccacaccgucacgggccgcaccucccugccccggugcugccuggugagcaacggguccuaccugaacgagacccacuucagcgacgacaucgagcagcaggcggacaacaugaucaccgagcuccugcagaaggaguacauggaccgccagggcaagacgccccugggccucguggaccuguucgucuucuccaccagcuucuaccugaucuccaucuuccugcaccucgugaagaucccgacccaccggcacgugaucgggaagcccugccccaagccccaccgccugaaccacaugggcaucugcagcugcgggcuguacaagcacccgggcguccccgugaaguggaagcggugaggacuaguaauaaggaaacuguaugaaugucugugggcaggaagugaagagauccuucuguaaagguuuuuggaauuaugucugcugaauaauaaacuuuuuugaaauaauaaaucugguagaaaaaugagaucuaaaaaaaaaaaaaaaaaaaaaaaaaaaaaaaaaaaaaaaaaaaaaaaaaaaaaaaaaaaaaaaaaaaaaaaaaaaaaaaaaaaaaaaaaaaaaaaaaaaa

SEQ ID NO: 32628 - RNA, 1785 nt, Artificial Sequence
  mRNA product Design b-4 (A100) comprising derived and/or modified sequence from LASV(LASV035-NIG-2009;Clade II)__AIT17588__GPCmut7 (opt1)
aggagagucccgcagucggcguccagcggcucugcuuguucgugugugugucguugcaggccuuauucaagcuuaccaugggccagaucaucaccuucuuccaggaggugccccacgucaucgaggaggugaugaacaucgugcugaucgcccucagccugcuggccauccucaaggggaucuacaacgucgcgaccugcggccuguucgggcugguguccuuccuccugcugugcggccgcagcugcuccacgaccuacaaggggguguacgagcuccagacccuggagcuggacauggccagccucaacaugaccaugccgcuguccugcacgaagaacaacagccaccacuacaucauggucggcaacgagaccggccuggagcucacccugaccaacacguccaucaucaaccacaaguucugcaaccugagcgacgcccacaagaagaaccucuacgaccacgcccugauguccaucaucagcaccuuccaccuguccauccccaacuucaaccaguacgaggccaugagcugcgacuucaacgggggcaagaucuccgugcaguacaaccucagccacgcguacgccguggacgccgccaaccacugcgggaccaucgcgaacggcguccugcagaccuucaugcggauggccuggggcggguccuacaucgcccuggacagcggcaagggguccugggacugcaucaugacgagcuaccaguaccucaucauccagaacaccaccugggaggaccacugccaguucucccgccccagccccaucggcuaccuggggcugcucagccagcggacccgcgacaucuacaucucccggcgccugcugggcacguucaccuggacccucagcgacuccgagggcaacgagacccccgggggcuacugccugacgcgguggaugcugaucgaggccgagcucaagugcuucgggaacaccgccguggcgaagugcaacgagaagcacgacgaggaguucugcgacaugcugcgccuguucgacuucaacaagcaggccauccggcgccucaaggcccccgcccagaugagcauccagcugaucaacaaggccgugaacgcgcugaucaacgaccagcucaucaugaagaaccaccuccgggacaucaugggcauccccuacugcaacuacuccaaguacugcuaccugaaccacaccgucaccgggaagacgagccugccccgcugcugccugguguccaacggcagcuaccugaacgagacccacuucuccgacgacaucgagcagcaggccgacaacaugaucaccgagcuccugcagaaggaguacaucgaccggcagggcaagaccccgcuggggcucguggaccuguucgucuucagcacguccuucuaccugaucagcaucuuccugcaccucgugaagaucccgacccaccgccacgugaucggcaagcccugccccaagccccaccggcugaaccacauggggaucugcuccugcggccuguacaagcacccggggguccccgugaaguggaagcgcugaggacuaguaauaaggaaacuguaugaaugucugugggcaggaagugaagagauccuucuguaaagguuuuuggaauuaugucugcugaauaauaaacuuuuuugaaauaauaaaucugguagaaaaaugagaucuaaaaaaaaaaaaaaaaaaaaaaaaaaaaaaaaaaaaaaaaaaaaaaaaaaaaaaaaaaaaaaaaaaaaaaaaaaaaaaaaaaaaaaaaaaaaaaaaaaaa

SEQ ID NO: 32629 - RNA, 1785 nt, Artificial Sequence
  mRNA product Design b-4 (A100) comprising derived and/or modified sequence from LASV(LASV1000-NIG-2009;Clade II)__AIT17782__GPCmut7 (opt1)
aggagagucccgcagucggcguccagcggcucugcuuguucgugugugugucguugcaggccuuauucaagcuuaccaugggccagaucaucaccuucuuccaggaggugccccacgucaucgaggaggugaugaacaucgugcugaucgcccucagccugcuggccauccucaaggggaucuacaacgucgcgaccugcggccuguucgggcugguguccuuccuccugcugugcggccgcagcugcuccacgaccuacaaggggguguacgagcuccagacccuggagcuggacauggccagccucaacaugaccaugccgcuguccugcacgaagaacaacagccaccacuacaucauggucggcaacgagaccggccuggagcucacccugaccaacacguccaucaucaaccacaaguucugcaaccugagcgacgcccacaagaagaaccucuacgaccacgcccugauguccaucaucagcaccuuccaccuguccauccccaacuucaaccaguacgaggccaugagcugcgacuucaacgggggcaagaucuccgugcaguacaaccucagccacaccuacgcgguggacgccgccaaccacugcgggaccaucgccaacggcguccugcagacguucaugcggauggcguggggcggguccuacaucgcccuggacagcggcaagggguccugggacugcaucaugaccagcuaccaguaccucaucauccagaacaccaccugggaggaccacugccaguucucccgccccagccccaucggcuaccuggggcugcucagccagcggacgcgcgacaucuacaucucccggcgccugcugggcaccuucaccuggacccucagcgacuccgagggcaacgagacgcccgggggcuacugccugacccgguggaugcugaucgaggccgagcucaagugcuucgggaacaccgccguggccaagugcaacgagaagcacgacgaggaguucugcgacaugcugcgccuguucgacuucaacaagcaggcgaucaagcggcucaagacccccgcccagaugagcauccagcugaucaacaaggccgugaacgcccugaucaacgaccagcucaucaugaagaaccaccuccgcgacaucaugggcauccccuacugcaacuacuccaaguacugcuaccugaaccacacggucaccgggaagaccagccugccccggugcugccugguguccaacggcagcuaccugaacgagacccacuucuccgacgacaucgagcagcaggccgacaacaugaucacggagcuccugcagaaggaguacaucgaccgccagggcaagaccccgcuggggcucguggaccuguucgucuucagcaccuccuucuaccugaucagcaucuuccugcaccucgugaagaucccgacccaccggcacguggucggcaagcccugccccaagccccaccgccugaaccacauggggaucugcuccugcggccuguacaagcacccgggggugcccgugaaguggaagcggugaggacuaguaauaaggaaacuguaugaaugucugugggcaggaagugaagagauccuucuguaaagguuuuuggaauuaugucugcugaauaauaaacuuuuuugaaauaauaaaucugguagaaaaaugagaucuaaaaaaaaaaaaaaaaaaaaaaaaaaaaaaaaaaaaaaaaaaaaaaaaaaaaaaaaaaaaaaaaaaaaaaaaaaaaaaaaaaaaaaaaaaaaaaaaaaaa

SEQ ID NO: 32630 - RNA, 1785 nt, Artificial Sequence
  mRNA product Design b-4 (A100) comprising derived and/or modified sequence from LASV(LASV221-NIG-2010;Clade II)__AIT17624__GPCmut7 (opt1)
aggagagucccgcagucggcguccagcggcucugcuuguucgugugugugucguugcaggccuuauucaagcuuaccaugggccagaucaucaccuucuuccaggaggugccccacgucaucgaggaggugaugaacaucgugcugaucgcccucagccugcuggccauccucaaggggaucuacaacgucgcgaccugcggccuguucgggcugguguccuuccuccugcugugcggccgcagcugcuccacgaccuacaaggggguguacgagcuccagacccuggagcuggacauggccagccucaacaugaccaugccgcuguccugcacgaagaacaacagccaccacuacaucauggucggcaacgagaccggccuggagcucacccugaccaacacguccaucaucaaccacaaguucugcaaccugagcgacgcccacaagaagaaccucuacgaccacgcccugauguccaucaucagcaccuuccaccuguccauccccaacuucaaccaguacgaggccaugagcugcgacuucaacgggggcaagaucuccgugcaguacaaccucagccacaccuacgcgaucgacgccgccaaccacugcgggaccaucgccaacggcgugcugcagacguucaugcggauggcguggggcggguccuacaucgcccuggacagcggcaagggguccugggacugcaucaugaccagcuaccaguaccucaucauccagaacaccaccugggaggaccacugccaguucucccgccccagccccaucggcuaccuggggcugcucagccagcggacgcgcgacaucuacaucucccggcgccugcugggcaccuucaccuggacccucagcgacuccgagggcaacgagacgcccgggggcuacugccugacccgguggaugcugaucgaggccgagcucaagugcuucgggaacaccgccgucgccaagugcaacgagaagcacgacgaggaguucugcgacaugcugcgccuguucgacuucaacaagcaggcgauccggcgccucaagacccccgcccagaugagcauccagcugaucaacaaggccgugaacgcccugaucaacgaccagcucaucaugaagaaccaccuccgggacaucaugggcauccccuacugcaacuacuccaaguacugcuaccugaaccacacggugaccgggaagaccagccugccccgcugcugccuggucuccaacggcagcuaccugaacgagacccacuucuccgacgacaucgagcagcaggccgacaacaugaucacggagaugcuccagaaggaguacauggaccggcagggcaagaccccgcuggggcugguggaccucuucguguucagcaccuccuucuaccugaucagcaucuuccugcaccuggucaagaucccgacccaccgccacgugaucggcaagcccugccccaagccccaccggcucaaccacauggggaucugcuccugcggccuguacaagcacccgggggugcccgucaaguggaagcgcugaggacuaguaauaaggaaacuguaugaaugucugugggcaggaagugaagagauccuucuguaaagguuuuuggaauuaugucugcugaauaauaaacuuuuuugaaauaauaaaucugguagaaaaaugagaucuaaaaaaaaaaaaaaaaaaaaaaaaaaaaaaaaaaaaaaaaaaaaaaaaaaaaaaaaaaaaaaaaaaaaaaaaaaaaaaaaaaaaaaaaaaaaaaaaaaaa

SEQ ID NO: 32631 - RNA, 1785 nt, Artificial Sequence
  mRNA product Design b-4 (A100) comprising derived and/or modified sequence from LASV(LASV237-NIG-2010;Clade II)__AIT17638__GPCmut7 (opt1)
aggagagucccgcagucggcguccagcggcucugcuuguucgugugugugucguugcaggccuuauucaagcuuaccaugggccagaucaucaccuucuuccaggaggugccccacgucaucgaggaggugaugaacaucgugcugaucgcccucagccugcuggccauccucaaggggaucuacaacgucgcgaccugcggccuguucgggcugguguccuuccuccugcugugcggccgcagcugcuccacgaccuacaaggggguguacgagcuccagacccuggagcuggacauggccagccucaacaugaccaugccgcuguccugcacgaagaacaacagccaccacuacaucauggucggcaacgagaccggccuggagcucacccugaccaacacguccaucaucaaccacaaguucugcaaccugagcgacgcccacaagaaggaccucuacgaccacgcccugauguccaucaucagcaccuuccaccuguccauccccaacuucaaccaguacgaggccaugagcugcgacuucaacgggggcaagaucuccgugcaguacaaccucagccacaccuacgcgguggacgccgccaaccacugcgggaccaucgccaacggcguccugcagacguucaugcggauggcguggggcggguccuacaucgcccuggacagcggcaagggguccugggacugcaucaugaccagcuaccaguaccucaucauccagaacaccaccugggaggaccacugccaguucucccgccccagccccaucggcuaccuggggcugcucagccagcggacgcgcgacaucuacaucucccggcgccugcugggcaccuucaccuggacccucagcgacuccgagggcaacgagacgcccgggggcuacugccugacccgguggaugcugaucgaggccgagcucaagugcuucgggaacaccgccguggccaagugcaacgagaagcacgacgaggaguucugcgacaugcugcgccuguucgacuucaacaagcaggcgauccggcgccucaagacccccgcccagaugagcauccagcugaucaacaaggccgugaacgcccugaucaacgaccagcucaucaugaagaaccaccuccgggacaucaugggcauccccuacugcaacuacuccaaguacugcuaccugaaccacacggucaccgggaagaccagccugccccgcugcugccugguguccaacggcagcuaccugaacgagacccacuucuccgacgacaucgagcagcaggccgacaacaugaucacggagcuccugcagaaggaguacauggaccggcagggcaagaccccgcuggggcucguggaccuguucgucuucagcaccuccuucuaccugaucagcaucuuccugcaccucaucaagaucccgacccaccgccacaucacgggcaagcccugccccaagccccaccggcugaaccacauggggaucugcuccugcggccuguacaagcacccgggggugcccgugaaguggaagcgcugaggacuaguaauaaggaaacuguaugaaugucugugggcaggaagugaagagauccuucuguaaagguuuuuggaauuaugucugcugaauaauaaacuuuuuugaaauaauaaaucugguagaaaaaugagaucuaaaaaaaaaaaaaaaaaaaaaaaaaaaaaaaaaaaaaaaaaaaaaaaaaaaaaaaaaaaaaaaaaaaaaaaaaaaaaaaaaaaaaaaaaaaaaaaaaaaa

SEQ ID NO: 32632 - RNA, 1785 nt, Artificial Sequence
  mRNA product Design b-4 (A100) comprising derived and/or modified sequence from LASV(LASV253-NIG-2011;Clade II)__AIT17670__GPCmut7 (opt1)
aggagagucccgcagucggcguccagcggcucugcuuguucgugugugugucguugcaggccuuauucaagcuuaccaugggccagaucaucaccuucuuccaggaggugccccacgucaucgaggaggugaugaacaucgugcugaucgcccucagccugcuggccauccucaaggggaucuacaacgucgcgaccugcggccuguucgggcugguguccuuccuccugcugugcggccgcagcugcuccacgaccuacaaggggguguacgagcuccagacccuggagcuggacauggccagccucaacaugaccaugccgcuguccugcacgaagaacaacagccaccacuacaucauggucggcaacgagaccggccuggagcucacccugaccaacacguccaucaucaaccacaaguucugcaaccugagcgacgcccacaagaagaaccucuacgaccacgcccugauguccaucaucagcaccuuccaccuguccauccccaacuucaaccaguacgaggccaugagcugcgacuucaacgggggcaagaucuccgugcaguacaaccucagccacaccuacgcgguggacgccgccaaccacugcgggaccaucgccaacggcguccugcagacguucaugcggauggcguggggcggguccuacaucgcccuggacagcggcaagggguccugggacugcaucaugaccagcuaccaguaccucaucauccagaacaccaccugggaggaccacugccaguucucccgccccagccccaucggcuaccuggggcugcucagccagcggacgcgcgacaucuacaucucccggcgccugcugggcaccuucaccuggacccucagcgacuccgagggcaacgagacgcccgggggcuacugccugacccgguggaugcugaucgaggccgagcucaagugcuucgggaacaccgccguggccaagugcaacgagaagcacgacgaggaguucugcgacaugcugcgccuguucgacuucaacaagcaggcgauccggcgccucaaggcccccgcccagaugagcauccagcugaucaacaaggccgugaacgcccugaucaacgaccagcucaucaugaagaaccaccuccgggacaucaugggcaucccguacugcaacuacuccaaguacugcuaccugaaccacaccgucacggggcgcaccagccugccccggugcugccugguguccaacggcagcuaccugaacgagacccacuucuccgacgacaucgagcagcaggcggacaacaugaucaccgagcuccugcagaaggaguacaucgaccgccagggcaagacgccccuggggcucguggaccuguucgucuucagcaccuccuucuaccugaucagcaucuuccugcaccucgugaagaucccgacccaccggcacaucaucggcaagcccugccccaagccccaccgccugaaccacauggggaucugcuccugcggccuguacaagcacccgggggugcccgucaaguggaagcggugaggacuaguaauaaggaaacuguaugaaugucugugggcaggaagugaagagauccuucuguaaagguuuuuggaauuaugucugcugaauaauaaacuuuuuugaaauaauaaaucugguagaaaaaugagaucuaaaaaaaaaaaaaaaaaaaaaaaaaaaaaaaaaaaaaaaaaaaaaaaaaaaaaaaaaaaaaaaaaaaaaaaaaaaaaaaaaaaaaaaaaaaaaaaaaaaa

SEQ ID NO: 32633 - RNA, 1785 nt, Artificial Sequence
  mRNA product Design b-4 (A100) comprising derived and/or modified sequence from LASV(LASV254-NIG-2011;Clade II)__AIT17674__GPCmut7 (opt1)
aggagagucccgcagucggcguccagcggcucugcuuguucgugugugugucguugcaggccuuauucaagcuuaccaugggccagaucaucaccuucuuccaggaggugccccacgucaucgaggaggugaugaacaucgugcugaucgcccucagccugcuggccauccucaaggggaucuacaacgucgcgaccugcggccuguucgggcugguguccuuccuccugcugugcggccgcagcugcuccacgaccuacaaggggguguacgagcuccagacccuggagcuggacaugaccaaccucaacaugacgaugccgcugagcugcaccaagaacaacucccaccacuacaucauggucggcaacgagaccggccuggagcucacccugacgaacaccagcaucaucaaccacaaguucugcaaccuguccgacgcccacaagaagaaccucuacaaccacgcccugaugagcaucaucuccaccuuccaccugagcauccccaacuucaaccaguacgaggccauguccugcgacuucaacgggggcaagaucagcgugcaguacaaccucucccacagcuacgccguggacgcggccaaccacugcgggaccaucgccaacggcguccugcagacguucaugcggauggccuggggcggguccuacaucgcgcuggacagcggcaaggggaacugggacugcaucaugaccuccuaccaguaccucaucauccagaacaccaccugggaggaccacugccaguucagccgccccucccccaucggcuaccuggggcugcucagccagcggacgcgcgacaucuacaucagccggcgccugcugggcaccuucaccuggacccucuccgacagcgagggcaacgagacgcccgggggcuacugccugacccgguggaugcugaucgaggccgagcucaagugcuucgggaacaccgccguggccaagugcaacgagaagcacgacgaggaguucugcgacaugcugcgccuguucgacuucaacaagcaggccauccggcgccucaagacccccgcgcaggccaacauccagcugaucaacaaggccgugaacgcccugaucaacgaccagcucaucaugaagaaccaccuccgggacaucaugggcauccccuacugcaacuacuccaaguacugcuaccugaaccacacggucaccgggaagaccagccugccccgcugcugccugguguccaacggcagcuaccugaacgagacccacuucuccgacgacaucgagcagcaggccgacaacaugaucacggagcuccugcagaaggaguacauggaccggcagggcaagaccccgcuggggcucguggaccuguucgucuucagcaccuccuucuaccugaucagcaucuuccugcaccucgugaagaucccgacccaccgccacgugaucggcaagcccugccccaagccccaccggcugaaccacauggggaucugcuccugcggccuguacaagcacccggggguccccgugaaguggaagcgcugaggacuaguaauaaggaaacuguaugaaugucugugggcaggaagugaagagauccuucuguaaagguuuuuggaauuaugucugcugaauaauaaacuuuuuugaaauaauaaaucugguagaaaaaugagaucuaaaaaaaaaaaaaaaaaaaaaaaaaaaaaaaaaaaaaaaaaaaaaaaaaaaaaaaaaaaaaaaaaaaaaaaaaaaaaaaaaaaaaaaaaaaaaaaaaaaa

SEQ ID NO: 32634 - RNA, 1785 nt, Artificial Sequence
  mRNA product Design b-4 (A100) comprising derived and/or modified sequence from LASV(Nig08-A19;Clade III)__ADU56618__GPCmut7 (opt1)
aggagagucccgcagucggcguccagcggcucugcuuguucgugugugugucguugcaggccuuauucaagcuuaccaugggccagaucgugaccuucuuccaggaggucccccacgugaucgaggaggugaugaacaucguccugaucgcccucagcauccuggccauccugaaggggcucuacaacaucgcgaccugcggccugaucgggcuggugacguuccuccugcuguccggccgcagcugcuccaugaccuacaaggggguguacgagcuccagacccuggagcugaacaugaacacccucaacaugacgaugccgcugagcugcaccaagaacaacucccaccacuacaucauggucggcaacgagaccggccuggagcucacccugacgaacaccagccugcuccaccacaaguucugcaaccuguccgacgcccacaagaagaaccuguacgaccacacccucaugagcaucaucuccaccuuccaccugagcauccccaacuucaaccaguacgaggccauguccugcgacuucaacgggggcaagaucacggugcaguacaaccugagccacuccuacgccaucgacgccgcgaaccacugcgggaccguggccaacggcguccuccagaccuucaugcggauggccuggggcgggagcuacaucgcccuggacuccggccgcgggaagugggacugcaucaugaccagcuaccaguaccugaucauccagaacacgaccugggaggaccacugccaguucucccggcccagccccaucggcuaccucgggcugcugucccagcgcacccgggacaucuacaucagccgccggcuccugggcaccuucacguggacccugagcgacuccgagggcaacgagacccccgggggcuacugccucacccgcuggaugcugaucgaggcggagcugaagugcuucgggaacacggccguggccaagugcaacgagaagcacgacgaggaguucugcgacaugcuccggcuguucgacuucaacaagcaggccauccgccggcugaaggcccccgcgcagaugagcauccagcucaucaacaaggccgugaacgcccugaucaacgaccagcugaucaugaagaaccaccuccgcgacaucaugggcauccccuacugcaacuacuccaaguacugcuaccugaaccacaccagcaccgggcggaccucccugccccgcugcugccucgucagcaacggcuccuaccugaacgagacgcacuucagcgacgacaucgagcagcaggccgacaacaugaucaccgagaugcugcagaaggaguaccucgaccggcagggcaagaccccgcuggggcugguggaccuguucguguucuccaccagcuucuaccucaucuccaucuuccugcaccuggucaagaucccgacgcaccgccacaucgugggcaagcccugccccaagccccaccggcucaaccacauggggaucugcagcugcggccuguacaagcagccgggggugcccguccgcuggaagcggugaggacuaguaauaaggaaacuguaugaaugucugugggcaggaagugaagagauccuucuguaaagguuuuuggaauuaugucugcugaauaauaaacuuuuuugaaauaauaaaucugguagaaaaaugagaucuaaaaaaaaaaaaaaaaaaaaaaaaaaaaaaaaaaaaaaaaaaaaaaaaaaaaaaaaaaaaaaaaaaaaaaaaaaaaaaaaaaaaaaaaaaaaaaaaaaaa

SEQ ID NO: 32635 - RNA, 1788 nt, Artificial Sequence
  mRNA product Design b-4 (A100) comprising derived and/or modified sequence from LASV(G1180-SLE-2010;Clade IV)__AIT17168__GPCmut7 (opt1)
aggagagucccgcagucggcguccagcggcucugcuuguucgugugugugucguugcaggccuuauucaagcuuaccaugggccagaucgugaccuucuuccaggaggucccccacgugaucgaggaggugaugaacaucguccugaucgcccucagcauccuggccgugcugaaggggcucuacaacuucgcgaccugcggccugguggggcugcucaccuuccugcugcucugcggccgcuccugcaccgccagccgguacaagggggucuacgagcugcagacccuggagcucaacauggagacccugaacaugacgaugccgcuguccugcaccaagaacaacagccaccacuacaucauggugggcaacgagaccggccucgagcugacccugacgaacaccuccaucaucaaccacaaguucugcaaccucagcgacgcccacaagaagaaccuguacgaccacgcccugauguccaucaucagcaccuuccaccucuccauccccaacuucaaccaguacgaggccaugagcugcgacuucaacgggggcaagaucuccgugcaguacaaccugagccacuccuacgcgggggacgccgccaaccacugcggcaccgucgccaacggggugcugcagacguucaugcgcauggcguggggcggcagcuacaucgcccucgacuccgggcacggcagcugggacugcaucaugaccuccuaccaguaccugaucauccagaacaccaccugggaggaccacugccaguucagccggcccucccccaucggguaccugggccuccugagccagcgcacgcgggacaucuacaucagccgccggcugcucggcaccuucaccuggacccuguccgacagcgaggggaaggacacgccgggcggguacugccugacccgcuggaugcucaucgaggccgagcugaagugcuucggcaacaccgccguggccaagugcaacgagaagcacgacgaggaguucugcgacaugcugcggcuguucgacuucaacaagcaggcgauccagcgccugaaggcccccgcccagauguccauccagcugaucaacaaggccgucaacgcccucaucaacgaccagcugaucaugaagaaccaccuccgggacaucauggggauccccuacugcaacuacagcaaguacugcuaccucaaccacaccacgaccggcaagaccucccugcccaagugcugccuggugagcaacggcuccuaccucaacgagacccacuucagcgacgacaucgagcagcaggcggacaacaugaucacggagaugcugcagaaggaguacauggagcgccaggggaagacgccccugggccucguggaccuguucgucuucuccaccagcuucuaccugaucuccaucuuccugcaccucgugaagaucccgacccaccggcacaucgugggcaagagcugccccaagccccaccgccugaaccacauggggaucugcuccugcgggcuguacaagcagcccggcgucccggugaaguggaagcggugaggacuaguaauaaggaaacuguaugaaugucugugggcaggaagugaagagauccuucuguaaagguuuuuggaauuaugucugcugaauaauaaacuuuuuugaaauaauaaaucugguagaaaaaugagaucuaaaaaaaaaaaaaaaaaaaaaaaaaaaaaaaaaaaaaaaaaaaaaaaaaaaaaaaaaaaaaaaaaaaaaaaaaaaaaaaaaaaaaaaaaaaaaaaaaaaa

SEQ ID NO: 32636 - RNA, 1788 nt, Artificial Sequence
  mRNA product Design b-4 (A100) comprising derived and/or modified sequence from LASV(G1442-SLE-2011;Clade IV)__AIT17180__GPCmut7 (opt1)
aggagagucccgcagucggcguccagcggcucugcuuguucgugugugugucguugcaggccuuauucaagcuuaccaugggccagaucgugaccuucuuccaggaggucccccacgugaucgaggaggugaugaacaucguccugaucgcccucagcauccuggccgugcugaaggggcucuacaacguggcgaccugcggccugaucgggcuggucacguuccuccugcugugcggccgcuccugcaccaccacccucuacaaggggguguacgagcugcagacgcuggagcucaacauggagacccugaacaugaccaugccgcugagcugcaccaagaacaacucccaccacuacauccgggugggcaacgagacgggccucgagcugacccugaccaacaccagcaucaucaaccacaaguucugcaaccucuccgacgcccacaagaagaaccuguacgaccacgcccugaugagcaucaucuccacguuccaccucagcauccccaacuucaaccaguacgaggccauguccugcgacuucaacgggggcaagaucagcguccaguacaaccugucccacagcuacgccggggacgcggccaaccacugcggcaccguggccaacggggugcugcagaccuucaugcgcauggccuggggcggcuccuacaucgcgcucgacagcgggcggggcaacugggacugcaucaugaccuccuaccaguaccugaucauccagaacacgaccugggacgaccacugccaguucagccgccccucccccaucggguaccugggccuccugagccagcggacccgcgacgucuacaucucccggcgccugcucggcaccuucacguggacccugagcgacagcgaggggaaggacaccccgggcggguacugccugacccgguggaugcucaucgaggccgagcugaagugcuucggcaacacggccguggccaagugcaacgagaagcacgacgaggaguucugcgacaugcugcgccucuucgacuucaacaagcaggccauccagcggcugaaggcgcccgcccagauguccauccagcugaucaacaaggccgugaacgcccucaucaacgaccagcugaucaugaagaaccaccuccgcgacaucauggggauccccuacugcaacuacagcaaguacugcuaccugaacaacaccgccaccggcaagaccucccugcccaagugcugccugaucagcaacggcuccuaccucaacgagacgcacuucagcgacgacaucgagcaggaggcggacaacaugaucaccgagaugcugcagaaggaguacauggagcggcaggggaagacgccccugggccucgucgaccuguucguguucuccaccagcuucuaccugaucuccaucuuccugcaccucgugaagaucccgacccaccgccacaucgucggcaagagcugccccaagccccaccggcugaaccacauggggaucugcuccugcgggcuguacaagcagcccggcgugccggugcgcuggaagcggugaggacuaguaauaaggaaacuguaugaaugucugugggcaggaagugaagagauccuucuguaaagguuuuuggaauuaugucugcugaauaauaaacuuuuuugaaauaauaaaucugguagaaaaaugagaucuaaaaaaaaaaaaaaaaaaaaaaaaaaaaaaaaaaaaaaaaaaaaaaaaaaaaaaaaaaaaaaaaaaaaaaaaaaaaaaaaaaaaaaaaaaaaaaaaaaaa

SEQ ID NO: 32637 - RNA, 1788 nt, Artificial Sequence
  mRNA product Design b-4 (A100) comprising derived and/or modified sequence from LASV(G3010-SLE-2013;Clade IV)__AIT17344__GPCmut7 (opt1)
aggagagucccgcagucggcguccagcggcucugcuuguucgugugugugucguugcaggccuuauucaagcuuaccaugggccagaucgugaccuucuuccaggaggucccccacgugaucgaggaggugaugaacaucguccugaucgcccucagcauccuggccgugcugaaggggcucuacaacuucgcgaccugcggccugguggggcuggucacguuccuccugcugugcggccgcuccugcaccaccagccucuacaaggggguguacgagcugcagacccuggagcucaacauggagacgcugaacaugaccaugccgcuguccugcaccaagaacaacagccaccacuacaucauggugggcaacgagaccggccucgagcugacgcugaccaacaccuccaucaucaaccacaaguucugcaaccucagcgacgcccacaagaagaaccuguacaaccacgcccugauguccaucaucagcaccuuccaccucuccauccccaacuucaaccaguacgaggccaugagcugcgacuucaacgggggcaagaucuccguccaguacaaccugagccacuccuacgccggggacgcggccagccacugcggcacgguggccaacggggugcugcagaccuucaugcggauggccuggggcggcuccuacaucgcgcucgacagcggguacggcaagugggacugcaucaugaccuccuaccaguaccugaucauccagaacaccacgugggaggaccacugccaguucagccgccccucccccaucggguaccugggccuccugagccagcggacccgcgacaucuacaucagccggcgccugcucggcaccuucaccuggacgcuguccgacagcgaggggaaggacaccccgggcggguacugccugacccgguggaugcucaucgaggccgagcugaagugcuucggcaacaccgccgucgccaagugcaacgagaagcacgacgaggaguucugcgacaugcugcgccucuucgacuucaacaagcaggccauccagcggcugaagacgcccgcgcagauguccauccagcugaucaacaaggccgugaacgcccucaucaacgaccagcugaucaugaagaaccaccuccgcgacaucauggggauccccuacugcaacuacagcaaguacugcuaccugaaccacaccaccaccggcaagacgucccugcccaagugcugccuggugagcaacggcuccuaccucaacgagacccacuucagcgacgacaucgagcagcaggccgacaacaugaucaccgagaugcugcagaaggaguacauggagcggcaggggaagacgccccugggccucgucgaccuguucguguucuccaccagcuucuaccugaucuccaucuuccugcaccucgugaagaucccgacccaccgccacaucgucggcaagagcugccccaagccccaccggcugaaccacauggggaucugcuccugcgggcuguacaagcagcccggcgugccggugcgcuggaagcggugaggacuaguaauaaggaaacuguaugaaugucugugggcaggaagugaagagauccuucuguaaagguuuuuggaauuaugucugcugaauaauaaacuuuuuugaaauaauaaaucugguagaaaaaugagaucuaaaaaaaaaaaaaaaaaaaaaaaaaaaaaaaaaaaaaaaaaaaaaaaaaaaaaaaaaaaaaaaaaaaaaaaaaaaaaaaaaaaaaaaaaaaaaaaaaaaa

SEQ ID NO: 32638 - RNA, 1788 nt, Artificial Sequence
  mRNA product Design b-4 (A100) comprising derived and/or modified sequence from LASV(G502-SLE-2009;Clade IV)__AIT17126__GPCmut7 (opt1)
aggagagucccgcagucggcguccagcggcucugcuuguucgugugugugucguugcaggccuuauucaagcuuaccaugggccagaucgugaccuucuuccaggaggucccccacgugaucgaggaggugaugaacaucguccugaucgcccucagcauccuggccgugcugaaggggcucuacaacuucgcgaccugcggccugguggggcugcucacguuccugcugcucugcggccgcuccugcaccaccgggcuguacaagggcgucuacgagcugcagacccucgagcugaacauggagacgcugaacaugaccaugccgcucagcugcaccaagaacaacucccaccacuacaucauggugggcaacgagaccgggcuggagcugacgcucaccaacaccagcaucaucaaccacaaguucugcaaccuguccgacgcccacaagaagaaccuguacgaccacgcccucaugagcaucaucuccaccuuccaccugagcauccccaacuucaaccaguacgaggccauguccugcgacuucaacggcgggaagaucagcgugcaguacaaccugucccacagcuacgccggcgacgcggccgaccacugcgggacggucgccaacggcgugcuccagaccuucaugcggauggccuggggcggguccuacaucgcgcuggacagcggccgcgggcggugggacugcaucaugaccuccuaccaguaccugaucauccagaacaccacgugggaggaccacugccaguucagccgccccucccccaucggcuaccucggccugcugagccagcggacccgcgacaucuacaucucccggcgccuccuggggaccuucaccuggacgcugagcgacagcgagggcaaggacacccccgggggcuacugccucacccgguggaugcugaucgaggccgagcugaagugcuucgggaacaccgccguggccaagugcaacgagaagcacgacgaggaguucugcgacaugcuccgccuguucgacuucaacaagcaggccauccagcggcugaaggcgcccgcccagauguccauccagcucaucaacaaggccgucaacgcccugaucaacgaccagcuggugaugaagaaccaccuccgcgacaucaugggcauccccuacugcaacuacagccgguacugcuaccugaaccacacgaccaccggccgcaccucccugcccaagugcugccucgugagcaacggguccuaccugaacgagacgcacuucagcgacgacaucgagcagcaggccgacaacaugaucaccgagaugcugcagaaggaguacauggagcggcagggcaagaccccgcucgggcuggucgaccuguucguguucuccaccagcuucuaccugaucuccaucuuccuccaccuggugaagaucccgacgcaccgccacaucgucggcaagagcugccccaagccccaccggcugaaccacauggggaucugcuccugcggccucuacaagcagcccggcgugccggugaaguggaagcgcugaggacuaguaauaaggaaacuguaugaaugucugugggcaggaagugaagagauccuucuguaaagguuuuuggaauuaugucugcugaauaauaaacuuuuuugaaauaauaaaucugguagaaaaaugagaucuaaaaaaaaaaaaaaaaaaaaaaaaaaaaaaaaaaaaaaaaaaaaaaaaaaaaaaaaaaaaaaaaaaaaaaaaaaaaaaaaaaaaaaaaaaaaaaaaaaaa

SEQ ID NO: 32639 - RNA, 1788 nt, Artificial Sequence
  mRNA product Design b-4 (A100) comprising derived and/or modified sequence from LASV(G733-SLE-2010;Clade IV)__AIT17154__GPCmut7 (opt1)
aggagagucccgcagucggcguccagcggcucugcuuguucgugugugugucguugcaggccuuauucaagcuuaccaugggccagaucgugaccuucuuccaggaggucccccacgugaucgaggaggugaugaacaucguccugaucgcccucagcauccuggccgugcugaaggggcucuacaacuucgcgaccugcggcaucguggggcuggucuccuuccugcuccugugcggccgcagcugcacgaccucccuguacaaggggguguacgagcuccagacccuggagcugaacauggagacccucaacaugacgaugccgcugagcugcaccaagaacaacucccaccacuacaucauggugggcaacgagaccggccuggagcucacccugacgaacaccagcaucaucaaccacaaguucugcaaccuguccgacgcccacaagaagaaccucuacgaccacgcccugaugagcaucaucuccaccuuccaccugagcauccccaacuucaaccaguacgaggccauguccugcgacuucaacgggggcaagaucagcguccaguacaaccucucccacagcuacgccggggacgcggccaaccacugcggcaccaucgccaacggggugcugcagacguucaugcggauggccuggggcggcuccuacaucgcgcuggacagcgggcgcgaccggugggacugcaucaugaccuccuaccaguaccucaucauccagaacaccaccugggaggaccacugccaguucagccgccccucccccaucggcuaccuggggcugcucagccagcggacgcgcgacaucuacaucagccggcgccugcugggcaccuucaccuggacccucuccgacagcgagggcaaggacacgcccgggggcuacugccugacccgguggaugcugaucgaggccgagcucaagugcuucgggaacaccgccguggccaagugcaacgagaagcacgacgaggaguucugcgacaugcugcgccuguucgacuucaacaagcaggccauccagcggcucaaggcgcccgcccagauguccauccagcugaucaacaaggccgucaacgcccugaucaacgaccagcucaucaugaagaaccaccuccgcgacaucaugggcauccccuacugcaacuacagcaaguacugcuaccugaaccacaccacgaccgggaagaccucccugcccaagugcugccuggugagcaacggcuccuaccugaacgagacccacuucagcgacgacaucgagcagcaggccgacaacaugaucacggagaugcuccagaaggaguacauggagcggcagggcaagaccccgcuggggcugguggaccucuucgucuucuccaccagcuucuaccugaucuccaucuuccugcaccuggugaagaucccgacccaccgccacguggucggcaagagcugccccaagccccaccggcucaaccacauggggaucugcuccugcggccuguacgggcagcccggcgugccggugaaguggaagcgcugaggacuaguaauaaggaaacuguaugaaugucugugggcaggaagugaagagauccuucuguaaagguuuuuggaauuaugucugcugaauaauaaacuuuuuugaaauaauaaaucugguagaaaaaugagaucuaaaaaaaaaaaaaaaaaaaaaaaaaaaaaaaaaaaaaaaaaaaaaaaaaaaaaaaaaaaaaaaaaaaaaaaaaaaaaaaaaaaaaaaaaaaaaaaaaaaa

SEQ ID NO: 32640 - RNA, 1788 nt, Artificial Sequence
  mRNA product Design b-4 (A100) comprising derived and/or modified sequence from MOPV/LASV reassortant(IGS-1;Clade IV)__AFY05576__GPCmut7 (opt1)
aggagagucccgcagucggcguccagcggcucugcuuguucgugugugugucguugcaggccuuauucaagcuuaccaugggccagaucgugaccuucuuccaggaggucccccacgugaucgaggaggugaugaacaucguccugaucgcccucagcgugcuggccgugcugaaggggcucuacaacuucgcgaccugcggccuggucgggcuggugacguuccuccugcugugcggccgcuccugcaccaccagccucuacaaggggguguacgagcugcagacccuggagcucaacauggagacgcugaacaugaccaugccgcuguccugcaccaagaacaacagccaccacuacaucauggucggcaacgagaccggccucgagcugacgcugaccaacaccuccaucaucaaccacaaguucugcaaccucagcgacgcccacaagaagaaccuguacgaccacgcccugauguccaucaucagcaccuuccaccucuccauccccaacuucaaccaguacgaggccaugagcugcgacuucaacgggggcaagaucuccgugcaguacaaccugagccacuccuacgccggggacgcggccaaccacugcggcacgguggccaacgggguccugcagaccuucaugcggauggccuggggcggcagcuacaucgcgcucgacuccgggcgcggcaacugggacugcaucaugaccagcuaccaguaccugaucauccagaacaccacgugggaggaccacugccaguucucccggcccagccccaucggguaccugggccuccugucccagcgcacccgggacaucuacaucagccgccggcugcucggcaccuucaccuggacgcugagcgacuccgagggggaggacaccccgggcggguacugccugacccgcuggaugcucaucgaggccgagcugaagugcuucggcaacaccgccguggccaagugcaacgagaagcacgacgaggaguucugcgacaugcugcggcuguucgacuucaacaagcaggccauccagcgccugaaggcgcccgcccagaugagcauccagcugaucaacaaggccgugaacgcccucaucaacgaccagcugaucaugaagaaccaccuccgggacaucauggggauccccuacugcaacuacuccaaguacugcuaccucaaccacacgaccaccggccgcaccagccugcccaagugcugccuggucuccaacggcagcuaccucaacgagacgcacuucuccgacgacaucgagcagcaggccgacaacaugaucaccgagaugcugcagaaggaguacauggagcggcaggggaagacgccccugggccucguggaccuguucguguucagcaccuccuucuaccugaucagcaucuuccugcaccucgucaagaucccgacccaccgccacaucguggggaaguccugccccaagccccaccggcugaaccacaugggcaucugcagcugcgggcuguacaagcagcccggcgugccggucaaguggaagcgcugaggacuaguaauaaggaaacuguaugaaugucugugggcaggaagugaagagauccuucuguaaagguuuuuggaauuaugucugcugaauaauaaacuuuuuugaaauaauaaaucugguagaaaaaugagaucuaaaaaaaaaaaaaaaaaaaaaaaaaaaaaaaaaaaaaaaaaaaaaaaaaaaaaaaaaaaaaaaaaaaaaaaaaaaaaaaaaaaaaaaaaaaaaaaaaaaa

SEQ ID NO: 32641 - RNA, 1788 nt, Artificial Sequence
  mRNA product Design b-4 (A100) comprising derived and/or modified sequence from LASV(LM765-SLE-2012;Clade IV)__AIT17814__GPCmut7 (opt1)
aggagagucccgcagucggcguccagcggcucugcuuguucgugugugugucguugcaggccuuauucaagcuuaccaugggccagaucgugaccuucuuccaggaggucccccacgugaucgaggaggugaugaacaucguccugaucgcccucagcauccuggccgugcugaaggggcucuacaacuucgcgaccugcggccugguggggcuggucacguuccuccugcugugcggccgcuccugcaccaccagccucuacaaggggguguacgagcugcagacccuggagcucaacauggagacgcugaacaugaccaugccgcuguccugcaccaagaacaacagccaccacuacaucauggugggcaacgagaccggccucgagcugacgcugaccaacaccuccaucaucgaccacaaguucugcaaccucagcgacgcccaccggaagaaccuguacgaccacgcccugauguccaucaucagcaccuuccaccucuccauccccaacuucaaccaguacgaggccaugagcugcgacuucaacgggggcaagaucuccguccaguacaaccugagccacuccuacgccaaggacgcggccgaccacugcgggacgguggccaacggcgugcugcagaccuucaugcgcauggccuggggcgggagcuacaucgcgcucgacuccggccgggggcgcugggacugcaucaugaccagcuaccaguaccugaucauccagaacaccacgugggaggaccacugccaguucucccggcccagccccaucggcuaccuggggcuccugucccagcgcacccgggacaucuacaucagccgccggcugcucggcaccuucaccuggacgcugagcgacuccgagggcaaggacacccccgggggcuacugccugacccgcuggaugcucaucgaggccgagcugaagugcuucgggaacaccgccgucgccaagugcaacgagaagcacgacgaggaguucugcgacaugcugcggcuguucgacuucaacaagcaggccauccagcgccugaaggcgcccgcccagaugagcauccagcugaucaacaaggccgugaacgcccucaucaacgaccagcugaucaugaagaaccaccuccgggacaucaugggcauccccuacugcaacuacuccaaguacugcuaccucaaccacacgaccaccgggaagaccagccugcccaagugcugccugguguccaacggcagcuaccucaacgagacgcacuucuccgacgacaucgagcagcaggccgacaacaugaucaccgagaugcugcagaaggaguacauggagcgccagggcaagaccccgcuggggcucgucgaccuguucguguucagcaccuccuucuaccugaucagcaucuuccugcaccucgugaagaucccgacgcaccggcacaucgucggcaagcccugccccaagccccaccgccugaaccacauggggaucugcuccugcggccuguacaagcagccgggggugcccgugaaguggaagcggugaggacuaguaauaaggaaacuguaugaaugucugugggcaggaagugaagagauccuucuguaaagguuuuuggaauuaugucugcugaauaauaaacuuuuuugaaauaauaaaucugguagaaaaaugagaucuaaaaaaaaaaaaaaaaaaaaaaaaaaaaaaaaaaaaaaaaaaaaaaaaaaaaaaaaaaaaaaaaaaaaaaaaaaaaaaaaaaaaaaaaaaaaaaaaaaaa

SEQ ID NO: 32642 - RNA, 1788 nt, Artificial Sequence
  mRNA product Design b-4 (A100) comprising derived and/or modified sequence from LASV(LM776-SLE-2012;Clade IV)__AIT17824__GPCmut7 (opt1)
aggagagucccgcagucggcguccagcggcucugcuuguucgugugugugucguugcaggccuuauucaagcuuaccaugggccagaucgugaccuucuuccaggaggucccccacgugaucgaggaggugaugaacaucguccugaucgcccucagcauccuggccgugcugaaggggcucuacaacuucgcgaccugcggccugguggggcuggucacguuccuccugcugugcggccgcuccugcaccaccagcguguacaaggggguguacgagcuccagacccuggagcugaacauggagacgcucaacaugaccaugccgcuguccugcaccaagaacaacagccaccacuacaucauggucggcaacgagaccggccuggagcucacgcugaccaacaccuccaucaucaaccacaaguucugcaaccugagcgacgcccacaagaagaaccucuacgaccacgcccugauguccaucaucagcaccuuccaccuguccauccccaacuucaaccaguacgaggccaugagcugcgacuucaacgggggcaagaucuccgugcaguacaaccucagccacuccuacgccggggacgcggccaaccacugcggcacgguggccaacgggguccugcagaccuucaugcggauggccuggggcggcagcuacaucgcgcuggacuccgggcacggcaagugggacugcaucaugaccagcuaccaguaccucaucauccagaacaccacgugggaggaccacugccaguucucccgccccagccccaucggguaccugggccugcucucccagcggacccgcgacaucuacaucagccggcgccugcugggcaccuucaccuggacgcucagcgacuccgaggggaaggacaccccgggcggguacugccugacccgguggaugcugaucgaggccgagcucaagugcuucggcaacaccgccguggccaagugcaacgagaagcacgacgaggaguucugcgacaugcugcgccuguucgacuucaacaagcaggccauccagcggcucaaggcgcccgcccagaugagcauccagcugaucaacaaggccgugaacgcccugaucaacgaccagcucaucaugaagaaccaccuccgcgacaucauggggauccccuacugcaacuacuccaaguacugcuaccugaaccacacgaccaccggcaagaccagccugcccaagugcugccuggucuccaacggcagcuaccugaacgagacgcacuucuccgacgacaucgagcagcaggccgacaacaugaucaccgagaugcuccagaaggaguacauggagcggcaggggaagacgccccugggccugguggaccucuucguguucagcaccuccuucuaccugaucagcaucuuccugcaccuggucaagaucccgacccaccgccacaucguggggaaguccugccccaagccccaccggcucaaccacaugggcaucugcagcugcgggcuguacaagcagcccggcgugccgguccgcuggaagcggugaggacuaguaauaaggaaacuguaugaaugucugugggcaggaagugaagagauccuucuguaaagguuuuuggaauuaugucugcugaauaauaaacuuuuuugaaauaauaaaucugguagaaaaaugagaucuaaaaaaaaaaaaaaaaaaaaaaaaaaaaaaaaaaaaaaaaaaaaaaaaaaaaaaaaaaaaaaaaaaaaaaaaaaaaaaaaaaaaaaaaaaaaaaaaaaaa

SEQ ID NO: 32643 - RNA, 1788 nt, Artificial Sequence
  mRNA product Design b-4 (A100) comprising derived and/or modified sequence from LASV(Mad39;Clade IV)__ANH09722__GPCmut7 (opt1)
aggagagucccgcagucggcguccagcggcucugcuuguucgugugugugucguugcaggccuuauucaagcuuaccaugggccagaucgugaccuucuuccaggaggucccccacgugaucgaggaggugaugaacaucguccugaucgcccucagcauccuggccgugcugaaggggcucuacaacguggcgaccugcggccugaucgggcuggucacguuccuccugcugugcggccgcuccugcaccaccacccucuacaaggggguguacgagcugcaggcccuggagcucaacauggagacgcugaacaugaccaugccgcugagcugcaccaagaacaacucccaccacuacauccgggugggcaacgagaccggccucgagcugacgcugaccaacaccagccucaucaaccacaaguucugcaaccuguccgacgcccacaagaagaaccuguacgaccacgcccucaugagcaucaucuccaccuuccaccugagcauccccaacuucaaccaguacgaggccauguccugcgacuucaacgacgggaagaucagcguccaguacaaccugucccacacguacgcgggcgacaccgccaaccacugcgggaccguggccaacggcgugcuccagaccuucaugcgcauggccuggggcgggagcuacaucgcgcuggacuccggccgcgggggcugggacugcaucaugacgagcuaccaguaccugaucauccagaacaccaccugggaggaccacugccaguucucccggcccagccccaucggguaccucggccugcugucccagcggacccgcgacaucuacaucagccggcgccuccugggcacguucaccuggacccuguccgacagcgaggggaaggacaccccgggcggguacugccucacgcgguggaugcugaucgaggccgagcugaagugcuucggcaacaccgccgucgccaagugcaacgagaagcacgacgaggaguucugcgacaugcuccgccuguucgacuucaacaagcaggccauccagcggcugaaggcgcccgcccagaugagcauccagcucaucaacaaggccgugaacgcccugaucaacgaccagcugaucaugaagaaccaccuccgcgacaucauggggauccccuacugcaacuacuccaaguacugcuaccugaaccacaccgugaccggcaagacgagccugcccaagugcugccucgucuccaacggcagcuaccugaacgagacccacuucuccgacgacaucgagcagcaggccgacaacaugaucaccgagaugcugcagaaggaguacauggagcggcaggggaagacgccccucggccugguggaccuguucguguucagcaccuccuucuaccugaucagcaucuuccuccaccuggucaagaucccgacccaccgccacgugguggggaagcccugccccaagccccaccggcugaaccacaugggcaucugcuccugcggguucuacaagcagccgggcguccccgugcgcuggaagcggugaggacuaguaauaaggaaacuguaugaaugucugugggcaggaagugaagagauccuucuguaaagguuuuuggaauuaugucugcugaauaauaaacuuuuuugaaauaauaaaucugguagaaaaaugagaucuaaaaaaaaaaaaaaaaaaaaaaaaaaaaaaaaaaaaaaaaaaaaaaaaaaaaaaaaaaaaaaaaaaaaaaaaaaaaaaaaaaaaaaaaaaaaaaaaaaaa

SEQ ID NO: 32644 - RNA, 1788 nt, Artificial Sequence
  mRNA product Design b-4 (A100) comprising derived and/or modified sequence from LASV(Z0947-SLE-2011;Clade IV)__AIT17840__GPCmut7 (opt1)
aggagagucccgcagucggcguccagcggcucugcuuguucgugugugugucguugcaggccuuauucaagcuuaccaugggccagaucgugaccuucuuccaggaggucccccacgugaucgaggaggugaugaacaucguccugaucgcccucagcauccuggccgugcugaaggggcucuacaacuucgcgaccugcggccugguggggcuggucacguuccuccugcugugcggccgcuccugcaccaucagccucuacaaggggguguacgagcugcagacccuggagcucaacauggagacccugaacaugacgaugccgcuguccugcaccaagaacaacagccaccacuacaucauggugggcaacgagaccggccucgagcugacccugacgaacaccuccaucaucaaccacaaguucugcaaccucagcgacgcccacaagaagaaccuguacgaccacgcccugauguccaucaucagcaccuuccaccucuccauccccaacuucaaccaguacgaggccaugagcugcgacuucaacgggggcaagaucuccguccaguacaaccugagccacuccuacgccggggacgcggccaaccacugcggcaccguggccaacggggugcugcagacguucaugcggauggccuggggcggcagcuacaucgcgcucgacuccgggcgcgaccggugggacugcaucaugaccagcuaccaguaccugaucauccagaacaccaccugggaggaccacugccaguucucccgccccagccccaucggcuaccuggggcuccugucccagcggacgcgcgacaucuacaucagccggcgccugcucggcaccuucaccuggacccugagcgacuccgagggcaaggacacgcccgggggcuacugccugacccgguggaugcucaucgaggccgagcugaagugcuucgggaacaccgccgucgccaagugcaacgagaagcacgacgaggaguucugcgacaugcugcgccucuucgacuucaacaagcaggccauccagcggcugaaggcgcccgcccagaugagcauccagcugaucaacaaggccgugaacgcccucaucaacgaccagcugaucaugaagaaccaccuccgcgacaucaugggcauccccuacugcaacuacuccaaguacugcuaccugaaccacaccacgaccgggaagaccagccugcccaagugcugccugguguccaacggcagcuaccucaacgagacccacuucuccgacgacaucgagcagcaggccgacaacaugaucacggagaugcugcagaaggaguacauggagcggcagggcaagaccccgcuggggcucgucgaccuguucguguucagcaccuccuucuaccugaucagcaucuuccugcaccucgugaagaucccgacccaccgccacaucgucggcaagcccugccccaagccccaccggcugaaccacauggggaucugcuccugcggccuguacaagcagccgggggugcccgugaaguggaagcgcugaggacuaguaauaaggaaacuguaugaaugucugugggcaggaagugaagagauccuucuguaaagguuuuuggaauuaugucugcugaauaauaaacuuuuuugaaauaauaaaucugguagaaaaaugagaucuaaaaaaaaaaaaaaaaaaaaaaaaaaaaaaaaaaaaaaaaaaaaaaaaaaaaaaaaaaaaaaaaaaaaaaaaaaaaaaaaaaaaaaaaaaaaaaaaaaaa

SEQ ID NO: 32645 - RNA, 1788 nt, Artificial Sequence
  mRNA product Design b-4 (A100) comprising derived and/or modified sequence from LASV(Josiah;Clade IV)__NP_694870__GPCmut7 (opt1)
aggagagucccgcagucggcguccagcggcucugcuuguucgugugugugucguugcaggccuuauucaagcuuaccaugggccagaucgugaccuucuuccaggaggucccccacgugaucgaggaggugaugaacaucguccugaucgcccucagcgugcuggccgugcugaaggggcucuacaacuucgcgaccugcggccuggucgggcuggugacguuccuccugcugugcggccgcuccugcaccaccagccucuacaaggggguguacgagcugcagacccuggagcucaacauggagacgcugaacaugaccaugccgcuguccugcaccaagaacaacagccaccacuacaucauggucggcaacgagaccggccucgagcugacgcugaccaacaccuccaucaucaaccacaaguucugcaaccucagcgacgcccacaagaagaaccuguacgaccacgcccugauguccaucaucagcaccuuccaccucuccauccccaacuucaaccaguacgaggccaugagcugcgacuucaacgggggcaagaucuccgugcaguacaaccugagccacuccuacgccggggacgcggccaaccacugcggcacgguggccaacgggguccugcagaccuucaugcggauggccuggggcggcagcuacaucgcgcucgacuccgggcgcggcaacugggacugcaucaugaccagcuaccaguaccugaucauccagaacaccacgugggaggaccacugccaguucucccggcccagccccaucggguaccugggccuccugucccagcgcacccgggacaucuacaucagccgccggcugcucggcaccuucaccuggacgcugagcgacuccgaggggaaggacaccccgggcggguacugccugacccgcuggaugcucaucgaggccgagcugaagugcuucggcaacaccgccguggccaagugcaacgagaagcacgacgaggaguucugcgacaugcugcggcuguucgacuucaacaagcaggccauccagcgccugaaggcgcccgcccagaugagcauccagcugaucaacaaggccgugaacgcccucaucaacgaccagcugaucaugaagaaccaccuccgggacaucauggggauccccuacugcaacuacuccaaguacugcuaccucaaccacacgaccaccggccgcaccagccugcccaagugcugccuggucuccaacggcagcuaccucaacgagacgcacuucuccgacgacaucgagcagcaggccgacaacaugaucaccgagaugcugcagaaggaguacauggagcggcaggggaagaccccgcugggccugguggaccucuucguguucagcaccuccuucuaccugaucagcaucuuccugcaccucgucaagauccccacgcaccgccacaucguggggaaguccugccccaagccccaccggcugaaccacaugggcaucugcagcugcgggcuguacaagcagccgggcgugcccgucaaguggaagcgcugaggacuaguaauaaggaaacuguaugaaugucugugggcaggaagugaagagauccuucuguaaagguuuuuggaauuaugucugcugaauaauaaacuuuuuugaaauaauaaaucugguagaaaaaugagaucuaaaaaaaaaaaaaaaaaaaaaaaaaaaaaaaaaaaaaaaaaaaaaaaaaaaaaaaaaaaaaaaaaaaaaaaaaaaaaaaaaaaaaaaaaaaaaaaaaaaa

SEQ ID NO: 32646 - RNA, 1785 nt, Artificial Sequence
  mRNA product Design b-4 (A100) comprising derived and/or modified sequence from LASV(LP;Clade I)__AAF86701__GPCmut7 (opt1)
aggagagucccgcagucggcguccagcggcucugcuuguucgugugugugucguugcaggccuuauucaagcuuaccaugggccagaucaucaccuucuuccaggaggugccccacgucaucgaggaggugaugaacaucgugcugaucgcccucagccugcuggccauccucaaggggcuguacaacaucgcgaccugcggcaucaucgggcuggucgccuuccucuuccugugcggcaaguccugcagccugacgcucaagggcggguacgagcugcagacccuggagcucaacauggagacccugaacaugaccaugccgcuguccugcacgaagaacagcucccaccacuacauccgcgugggcaacgagaccgggcucgagcugacccugaccaacacgagcaucaucaaccacaaguucugcaaccucuccgacgcccacaagaagaaccuguacgaccacgcccugaugagcaucaucuccaccuuccaccucagcauccccaacuucaaccaguacgaggccauguccugcgacuucaacggcgggaagaucagcgugcaguacaaccugucccacagcuacgcgggcgacgccgccgagcacugcgggaccgucgccaacggcgugcugcagaccuucaugcggauggcguggggcgggcgcuacaucgcccucgacuccggcaaggggaacugggacugcaucaugacgagcuaccaguaccugaucauccagaacaccaccugggaggaccacugccaguucucccggcccagccccaucggcuaccugggccuccugucccagcgcacccgggacaucuacaucagccgccggcugcucgggacguucaccuggacccugagcgacuccgagggcaacgagacccccgggggcuacugccugacgcgcuggaugcucaucgaggccgagcugaagugcuucgggaacaccgccguggccaagugcaacgagaagcacgacgaggaguucugcgacaugcugcggcuguucgacuucaacaagcaggcgauccgccggcugaaggccccggcccagaugagcauccagcugaucaacaaggccgucaacgcccucaucaacgaccagcugaucaugaagaaccaccuccgcgacaucaugggcauccccuacugcaacuacuccaaguacugcuaccucaaccacaccagcuccggccggaccagccugcccaagugcugccugaucuccaacgggagcuaccucaacgagacgcaguucuccgacgacaucgagcagcaggcggacaacaugaucaccgagaugcugcagaaggaguacaucgagcgccagggcaagaccccgcuggggcugguggacaucuucaucuucagcaccuccuucuaccucaucagcaucuuccugcaccugaucaagauccccacgcaccggcacaucgugggcaagcccugccccaagccgcaccgccucaaccacaugggggucugcuccugcggccuguacaagcaccccggcgugcccaccaaguggaagcggugaggacuaguaauaaggaaacuguaugaaugucugugggcaggaagugaagagauccuucuguaaagguuuuuggaauuaugucugcugaauaauaaacuuuuuugaaauaauaaaucugguagaaaaaugagaucuaaaaaaaaaaaaaaaaaaaaaaaaaaaaaaaaaaaaaaaaaaaaaaaaaaaaaaaaaaaaaaaaaaaaaaaaaaaaaaaaaaaaaaaaaaaaaaaaaaaa

SEQ ID NO: 32647 - RNA, 1785 nt, Artificial Sequence
  mRNA product Design b-4 (A100) comprising derived and/or modified sequence from LASV(803213;Clade II)__AAF86703__GPCmut7 (opt1)
aggagagucccgcagucggcguccagcggcucugcuuguucgugugugugucguugcaggccuuauucaagcuuaccaugggccagaucaucaccuucuuccaggaggugccccacgucaucgaggaggugaugaacaucgugcugaucgcccucagccugcuggccauccucaaggggaucuacaacgucgcgaccugcggccuguucgggcugaucuccuuccuccugcugugcggccgcagcugcuccgugacguacaaggggguguacgagcuccagacccuggagcugaacauggccaaccucaacaugaccaugccgcugagcugcaccaagaacaacucccaccacuacaucauggucggcaacgagacgggccuggagcucacccugaccaacaccagcaucaucaaccacaaguucugcaaccuguccgacgcccacaagaagaaccucuacgaccacgcccugaugagcaucaucuccacguuccaccugagcauccccaacuucaaccaguacgaggccauguccugcgacuucaacgggggcaagaucagcgugcaguacaaccucucccacagcuucgcgguggacgccgccaaccacugcgggaccaucgccaacggcguccugcagaccuucaugcggauggcguggggcggguccuacaucgcccuggacagcggcaaggggaacugggacugcaucaugaccuccuaccaguaccucaucauccagaacacgaccugggaggaccacugccaguucagccgccccucccccaucggcuaccuggggcugcucagccagcggacccgcgacaucuacaucagccggcgccugcugggcaccuucacguggacccucuccgacagcgagggcaacgaggcccccgggggcuacugccugacccgguggaugcugaucgaggccgagcucaagugcuucgggaacaccgccguggcgaagugcaacgagaagcacgacgaggaguucugcgacaugcugcgccuguucgacuucaacaagcaggccaucaagcggcucaagacgccggcccagauguccauccagcugaucaacaaggccgugaacgcccugaucaacgaccagcucaucaugaagaaccaccuccgcgacaucaugggcauccccuacugcaacuacagccgguacugcuaccugaaccacaccgucaccgggaagaccucccugccccgcugcugccuggugagcaacggcuccuaccugaacgagacgcacuucagcgacgacaucgagcagcaggcggacaacaugaucaccgagaugcuccagaaggaguacauggaccggcagggcaagaccccgcuggggcugguggaccuguucgucuucuccaccagcuucuaccucaucuccaucuuccugcaccuggugaagauccccacgcaccgccacaucgugggcaagcccugccccaagccgcaccggcucaaccacauggggaucugcagcugcggccuguacaagcaccccgggguccccgugaaguggaagcgcugaggacuaguaauaaggaaacuguaugaaugucugugggcaggaagugaagagauccuucuguaaagguuuuuggaauuaugucugcugaauaauaaacuuuuuugaaauaauaaaucugguagaaaaaugagaucuaaaaaaaaaaaaaaaaaaaaaaaaaaaaaaaaaaaaaaaaaaaaaaaaaaaaaaaaaaaaaaaaaaaaaaaaaaaaaaaaaaaaaaaaaaaaaaaaaaaa

SEQ ID NO: 32648 - RNA, 1785 nt, Artificial Sequence
  mRNA product Design b-4 (A100) comprising derived and/or modified sequence from LASV(GA391;Clade III)__CAA36645__GPCmut7 (opt1)
aggagagucccgcagucggcguccagcggcucugcuuguucgugugugugucguugcaggccuuauucaagcuuaccaugggccagaucgugaccuucuuccaggaggucccccacgugaucgaggaggugaugaacaucguccugaucgcccucagcauccuggccauccugaaggggcucuacaacguggcgaccugcggccugaucgggcuggugacguuccuccugcuguccggccgcagcugcucccucaucuacaaggggaccuacgagcugcagacccuggagcucaacauggagacccugaacaugacgaugccgcugagcugcaccaagaacaacucccaccacuacauccgggucggcaacgagaccggccucgagcugacccugacgaacaccagcauccucaaccacaaguucugcaaccuguccgacgcccacaagcgcaaccuguacgaccacagccucauguccaucaucagcaccuuccaccuguccauccccaacuucaaccaguacgaggccaugagcugcgacuucaacgggggcaagaucaccgugcaguacaaccugucccacagcuucgccguggacgccgcggggcacugcggcacgcucgccaacgggguccugcagaccuucaugcggauggccuggggcggcuccuacaucgcccuggacagcgggcgcggcaacugggacugcaucaugaccuccuaccaguaccucaucauccagaacaccacgugggacgaccacugccaguucagccggcccucccccaucggguaccugggccugcucagccagcgcacccgggacaucuacaucagccgccggcugcugggcaccuucaccuggacgcucuccgacagcgaggggaacgagaccccgggcggguacugccugacccgcuggaugcugaucgaggcggagcucaagugcuucggcaacaccgccguggccaagugcaacgagaagcacgacgaggaguucugcgacaugcugcggcuguucgacuucaacaagcaggccauccgccggcucaagacgcccgcccagauguccauccagcugaucaacaaggcggugaacgcccugaucaacgaccagcucaucaugaagaaccaccuccgcgacaucauggggauccccuacugcaacuacagccgguacugcuaccugaaccacaccuccaccggcaagaccagccugccccgcugcugccugaucuccaacggcagcuaccugaacgagacgaaguucuccgacgacaucgagcagcaggccgacaacaugaucaccgagaugcugcagaaggaguacaucgaccggcaggggaagaccccgcucggccuggucgaccuguucguguucagcaccuccuucuaccucaucagcaucuuccugcaccuggugaagauccccacgcaccgccacaucgucgggaagcccugccccaagccgcaccggcucaaccacaugggcaucugcuccugcgggcuguacaagcagcccggcgugcccgugcgcuggaagcggugaggacuaguaauaaggaaacuguaugaaugucugugggcaggaagugaagagauccuucuguaaagguuuuuggaauuaugucugcugaauaauaaacuuuuuugaaauaauaaaucugguagaaaaaugagaucuaaaaaaaaaaaaaaaaaaaaaaaaaaaaaaaaaaaaaaaaaaaaaaaaaaaaaaaaaaaaaaaaaaaaaaaaaaaaaaaaaaaaaaaaaaaaaaaaaaaa

SEQ ID NO: 32649 - RNA, 1788 nt, Artificial Sequence
  mRNA product Design b-4 (A100) comprising derived and/or modified sequence from LASV(AV;Clade V)__CCA30314__GPCmut7 (opt1)
aggagagucccgcagucggcguccagcggcucugcuuguucgugugugugucguugcaggccuuauucaagcuuaccaugggccagaucgugaccuucuuccaggaggucccccacgugaucgaggaggugaugaacaucguccugaucgcccucagcauccuggccgugcugaaggggcucuacaacaucgcgaccugcggccugaucgggcugaucacguuccuccugcugugcggccgcuccugcagcuccaaccucuacaaggggguguacgagcugcagagccuggaccucaacauggagacccugaacaugaccaugccgcuguccugcaccaagaacaacagccaccacuacauccgggucggcaacgacacgggccucgagcugacccugaccaacaccuccauccucaaccacaaguucugcaaccugagcgacgcccacaagaaggaccuguacgaccacgcccucauguccaucaucagcacguuccaccuguccauccccaacuucaaccaguacgaggccaugagcugcgacuucaacgggggcaagaucuccgugcaguacaaccugagccacuccuacgccaucgacgcggccaaccacugcgggaccguggccaacggcauccuccagaccuucaugcgcauggccuggggcgggagcuacaucgcgcuggacuccggccgggggaacugggacugcaucaugaccagcuaccaguaccugaucauccagaacacgaccugggagaaccacugccaguucucccgccccagccccaucggcuaccucgggcugcugagccagcggacccgcgacaucuacaucucccggcgccuccugggcaccuucacguggacccugagcgacuccgagggcaacgccacccccgggggcuacugccucacccgguggaugcugaucgaggccgagcugaagugcuucgggaacacggccgucgccaagugcaacgagaagcacgacgaggaguucugcgacaugcuccgccuguucgacuucaacaagcaggcgaucagccggcugaaguccccggcccagaugagcauccagcucaucaacaaggccgugaacgcccugaucaacgaccagcugaucaugaagaaccaccuccgcgacaucaugggcauccccuacugcaacuacuccaaguacugcuaccugaaccacaccaucaccgggaagaccagccugcccaagugcugccucguguccaacggcagcuaccugaacgagacgcacuucuccgacgacaucgagcagcaggccgacaacaugaucaccgagaugcugcagaaggaguacauggagcggcagggcaagaccccgcuggggcucgucgaccuguucguguucagcaccuccuucuaccugaucagcaucuuccuccgccuggugaagauccccacgcaccggcacaucgucggcaagcccugccccaagccgcaccgccugaaccacauggggaucugcuccugcggccucuacaagcagcccggggugcccgugcgguggaagcgcugaggacuaguaauaaggaaacuguaugaaugucugugggcaggaagugaagagauccuucuguaaagguuuuuggaauuaugucugcugaauaauaaacuuuuuugaaauaauaaaucugguagaaaaaugagaucuaaaaaaaaaaaaaaaaaaaaaaaaaaaaaaaaaaaaaaaaaaaaaaaaaaaaaaaaaaaaaaaaaaaaaaaaaaaaaaaaaaaaaaaaaaaaaaaaaaaa

SEQ ID NO: 32650 - RNA, 1785 nt, Artificial Sequence
  mRNA product Design b-4 (A100) comprising derived and/or modified sequence from LASV(Togo/2016/7082;Clade VI)__AMR44577__GPCmut7 (opt1)
aggagagucccgcagucggcguccagcggcucugcuuguucgugugugugucguugcaggccuuauucaagcuuaccaugggccagaucaucaccuucuuccaggaggugccccacgucaucgaggaggugaugaacaucgugcugaucgcccucagccugcuggccauccucaagggggucuacaacguggcgaccugcggcaucaucgggcuggugacguuccuguuccucugcggccgcuccugcagccugaucuacaagggguccuacgagcugcagacccucgagcugaacauggagacccugaacaugaccaugccgcucagcugcacgaagaacuccagccaccacuacauccgggucggcaacgagaccggccuggagcugacccucaccaacacguccaucaucaaccacaaguucugcaaccugagcgacgcccacaagcgcaaccuguacgaccacgcccucauguccauccugagcaccuuccaccuguccauccccaacuucaaccaguacgaggccaugagcugcgacuucaacgggggcaagaucuccgugcaguacaaccucagccacgccuacgcgguggacgccgccgagcacugcgggaccgucgccaacggcgugcugcagaccuucaugcggauggcguggggcggguccuacaucgcccuggacagcggccgcgggaacugggacugcaucaugacguccuaccaguaccucaucauccagaacaccaccugggaggaccacugccaguucagccggcccucccccaucggcuaccuggggcugcucagccagcgcacccgggacaucuacaucagccgccggcugcugggcacguucaccuggacccucuccgacagcgagggcaacgagacccccgggggcuacugccugacgcgcuggaugcugaucgaggccgagcucaagugcuucgggaacaccgccguggccaagugcaacgagaagcacgacgaggaguucugcgacaugcugcggcuguucgacuucaacaagcaggcgauccagcgccucaaguccccggcccagaugagcauccagcugaucaacaaggccgucaacgcccugaucaacgaccagcucaucaugaagaaccaccuccgggacaugaugggcauccccuacugcaacuacuccaaguacugcuaccugaaccacaccagcuccgggcgcaccagccugcccaagugcugccugguguccaacggcagcuaccugaacgagacgcacuucuccgacgacaucgagcagcaggccgacaacaugaucaccgagaugcuccagaaggaguacaucgaccggcagggcaagaccccgcuggggcugguggaccuguucgucuucagcaccuccuucuaccucaucagcaucuuccugcaccugaucaagauccccacgcaccgccacaucgugggcaagcccugccccaagccgcaccggcucaaccacauggggaucugcuccugcggccuguacaagcagcccggggugcccacccgcuggaagcggugaggacuaguaauaaggaaacuguaugaaugucugugggcaggaagugaagagauccuucuguaaagguuuuuggaauuaugucugcugaauaauaaacuuuuuugaaauaauaaaucugguagaaaaaugagaucuaaaaaaaaaaaaaaaaaaaaaaaaaaaaaaaaaaaaaaaaaaaaaaaaaaaaaaaaaaaaaaaaaaaaaaaaaaaaaaaaaaaaaaaaaaaaaaaaaaaa

SEQ ID NO: 32651 - RNA, 1785 nt, Artificial Sequence
  mRNA product Design b-4 (A100) comprising derived and/or modified sequence from LASV(KAK-428;Clade n.d. (VII))__ANH09740__GPCmut7 (opt1)
aggagagucccgcagucggcguccagcggcucugcuuguucgugugugugucguugcaggccuuauucaagcuuaccaugggccagaucgugaccuucuuccaggaggucccccacgugaucgaggaggugaugaacaucguccugaucgcccucagccugcuggccauccucaaggggcuguacaacuucgcgaccugcggcgugaucgggcugaucacguuccuccugcugugcggccgcuccugcagcgccaccuacaaggggcaguacgagcuccagacccuggagcugaacauggagucccucaacaugaccaugccgcugagcugcacgaagaacaacucccaccacuacauccgggccggcaacaacaccggccuggagcucacccugaccaacacgagcaucaucucccacaaguucugcaaccugagcgacgcccacaagaagaaccucuacgaccacacccugauguccaucaucaccaccuuccaccugagcauccccaacuucaaccaguacgaggccauguccugcgacuucaacgggggcaagaucagcauccaguacaaccucucccacagcuacgcgggggacgccgcccagcacugcggcacgguggccaacgggguccugcagaccuucaugcgcauggcguggggcggcuccuaccuggcccucgacagcgggcggcgcggcugggacugcaucaucuccagcuaccaguaccugaucauccagaacaccaccugggacgaccacugccaguucucccggcccagccccaucggguaccugggcuucgugagccagaagacgcgcgacaucuacaucucccggcgccuccugggcaccuucaccuggacccugagcgacuccgaggggcacgacaugccgggcggguacugccucacgcgguggaugcugaucgaggccgaccugaagugcuucggcaacaccgccguggccaagugcaacgagaagcacgacgaggaguucugcgacauguggcgccucuucgacuucaacaagcaggcgauccagcggcugaaggcccccgcccagaugaacauccagcugaucaacaaggccgucaacgcccucaucaacgaccagcugaugaugaagaaccaccuccgcgacaucauggggauccccuacugcaacuacagcaaguucugcuaccugaacaacaccaccacgggccggaccucccugccccgcugcugccugaucagcaacggcuccuaccucaacgagacccacuucagcgacgacaucgagcagcaggcggacaacaugaucaccgagaugcugcagaaggaguacauggaccggcaggggaagacgccgcugggccucguggaccuguucguguucuccaccagcuucuaccugaucaccaucuuccugcaccucgucaagauccccacccaccgccacaucguggggaagcccugccccaagccgcaccggcugaaccacaugggcaucugcuccugcgggcuguacaagcagcccggcgugcccguccgcuggaagcggugaggacuaguaauaaggaaacuguaugaaugucugugggcaggaagugaagagauccuucuguaaagguuuuuggaauuaugucugcugaauaauaaacuuuuuugaaauaauaaaucugguagaaaaaugagaucuaaaaaaaaaaaaaaaaaaaaaaaaaaaaaaaaaaaaaaaaaaaaaaaaaaaaaaaaaaaaaaaaaaaaaaaaaaaaaaaaaaaaaaaaaaaaaaaaaaaa

SEQ ID NO: 32652 - RNA, 1785 nt, Artificial Sequence; identical to SEQ ID NO: 32646
  mRNA product Design b-4 (A100) comprising derived and/or modified sequence from LASV(Pinneo-NIG-1969;Clade I)__AIT17836__GPCmut7 (opt1)

SEQ ID NO: 32653 - RNA, 1785 nt, Artificial Sequence
  mRNA product Design b-4 (A100) comprising derived and/or modified sequence from LASV(ISTH0009-NIG-2011;Clade II)__AIT17404__GPCmut7 (opt1)
aggagagucccgcagucggcguccagcggcucugcuuguucgugugugugucguugcaggccuuauucaagcuuaccaugggccagaucaucaccuucuuccaggaggugccccacgucaucgaggaggugaugaacaucgugcugaucgcccucagccugcuggccauccucaaggggaucuacaacgucgcgaccugcggccuguucgggcugguguccuuccuccugcugugcggccgcagcugcuccacgaccuacaaggggguguacgagcuccagacccuggagcuggacauggccagccucaacaugaccaugccgcuguccugcacgaagaacaacagccaccacuacaucauggucggcaacgagaccggccuggagcucacccugaccaacacguccaucaucaaccacaaguucugcaaccugagcgacgcccacaagaagaaccucuacgaccacgcccugauguccaucaucagcaccuuccaccuguccauccccaacuucaaccaguacgaggccaugagcugcgacuucaacgggggcaagaucuccgugcaguacaaccucagccacgcguacgccguggacgccgccaaccacugcgggaccaucgcgaacggcguccugcagaccuucaugcggauggccuggggcggguccuacaucgcccuggacagcggcaagggguccugggacugcaucaugacgagcuaccaguaccucaucauccagaacaccaccugggaggaccacugccaguucucccgccccagccccaucggcuaccuggggcugcucagccagcggacccgcgacaucuacaucucccggcgccugcugggcacguucaccuggacccucagcgacuccgagggcaacgagacccccgggggcuacugccugacgcgguggaugcugaucgaggccgagcucaagugcuucgggaacaccgccguggcgaagugcaacgagaagcacgacgaggaguucugcgacaugcugcgccuguucgacuucaacaagcaggccauccggcgccucaagaccccggcccagaugagcauccagcugaucaacaaggccgugaacgcccugaucaacgaccagcucaucaugaagaaccaccuccgggacaucaugggcauccccuacugcaacuacuccaaguacugcuaccugaaccacaccgucacggggaagaccagccugccccgcugcugccugguguccaacggcagcuaccugaacgagacccacuucuccgacgacaucgagcagcaggcggacaacaugaucaccgagcuccugcagaaggaguacauggaccggcagggcaagacgccgcuggggcugguggaccucuucgucuucagcaccuccuucuaccugaucagcaucuuccugcaccucaucaagauccccacccaccgccacaucaccggcaagcccugccccaagccgcaccggcugaaccacauggggaucugcuccugcggccuguacaagcaccccggggugcccgugaaguggaagcgcugaggacuaguaauaaggaaacuguaugaaugucugugggcaggaagugaagagauccuucuguaaagguuuuuggaauuaugucugcugaauaauaaacuuuuuugaaauaauaaaucugguagaaaaaugagaucuaaaaaaaaaaaaaaaaaaaaaaaaaaaaaaaaaaaaaaaaaaaaaaaaaaaaaaaaaaaaaaaaaaaaaaaaaaaaaaaaaaaaaaaaaaaaaaaaaaaa

SEQ ID NO: 32654 - RNA, 1785 nt, Artificial Sequence
  mRNA product Design b-4 (A100) comprising derived and/or modified sequence from LASV(ISTH2010-NIG-2012;Clade II)__AIT17482__GPCmut7 (opt1)
aggagagucccgcagucggcguccagcggcucugcuuguucgugugugugucguugcaggccuuauucaagcuuaccaugggccagaucaucaccuucuuccaggaggugccccacgucaucgaggaggugaugaacaucgugcugaucgcccucagccugcuggccauccucaaggggaucuacaacgucgcgaccugcggccuguucgggcugguguccuuccuccugcugugcggccgcagcugcuccacgaccuacaaggggguguacgagcuccagacccuggagcuggacauggccagccucaacaugaccaugccgcuguccugcacgaagaacaacagccaccacuacaucauggucggcaacgagaccggccuggagcucacccugaccaacacguccaucaucaaccacaaguucugcaaccugagcgacgcccacaagaagaaccucuacgaccacgcccugauguccaucaucagcaccuuccaccuguccauccccaacuucaaccaguacgaggccaugagcugcgacuucaacgggggcaagaucuccgugcaguacaaccucagccacgcguacgccguggacgccgccaaccacugcgggaccaucgcgaacggcguccugcagaccuucaugcggauggccuggggcggguccuacaucgcccuggacagcggcaagggguccugggacugcaucaugacgagcuaccaguaccucaucauccagaacaucaccugggaggaccacugccaguucucccgccccagccccaucggcuaccuggggcugcucagccagcggacccgcgacaucuacaucucccggcgccugcugggcaccuucacguggacccucagcgacuccgagggcaacgagacccccgggggcuacugccugacccgguggaugcugaucgaggccgagcucaagugcuucgggaacacggccguggcgaagugcaacgagaagcacgacgaggaguucugcgacaugcugcgccuguucgacuucaacaagcaggccauccggcgccucaagaccccggcccagaugagcauccagcugaucaacaaggccgugaacgcccugaucaacgaccagcucaucaugaagaaccaccuccgggacaucaugggcauccccuacugcaacuacuccaaguacugcuaccugaaccacaccgucaccgggaagacgagccugccccgcugcugccugguguccaacggcagcuaccugaacgagacccacuucuccgacgacaucgagcagcaggcggacaacaugaucaccgagcuccugcagaaggaguacaucgaccggcagggcaagaccccgcuggggcugguggaccucuucgucuucagcacguccuucuaccugaucagcaucuuccugcaccucgugaagauccccacccaccgccacguggucggcaagcccugccccaagccgcaccggcugaaccacauggggaucugcuccugcggccuguacaagcaccccggggugcccgugaaguggaagcgcugaggacuaguaauaaggaaacuguaugaaugucugugggcaggaagugaagagauccuucuguaaagguuuuuggaauuaugucugcugaauaauaaacuuuuuugaaauaauaaaucugguagaaaaaugagaucuaaaaaaaaaaaaaaaaaaaaaaaaaaaaaaaaaaaaaaaaaaaaaaaaaaaaaaaaaaaaaaaaaaaaaaaaaaaaaaaaaaaaaaaaaaaaaaaaaaaa

SEQ ID NO: 32655 - RNA, 1785 nt, Artificial Sequence
  mRNA product Design b-4 (A100) comprising derived and/or modified sequence from LASV(Lassa virus/H.sapiens-wt/NGA/2015/ISTH_0543;Clade II)__AVO03639__GPCmut7 (opt1)
aggagagucccgcagucggcguccagcggcucugcuuguucgugugugugucguugcaggccuuauucaagcuuaccaugggccagaucaucaccuucuuccaggaggugccccacgucaucgaggaggugaugaacaucgugcugaucgcccucagccugcuggccauccucaaggggaucuacaacgucgcgaccugcggccuguucgggcugguguccuuccuccugcugugcggccgcagcugcuccacgaccuacaaggggguguacgagcuccagacccuggagcuggacauggccaaccucaacaugaccaugccgcugagcugcacgaagaacaacucccaccacuacaucauggucggcaacgagaccggccuggagcucacccugaccaacacgagcaucaucaaccacaaguucugcaaccuguccgacgcccacaagaagaaccucuacgaccacgcccugaugagcaucaucuccaccuuccaccugagcauccccaacuucaaccaguacgaggccauguccugcgacuucaacgggggcaagaucagcgugcaguacaaccucucccacaccuacgcgguggacgccgccaaccacugcgggaccaucgccaacggcguccugcagacguucaugcggauggcguggggcgggagcuacaucgcccuggacuccggcaaggggagcugggacugcaucaugaccuccuaccaguaccucgugauccagaacaccaccugggaggaccacugccaguucagccgccccucccccaucggcuaccuggggcugcucagccagcggacgcgcgacaucuacaucagccggcgccugcugggcaccuucaccuggacccucuccgacagcgagggcaacgagacgcccgggggcuacugccugacccgguggaugcugaucgaggccgagcucaagugcuucgggaacaccgccguggccaagugcaacgagaagcacgacgaggaguucugcgacaugcugcgccuguucgacuucaacaagcaggcgauccggcgccucaagaccccggcccagauguccauccagcugaucaacaaggccgucaacgcccugaucaacgaccagcucaucaugaagaaccaccuccgggacaucaugggcauccccuacugcaacuacagcaaguacugcuaccugaaccacacggugaccgggaagaccucccugccccgcugcugccuggugagcaacggcuccuaccugaacgagacccacuucagcgacgacaucgagcagcaggccgacaacaugaucacggagcuccugcagaaggaguacaucgaccggcagggcaagaccccgcuggggcuggucgaccucuucguguucuccaccagcuucuaccugaucuccaucuuccugcaccucgugaagauccccacccaccgccacaucacgggcaagcccugccccaagccgcaccggcugaaccacauggggaucugcagcugcggccuguacaagcaccccgggguccccgugaaguggaagcgcugaggacuaguaauaaggaaacuguaugaaugucugugggcaggaagugaagagauccuucuguaaagguuuuuggaauuaugucugcugaauaauaaacuuuuuugaaauaauaaaucugguagaaaaaugagaucuaaaaaaaaaaaaaaaaaaaaaaaaaaaaaaaaaaaaaaaaaaaaaaaaaaaaaaaaaaaaaaaaaaaaaaaaaaaaaaaaaaaaaaaaaaaaaaaaaaaa

SEQ ID NO: 32656 - RNA, 1785 nt, Artificial Sequence
  mRNA product Design b-4 (A100) comprising derived and/or modified sequence from LASV(Lassa virus/H.sapiens-wt/NGA/2016/ISTH_0009;Clade II)__AVO03571__GPCmut7 (opt1)
aggagagucccgcagucggcguccagcggcucugcuuguucgugugugugucguugcaggccuuauucaagcuuaccaugggccagaucaucaccuucuuccaggaggugccccacgucaucgaggaggugaugaacaucgugcugaucgcccucagccugcuggccauccucaaggggaucuacaacgucgcgaccugcggccugcuggggcucguguccuuccugcugcucugcggccgcagcugcuccacgaccuacaaggggguguacgagcugcagacccuggagcucgacauggccagccugaacaugaccaugccgcuguccugcacgaagaacaacagccaccacuacaucauggucggcaacgagaccggccucgagcugacccugaccaacacguccaucaucaaccacaaguucugcaaccucagcgacgcccacaagaagaaccuguacgaccacgcccugauguccaucaucagcaccuuccaccucuccauccccaacuucaaccaguacgaggccaugagcugcgacuucaacgggggccggaucuccgugcaguacaaccugagccacuccuacgcgguggacgccgccaaccacugcgggaccaucgccaacggcguccugcagaccuucaugcgcauggcguggggcgggagcuacaucgcccucgacuccggcaaggggagcugggacugcaucaugacguccuaccaguaccugaucauccagaacaccaccugggaggaccacugccaguucagccggcccagccccaucggcuaccuggggcuccugucccagcgcacccgggacaucuacaucagccgccggcugcucggcacguucaccuggacccuguccgacagcgagggcaacgagacccccgggggcuacugccugacgcgcuggaugcucaucgaggccgagcugaagugcuucgggaacaccgccguggccaagugcaacgagaagcacgacgaggaguucugcgacaugcugcggcuguucgacuucaacaagcaggcgauccgccggcugaagaccccggcccagauguccauccagcugaucaacaaggccgugaacgcccucaucaacgaccagcugaucaugaagaaccaccuccgcgacaucaugggcauccccuacugcaacuacagcaaguacugcuaccucaaccacaccgucacggggaagaccucccugccccggugcugccuggugagcaacggcuccuaccucaacgagacccacuucagcgacgacaucgagcagcaggccgacaacaugaucaccgagcugcugcagaaggaguacaucgaccgccagggcaagacgccgcuggggcucguggaccuguucgucuucuccaccagcuucuaccugaucuccaucuuccuccaccuggugaagauccccacccaccggcacaucaccggcaagcccugccccaagccgcaccgccugaaccacauggggaucugcagcugcggccucuacaaccaccccggggugcccgucaaguggaagcggugaggacuaguaauaaggaaacuguaugaaugucugugggcaggaagugaagagauccuucuguaaagguuuuuggaauuaugucugcugaauaauaaacuuuuuugaaauaauaaaucugguagaaaaaugagaucuaaaaaaaaaaaaaaaaaaaaaaaaaaaaaaaaaaaaaaaaaaaaaaaaaaaaaaaaaaaaaaaaaaaaaaaaaaaaaaaaaaaaaaaaaaaaaaaaaaaa

SEQ ID NO: 32657 - RNA, 1785 nt, Artificial Sequence
  mRNA product Design b-4 (A100) comprising derived and/or modified sequence from LASV(Lassa virus/H.sapiens-wt/NGA/2016/ISTH_0017;Clade II)__AVO03567__GPCmut7 (opt1)
aggagagucccgcagucggcguccagcggcucugcuuguucgugugugugucguugcaggccuuauucaagcuuaccaugggccagaucaucaccuucuuccaggaggugccccacgucaucgaggaggugaugaacaucgugcugaucgcccucagccugcuggccauccucaaggggaucuacaacgucgcgaccugcggccuguucgggcugguguccuuccuccugcugugcggccgcagcugcuccacgaccuacaaggggguguacgagcuccagacccuggagcuggacauggccagccucaacaugaccaugccgcuguccugcacgaagaacaacagccaccacuacaucauggucggcaacgagaccggccuggagcucacccugaccaacacguccaucaucaaccacaaguucugcaaccugagcgacgcccacaagaagaaccucuacgaccacgcccugauguccaucaucagcaccuuccaccuguccauccccaacuucaaccaguacgaggccaugagcugcgacuucaacgggggcaagaucuccgugcaguacaaccucagccacaccuacgcgaucgacgccgccaaccacugcgggaccaucgccaacggcgugcugcagacguucaugcggauggcguggggcggguccuacaucgcccuggacagcggcaagggguccugggacugcaucaugaccagcuaccaguaccucaucauccagaacaccaccugggaggaccacugccaguucucccgccccagccccaucggcuaccuggggcugcucagccagcggacgcgcgacaucuacaucucccggcgccugcugggcaccuucaccuggacccucagcgacuccgagggcaacgagacgcccgggggcuacugccugacccgguggaugcugaucgaggccgagcucaagugcuucgggaacaccgccgucgccaagugcaacgagaagcacgacgaggaguucugcgacaugcugcgccuguucgacuucaacaagcaggcgauccggcgccucaagaccccggcccagaugagcauccagcugaucaacaaggccgugaacgcccugaucaacgaccagcucaucaugaagaaccaccuccgggacaucaugggcauccccuacugcaacuacuccaaguacugcuaccugaaccacacggugaccgggaagaccagccugccccgcugcugccuggucuccaacggcagcuaccugaacgagacccacuucuccgacgacaucgagcagcaggccgacaacaugaucacggagcuccugcagaaggaguacauggaccggcagggcaagaccccgcuggggcugguggaccucuucguguucagcaccuccuucuaccugaucagcaucuuccugcaccucguccgcauccccacccaccggcacgugaucggcaagcccugccccaagccgcaccgccugaaccacauggggaucugcuccugcggccuguacaagcaccccggggugcccgucaaguggaagcggugaggacuaguaauaaggaaacuguaugaaugucugugggcaggaagugaagagauccuucuguaaagguuuuuggaauuaugucugcugaauaauaaacuuuuuugaaauaauaaaucugguagaaaaaugagaucuaaaaaaaaaaaaaaaaaaaaaaaaaaaaaaaaaaaaaaaaaaaaaaaaaaaaaaaaaaaaaaaaaaaaaaaaaaaaaaaaaaaaaaaaaaaaaaaaaaaa

SEQ ID NO: 32658 - RNA, 1785 nt, Artificial Sequence
  mRNA product Design b-4 (A100) comprising derived and/or modified sequence from LASV(Lassa virus/H.sapiens-wt/NGA/2018/ISTH_0959;Clade II)__AVV65099__GPCmut7 (opt1)
aggagagucccgcagucggcguccagcggcucugcuuguucgugugugugucguugcaggccuuauucaagcuuaccaugggccagaucaucaccuucuuccaggaggugccccacgucaucgaggaggugaugaacaucgugcugaucgcccucagccugcuggccauccucaaggggaucuacaacgucgugaccugcggccuguucgggcugguguccuuccuccugcugugcggccgcagcugcuccacgaccuacaagggggucuacgagcuccagacccuggagcuggacauggcgagccucaacaugaccaugccgcuguccugcacgaagaacaacagccaccacuacaucauggugggcaacgagaccggccuggagcucacccugaccaacacguccaucaucaaccacaaguucugcaaccugagcgacgcccacaagaagaaccucuacgaccacgcccugauguccaucaucagcaccuuccaccuguccauccccaacuucaaccaguacgaggccaugagcugcgacuucaacgggggcaagaucuccgugcaguacaaccucagccacgccuacgcgaucgacgccgccaaccacugcgggaccaucgccaacggcguccugcagaccuucaugcggauggcguggggcggguccuacaucgcccuggacagcggcaagggguccugggacugcaucaugacgagcuaccaguaccucaucauccagaacaccaccugggaggaccacugccaguucucccgccccagccccaucggcuaccuggggcugcucagccagcggacccgcgacaucuacaucucccggcgccugcugggcacguucaccuggacccucagcgacuccgagggcaacgagacccccgggggcuacugccugacgcgguggaugcugaucgaggccgagcucaagugcuucgggaacaccgccguggccaagugcaacgagaagcacgacgaggaguucugcgacaugcugcgccuguucgacuucaacaagcaggcgauccggcgccucaagaccccggcccagaugagcauccagcugaucaacaaggccgugaacgcccugaucaacgaccagcucaucaugaagaaccaccuccgggacaucaugggcauccccuacugcaacuacuccaaguacugcuaccugaaccacaccgucacggggaagaccagccugccccgcugcugccugguguccaacggcagcuaccugaacgagacccacuucuccgacgacaucgagcagcaggccgacaacaugaucaccgagcuccugcagaaggaguacaucgaccggcagggcaagacgccgcuggggcugguggaccucuucgucuucagcaccuccuucuaccugaucagcaucuuccugcaccucgugaagauccccacccaccgccacgugaucggcaagcccugccccaagccgcaccggcugaaccacauggggaucugcuccugcggccuguacaagcaccccgggguccccgugaaguggaagcgcugaggacuaguaauaaggaaacuguaugaaugucugugggcaggaagugaagagauccuucuguaaagguuuuuggaauuaugucugcugaauaauaaacuuuuuugaaauaauaaaucugguagaaaaaugagaucuaaaaaaaaaaaaaaaaaaaaaaaaaaaaaaaaaaaaaaaaaaaaaaaaaaaaaaaaaaaaaaaaaaaaaaaaaaaaaaaaaaaaaaaaaaaaaaaaaaaa

SEQ ID NO: 32659 - RNA, 1785 nt, Artificial Sequence
  mRNA product Design b-4 (A100) comprising derived and/or modified sequence from LASV(LASV003-NIG-2008;Clade II)__AIT17580__GPCmut7 (opt1)
aggagagucccgcagucggcguccagcggcucugcuuguucgugugugugucguugcaggccuuauucaagcuuaccaugggccagaucaucaccuucuuccaggaggugccccacgucaucgaggaggugaugaacaucgugcugaucgcccucagccugcuggccauccucaaggggaucuacaacgucgcgaccugcggccuguucgggcugguguccuuccuccugcugugcggccgcagcugcuccacgaccuacaaggggguguacgagcuccagacccuggagcuggacauggccagccucaacaugaccaugccgcuguccugcacgaagaacaacagccaccacuacaucauggucggcaacgagaccggccuggagcucacccugaccaacacguccaucaucaaccacaaguucugcaaccugagcgacgcccacaagaagaaccucuacgaccacgcccugauguccaucaucagcaccuuccaccuguccauccccaacuucaaccaguacgaggccaugagcugcgacuucaacgggggcaagaucuccgugcaguacaaccucagccacaccuacgcgguggacgccgccaaccacugcgggaccaucgccaacggcguccugcagacguucaugcggauggcguggggcggguccuacaucgcccuggacagcggcaagggguccugggacugcaucaugaccagcuaccaguaccucaucauccagaacaccaccugggaggaccacugccaguucucccgccccagccccaucggcuaccuggggcugcucagccagcggacgcgcgacaucuacaucucccggcgccugcugggcaccuucaccuggacccucagcgacuccgagagcaacgagacgccgggcggguacugccugacccgguggaugcugaucgaggccgagcucaagugcuucggcaacaccgccguggccaagugcaacgagaagcacgacgaggaguucugcgacaugcugcgccuguucgacuucaacaagcaggcgauccggcgccucaaggcccccgcccagauguccauccagcugaucaacaaggccgugaacgcccugaucaacgaccagcucaucaugaagaaccaccuccgggacaucauggggauccccuacugcaacuacagcaaguacugcuaccugaaccacaccgucacgggccgcaccucccugccccggugcugccuggugagcaacggguccuaccugaacgagacccacuucagcgacgacaucgagcagcaggcggacaacaugaucaccgagcuccugcagaaggaguacauggaccgccagggcaagacgccgcugggccugguggaccucuucgucuucuccaccagcuucuaccugaucuccaucuuccugcaccucgugaagauccccacccaccggcacgugaucgggaagcccugccccaagccgcaccgccugaaccacaugggcaucugcagcugcgggcuguacaagcaccccggcguccccgugaaguggaagcggugaggacuaguaauaaggaaacuguaugaaugucugugggcaggaagugaagagauccuucuguaaagguuuuuggaauuaugucugcugaauaauaaacuuuuuugaaauaauaaaucugguagaaaaaugagaucuaaaaaaaaaaaaaaaaaaaaaaaaaaaaaaaaaaaaaaaaaaaaaaaaaaaaaaaaaaaaaaaaaaaaaaaaaaaaaaaaaaaaaaaaaaaaaaaaaaaa

SEQ ID NO: 32660 - RNA, 1785 nt, Artificial Sequence
  mRNA product Design b-4 (A100) comprising derived and/or modified sequence from LASV(LASV035-NIG-2009;Clade II)__AIT17588__GPCmut7 (opt1)
aggagagucccgcagucggcguccagcggcucugcuuguucgugugugugucguugcaggccuuauucaagcuuaccaugggccagaucaucaccuucuuccaggaggugccccacgucaucgaggaggugaugaacaucgugcugaucgcccucagccugcuggccauccucaaggggaucuacaacgucgcgaccugcggccuguucgggcugguguccuuccuccugcugugcggccgcagcugcuccacgaccuacaaggggguguacgagcuccagacccuggagcuggacauggccagccucaacaugaccaugccgcuguccugcacgaagaacaacagccaccacuacaucauggucggcaacgagaccggccuggagcucacccugaccaacacguccaucaucaaccacaaguucugcaaccugagcgacgcccacaagaagaaccucuacgaccacgcccugauguccaucaucagcaccuuccaccuguccauccccaacuucaaccaguacgaggccaugagcugcgacuucaacgggggcaagaucuccgugcaguacaaccucagccacgcguacgccguggacgccgccaaccacugcgggaccaucgcgaacggcguccugcagaccuucaugcggauggccuggggcggguccuacaucgcccuggacagcggcaagggguccugggacugcaucaugacgagcuaccaguaccucaucauccagaacaccaccugggaggaccacugccaguucucccgccccagccccaucggcuaccuggggcugcucagccagcggacccgcgacaucuacaucucccggcgccugcugggcacguucaccuggacccucagcgacuccgagggcaacgagacccccgggggcuacugccugacgcgguggaugcugaucgaggccgagcucaagugcuucgggaacaccgccguggcgaagugcaacgagaagcacgacgaggaguucugcgacaugcugcgccuguucgacuucaacaagcaggccauccggcgccucaaggccccggcccagaugagcauccagcugaucaacaaggccgugaacgcgcugaucaacgaccagcucaucaugaagaaccaccuccgggacaucaugggcauccccuacugcaacuacuccaaguacugcuaccugaaccacaccgucaccgggaagacgagccugccccgcugcugccugguguccaacggcagcuaccugaacgagacccacuucuccgacgacaucgagcagcaggccgacaacaugaucaccgagcuccugcagaaggaguacaucgaccggcagggcaagaccccgcuggggcugguggaccucuucgucuucagcacguccuucuaccugaucagcaucuuccugcaccucgugaagauccccacccaccgccacgugaucggcaagcccugccccaagccgcaccggcugaaccacauggggaucugcuccugcggccuguacaagcaccccgggguccccgugaaguggaagcgcugaggacuaguaauaaggaaacuguaugaaugucugugggcaggaagugaagagauccuucuguaaagguuuuuggaauuaugucugcugaauaauaaacuuuuuugaaauaauaaaucugguagaaaaaugagaucuaaaaaaaaaaaaaaaaaaaaaaaaaaaaaaaaaaaaaaaaaaaaaaaaaaaaaaaaaaaaaaaaaaaaaaaaaaaaaaaaaaaaaaaaaaaaaaaaaaaa

SEQ ID NO: 32661 - RNA, 1785 nt, Artificial Sequence
  mRNA product Design b-4 (A100) comprising derived and/or modified sequence from LASV(LASV1000-NIG-2009;Clade II)__AIT17782__GPCmut7 (opt1)
aggagagucccgcagucggcguccagcggcucugcuuguucgugugugugucguugcaggccuuauucaagcuuaccaugggccagaucaucaccuucuuccaggaggugccccacgucaucgaggaggugaugaacaucgugcugaucgcccucagccugcuggccauccucaaggggaucuacaacgucgcgaccugcggccuguucgggcugguguccuuccuccugcugugcggccgcagcugcuccacgaccuacaaggggguguacgagcuccagacccuggagcuggacauggccagccucaacaugaccaugccgcuguccugcacgaagaacaacagccaccacuacaucauggucggcaacgagaccggccuggagcucacccugaccaacacguccaucaucaaccacaaguucugcaaccugagcgacgcccacaagaagaaccucuacgaccacgcccugauguccaucaucagcaccuuccaccuguccauccccaacuucaaccaguacgaggccaugagcugcgacuucaacgggggcaagaucuccgugcaguacaaccucagccacaccuacgcgguggacgccgccaaccacugcgggaccaucgccaacggcguccugcagacguucaugcggauggcguggggcggguccuacaucgcccuggacagcggcaagggguccugggacugcaucaugaccagcuaccaguaccucaucauccagaacaccaccugggaggaccacugccaguucucccgccccagccccaucggcuaccuggggcugcucagccagcggacgcgcgacaucuacaucucccggcgccugcugggcaccuucaccuggacccucagcgacuccgagggcaacgagacgcccgggggcuacugccugacccgguggaugcugaucgaggccgagcucaagugcuucgggaacaccgccguggccaagugcaacgagaagcacgacgaggaguucugcgacaugcugcgccuguucgacuucaacaagcaggcgaucaagcggcucaagaccccggcccagaugagcauccagcugaucaacaaggccgugaacgcccugaucaacgaccagcucaucaugaagaaccaccuccgcgacaucaugggcauccccuacugcaacuacuccaaguacugcuaccugaaccacacggucaccgggaagaccagccugccccggugcugccugguguccaacggcagcuaccugaacgagacccacuucuccgacgacaucgagcagcaggccgacaacaugaucacggagcuccugcagaaggaguacaucgaccgccagggcaagaccccgcuggggcugguggaccucuucgucuucagcaccuccuucuaccugaucagcaucuuccugcaccucgugaagauccccacccaccggcacguggucggcaagcccugccccaagccgcaccgccugaaccacauggggaucugcuccugcggccuguacaagcaccccggggugcccgugaaguggaagcggugaggacuaguaauaaggaaacuguaugaaugucugugggcaggaagugaagagauccuucuguaaagguuuuuggaauuaugucugcugaauaauaaacuuuuuugaaauaauaaaucugguagaaaaaugagaucuaaaaaaaaaaaaaaaaaaaaaaaaaaaaaaaaaaaaaaaaaaaaaaaaaaaaaaaaaaaaaaaaaaaaaaaaaaaaaaaaaaaaaaaaaaaaaaaaaaaa

SEQ ID NO: 32662 - RNA, 1785 nt, Artificial Sequence
  mRNA product Design b-4 (A100) comprising derived and/or modified sequence from LASV(LASV221-NIG-2010;Clade II)__AIT17624__GPCmut7 (opt1)
aggagagucccgcagucggcguccagcggcucugcuuguucgugugugugucguugcaggccuuauucaagcuuaccaugggccagaucaucaccuucuuccaggaggugccccacgucaucgaggaggugaugaacaucgugcugaucgcccucagccugcuggccauccucaaggggaucuacaacgucgcgaccugcggccuguucgggcugguguccuuccuccugcugugcggccgcagcugcuccacgaccuacaaggggguguacgagcuccagacccuggagcuggacauggccagccucaacaugaccaugccgcuguccugcacgaagaacaacagccaccacuacaucauggucggcaacgagaccggccuggagcucacccugaccaacacguccaucaucaaccacaaguucugcaaccugagcgacgcccacaagaagaaccucuacgaccacgcccugauguccaucaucagcaccuuccaccuguccauccccaacuucaaccaguacgaggccaugagcugcgacuucaacgggggcaagaucuccgugcaguacaaccucagccacaccuacgcgaucgacgccgccaaccacugcgggaccaucgccaacggcgugcugcagacguucaugcggauggcguggggcggguccuacaucgcccuggacagcggcaagggguccugggacugcaucaugaccagcuaccaguaccucaucauccagaacaccaccugggaggaccacugccaguucucccgccccagccccaucggcuaccuggggcugcucagccagcggacgcgcgacaucuacaucucccggcgccugcugggcaccuucaccuggacccucagcgacuccgagggcaacgagacgcccgggggcuacugccugacccgguggaugcugaucgaggccgagcucaagugcuucgggaacaccgccgucgccaagugcaacgagaagcacgacgaggaguucugcgacaugcugcgccuguucgacuucaacaagcaggcgauccggcgccucaagaccccggcccagaugagcauccagcugaucaacaaggccgugaacgcccugaucaacgaccagcucaucaugaagaaccaccuccgggacaucaugggcauccccuacugcaacuacuccaaguacugcuaccugaaccacacggugaccgggaagaccagccugccccgcugcugccuggucuccaacggcagcuaccugaacgagacccacuucuccgacgacaucgagcagcaggccgacaacaugaucacggagaugcuccagaaggaguacauggaccggcagggcaagaccccgcuggggcugguggaccuguucguguucagcaccuccuucuaccucaucagcaucuuccugcaccuggucaagauccccacccaccgccacgugaucggcaagcccugccccaagccgcaccggcucaaccacauggggaucugcuccugcggccuguacaagcaccccggggugcccgucaaguggaagcgcugaggacuaguaauaaggaaacuguaugaaugucugugggcaggaagugaagagauccuucuguaaagguuuuuggaauuaugucugcugaauaauaaacuuuuuugaaauaauaaaucugguagaaaaaugagaucuaaaaaaaaaaaaaaaaaaaaaaaaaaaaaaaaaaaaaaaaaaaaaaaaaaaaaaaaaaaaaaaaaaaaaaaaaaaaaaaaaaaaaaaaaaaaaaaaaaaa

SEQ ID NO: 32663 - RNA, 1785 nt, Artificial Sequence
  mRNA product Design b-4 (A100) comprising derived and/or modified sequence from LASV(LASV237-NIG-2010;Clade II)__AIT17638__GPCmut7 (opt1)
aggagagucccgcagucggcguccagcggcucugcuuguucgugugugugucguugcaggccuuauucaagcuuaccaugggccagaucaucaccuucuuccaggaggugccccacgucaucgaggaggugaugaacaucgugcugaucgcccucagccugcuggccauccucaaggggaucuacaacgucgcgaccugcggccuguucgggcugguguccuuccuccugcugugcggccgcagcugcuccacgaccuacaaggggguguacgagcuccagacccuggagcuggacauggccagccucaacaugaccaugccgcuguccugcacgaagaacaacagccaccacuacaucauggucggcaacgagaccggccuggagcucacccugaccaacacguccaucaucaaccacaaguucugcaaccugagcgacgcccacaagaaggaccucuacgaccacgcccugauguccaucaucagcaccuuccaccuguccauccccaacuucaaccaguacgaggccaugagcugcgacuucaacgggggcaagaucuccgugcaguacaaccucagccacaccuacgcgguggacgccgccaaccacugcgggaccaucgccaacggcguccugcagacguucaugcggauggcguggggcggguccuacaucgcccuggacagcggcaagggguccugggacugcaucaugaccagcuaccaguaccucaucauccagaacaccaccugggaggaccacugccaguucucccgccccagccccaucggcuaccuggggcugcucagccagcggacgcgcgacaucuacaucucccggcgccugcugggcaccuucaccuggacccucagcgacuccgagggcaacgagacgcccgggggcuacugccugacccgguggaugcugaucgaggccgagcucaagugcuucgggaacaccgccguggccaagugcaacgagaagcacgacgaggaguucugcgacaugcugcgccuguucgacuucaacaagcaggcgauccggcgccucaagaccccggcccagaugagcauccagcugaucaacaaggccgugaacgcccugaucaacgaccagcucaucaugaagaaccaccuccgggacaucaugggcauccccuacugcaacuacuccaaguacugcuaccugaaccacacggucaccgggaagaccagccugccccgcugcugccugguguccaacggcagcuaccugaacgagacccacuucuccgacgacaucgagcagcaggccgacaacaugaucacggagcuccugcagaaggaguacauggaccggcagggcaagaccccgcuggggcugguggaccucuucgucuucagcaccuccuucuaccugaucagcaucuuccugcaccucaucaagauccccacccaccgccacaucacgggcaagcccugccccaagccgcaccggcugaaccacauggggaucugcuccugcggccuguacaagcaccccggggugcccgugaaguggaagcgcugaggacuaguaauaaggaaacuguaugaaugucugugggcaggaagugaagagauccuucuguaaagguuuuuggaauuaugucugcugaauaauaaacuuuuuugaaauaauaaaucugguagaaaaaugagaucuaaaaaaaaaaaaaaaaaaaaaaaaaaaaaaaaaaaaaaaaaaaaaaaaaaaaaaaaaaaaaaaaaaaaaaaaaaaaaaaaaaaaaaaaaaaaaaaaaaaa

SEQ ID NO: 32664 - RNA, 1785 nt, Artificial Sequence
  mRNA product Design b-4 (A100) comprising derived and/or modified sequence from LASV(LASV253-NIG-2011;Clade II)__AIT17670__GPCmut7 (opt1)
aggagagucccgcagucggcguccagcggcucugcuuguucgugugugugucguugcaggccuuauucaagcuuaccaugggccagaucaucaccuucuuccaggaggugccccacgucaucgaggaggugaugaacaucgugcugaucgcccucagccugcuggccauccucaaggggaucuacaacgucgcgaccugcggccuguucgggcugguguccuuccuccugcugugcggccgcagcugcuccacgaccuacaaggggguguacgagcuccagacccuggagcuggacauggccagccucaacaugaccaugccgcuguccugcacgaagaacaacagccaccacuacaucauggucggcaacgagaccggccuggagcucacccugaccaacacguccaucaucaaccacaaguucugcaaccugagcgacgcccacaagaagaaccucuacgaccacgcccugauguccaucaucagcaccuuccaccuguccauccccaacuucaaccaguacgaggccaugagcugcgacuucaacgggggcaagaucuccgugcaguacaaccucagccacaccuacgcgguggacgccgccaaccacugcgggaccaucgccaacggcguccugcagacguucaugcggauggcguggggcggguccuacaucgcccuggacagcggcaagggguccugggacugcaucaugaccagcuaccaguaccucaucauccagaacaccaccugggaggaccacugccaguucucccgccccagccccaucggcuaccuggggcugcucagccagcggacgcgcgacaucuacaucucccggcgccugcugggcaccuucaccuggacccucagcgacuccgagggcaacgagacgcccgggggcuacugccugacccgguggaugcugaucgaggccgagcucaagugcuucgggaacaccgccguggccaagugcaacgagaagcacgacgaggaguucugcgacaugcugcgccuguucgacuucaacaagcaggcgauccggcgccucaaggccccggcccagaugagcauccagcugaucaacaaggccgugaacgcccugaucaacgaccagcucaucaugaagaaccaccuccgggacaucaugggcauccccuacugcaacuacuccaaguacugcuaccugaaccacaccgucacggggcgcaccagccugccccggugcugccugguguccaacggcagcuaccugaacgagacccacuucuccgacgacaucgagcagcaggcggacaacaugaucaccgagcuccugcagaaggaguacaucgaccgccagggcaagacgccgcuggggcugguggaccucuucgucuucagcaccuccuucuaccugaucagcaucuuccugcaccucgugaagauccccacccaccggcacaucaucggcaagcccugccccaagccgcaccgccugaaccacauggggaucugcuccugcggccuguacaagcaccccggggugcccgucaaguggaagcggugaggacuaguaauaaggaaacuguaugaaugucugugggcaggaagugaagagauccuucuguaaagguuuuuggaauuaugucugcugaauaauaaacuuuuuugaaauaauaaaucugguagaaaaaugagaucuaaaaaaaaaaaaaaaaaaaaaaaaaaaaaaaaaaaaaaaaaaaaaaaaaaaaaaaaaaaaaaaaaaaaaaaaaaaaaaaaaaaaaaaaaaaaaaaaaaaa

SEQ ID NO: 32665 - RNA, 1785 nt, Artificial Sequence
  mRNA product Design b-4 (A100) comprising derived and/or modified sequence from LASV(LASV254-NIG-2011;Clade II)__AIT17674__GPCmut7 (opt1)
aggagagucccgcagucggcguccagcggcucugcuuguucgugugugugucguugcaggccuuauucaagcuuaccaugggccagaucaucaccuucuuccaggaggugccccacgucaucgaggaggugaugaacaucgugcugaucgcccucagccugcuggccauccucaaggggaucuacaacgucgcgaccugcggccuguucgggcugguguccuuccuccugcugugcggccgcagcugcuccacgaccuacaaggggguguacgagcuccagacccuggagcuggacaugaccaaccucaacaugacgaugccgcugagcugcaccaagaacaacucccaccacuacaucauggucggcaacgagaccggccuggagcucacccugacgaacaccagcaucaucaaccacaaguucugcaaccuguccgacgcccacaagaagaaccucuacaaccacgcccugaugagcaucaucuccaccuuccaccugagcauccccaacuucaaccaguacgaggccauguccugcgacuucaacgggggcaagaucagcgugcaguacaaccucucccacagcuacgccguggacgcggccaaccacugcgggaccaucgccaacggcguccugcagacguucaugcggauggccuggggcggguccuacaucgcgcuggacagcggcaaggggaacugggacugcaucaugaccuccuaccaguaccucaucauccagaacaccaccugggaggaccacugccaguucagccgccccucccccaucggcuaccuggggcugcucagccagcggacgcgcgacaucuacaucagccggcgccugcugggcaccuucaccuggacccucuccgacagcgagggcaacgagacgcccgggggcuacugccugacccgguggaugcugaucgaggccgagcucaagugcuucgggaacaccgccguggccaagugcaacgagaagcacgacgaggaguucugcgacaugcugcgccuguucgacuucaacaagcaggccauccggcgccucaagaccccggcgcaggccaacauccagcugaucaacaaggccgugaacgcccugaucaacgaccagcucaucaugaagaaccaccuccgggacaucaugggcauccccuacugcaacuacuccaaguacugcuaccugaaccacacggucaccgggaagaccagccugccccgcugcugccugguguccaacggcagcuaccugaacgagacccacuucuccgacgacaucgagcagcaggccgacaacaugaucacggagcuccugcagaaggaguacauggaccggcagggcaagaccccgcuggggcugguggaccucuucgucuucagcaccuccuucuaccugaucagcaucuuccugcaccucgugaagauccccacccaccgccacgugaucggcaagcccugccccaagccgcaccggcugaaccacauggggaucugcuccugcggccuguacaagcaccccgggguccccgugaaguggaagcgcugaggacuaguaauaaggaaacuguaugaaugucugugggcaggaagugaagagauccuucuguaaagguuuuuggaauuaugucugcugaauaauaaacuuuuuugaaauaauaaaucugguagaaaaaugagaucuaaaaaaaaaaaaaaaaaaaaaaaaaaaaaaaaaaaaaaaaaaaaaaaaaaaaaaaaaaaaaaaaaaaaaaaaaaaaaaaaaaaaaaaaaaaaaaaaaaaa

SEQ ID NO: 32666 - RNA, 1785 nt, Artificial Sequence
  mRNA product Design b-4 (A100) comprising derived and/or modified sequence from LASV(Nig08-A19;Clade III)__ADU56618__GPCmut7 (opt1)
aggagagucccgcagucggcguccagcggcucugcuuguucgugugugugucguugcaggccuuauucaagcuuaccaugggccagaucgugaccuucuuccaggaggucccccacgugaucgaggaggugaugaacaucguccugaucgcccucagcauccuggccauccugaaggggcucuacaacaucgcgaccugcggccugaucgggcuggugacguuccuccugcuguccggccgcagcugcuccaugaccuacaaggggguguacgagcuccagacccuggagcugaacaugaacacccucaacaugacgaugccgcugagcugcaccaagaacaacucccaccacuacaucauggucggcaacgagaccggccuggagcucacccugacgaacaccagccugcuccaccacaaguucugcaaccuguccgacgcccacaagaagaaccuguacgaccacacccucaugagcaucaucuccaccuuccaccugagcauccccaacuucaaccaguacgaggccauguccugcgacuucaacgggggcaagaucacggugcaguacaaccugagccacuccuacgccaucgacgccgcgaaccacugcgggaccguggccaacggcguccuccagaccuucaugcggauggccuggggcgggagcuacaucgcccuggacuccggccgcgggaagugggacugcaucaugaccagcuaccaguaccugaucauccagaacacgaccugggaggaccacugccaguucucccggcccagccccaucggcuaccucgggcugcugucccagcgcacccgggacaucuacaucagccgccggcuccugggcaccuucacguggacccugagcgacuccgagggcaacgagacccccgggggcuacugccucacccgcuggaugcugaucgaggcggagcugaagugcuucgggaacacggccguggccaagugcaacgagaagcacgacgaggaguucugcgacaugcuccggcuguucgacuucaacaagcaggccauccgccggcugaaggccccggcgcagaugagcauccagcucaucaacaaggccgugaacgcccugaucaacgaccagcugaucaugaagaaccaccuccgcgacaucaugggcauccccuacugcaacuacuccaaguacugcuaccugaaccacaccagcaccgggcggaccucccugccccgcugcugccucgucagcaacggcuccuaccugaacgagacgcacuucagcgacgacaucgagcagcaggccgacaacaugaucaccgagaugcugcagaaggaguaccuggaccggcagggcaagaccccgcucgggcugguggaccuguucguguucuccaccagcuucuaccucaucuccaucuuccugcaccuggucaagauccccacgcaccgccacaucgugggcaagcccugccccaagccgcaccggcucaaccacauggggaucugcagcugcggccuguacaagcagcccggggugcccguccgcuggaagcggugaggacuaguaauaaggaaacuguaugaaugucugugggcaggaagugaagagauccuucuguaaagguuuuuggaauuaugucugcugaauaauaaacuuuuuugaaauaauaaaucugguagaaaaaugagaucuaaaaaaaaaaaaaaaaaaaaaaaaaaaaaaaaaaaaaaaaaaaaaaaaaaaaaaaaaaaaaaaaaaaaaaaaaaaaaaaaaaaaaaaaaaaaaaaaaaaa

SEQ ID NO: 32667 - RNA, 1788 nt, Artificial Sequence
  mRNA product Design b-4 (A100) comprising derived and/or modified sequence from LASV(G1180-SLE-2010;Clade IV)__AIT17168__GPCmut7 (opt1)
aggagagucccgcagucggcguccagcggcucugcuuguucgugugugugucguugcaggccuuauucaagcuuaccaugggccagaucgugaccuucuuccaggaggucccccacgugaucgaggaggugaugaacaucguccugaucgcccucagcauccuggccgugcugaaggggcucuacaacuucgcgaccugcggccugguggggcugcucacguuccugcugcucugcggccgcuccugcaccgccagccgguacaagggggucuacgagcugcagacccuggagcucaacauggagacccugaacaugacgaugccgcuguccugcaccaagaacaacagccaccacuacaucauggugggcaacgagaccggccucgagcugacccugacgaacaccuccaucaucaaccacaaguucugcaaccucagcgacgcccacaagaagaaccuguacgaccacgcccugauguccaucaucagcaccuuccaccucuccauccccaacuucaaccaguacgaggccaugagcugcgacuucaacgggggcaagaucuccgugcaguacaaccugagccacuccuacgcgggggacgccgccaaccacugcggcaccgucgccaacggggugcugcagacguucaugcgcauggcguggggcggcagcuacaucgcccucgacuccgggcacggcagcugggacugcaucaugaccuccuaccaguaccugaucauccagaacaccaccugggaggaccacugccaguucagccggcccucccccaucggguaccugggccuccugagccagcgcacgcgggacaucuacaucagccgccggcugcucggcaccuucaccuggacccuguccgacagcgaggggaaggacacgccgggcggguacugccugacccgcuggaugcucaucgaggccgagcugaagugcuucggcaacaccgccguggccaagugcaacgagaagcacgacgaggaguucugcgacaugcugcggcuguucgacuucaacaagcaggcgauccagcgccugaaggcccccgcccagauguccauccagcugaucaacaaggccgucaacgcccucaucaacgaccagcugaucaugaagaaccaccuccgggacaucauggggauccccuacugcaacuacagcaaguacugcuaccucaaccacaccacgaccggcaagaccucccugcccaagugcugccuggugagcaacggcuccuaccucaacgagacccacuucagcgacgacaucgagcagcaggcggacaacaugaucacggagaugcugcagaaggaguacauggagcgccaggggaagaccccgcugggccugguggaccucuucgucuucuccaccagcuucuaccugaucuccaucuuccugcaccucgugaagauccccacccaccggcacaucgugggcaagagcugccccaagccccaccgccugaaccacauggggaucugcuccugcgggcuguacaagcagccgggcguccccgugaaguggaagcggugaggacuaguaauaaggaaacuguaugaaugucugugggcaggaagugaagagauccuucuguaaagguuuuuggaauuaugucugcugaauaauaaacuuuuuugaaauaauaaaucugguagaaaaaugagaucuaaaaaaaaaaaaaaaaaaaaaaaaaaaaaaaaaaaaaaaaaaaaaaaaaaaaaaaaaaaaaaaaaaaaaaaaaaaaaaaaaaaaaaaaaaaaaaaaaaaa

SEQ ID NO: 32668 - RNA, 1788 nt, Artificial Sequence
  mRNA product Design b-4 (A100) comprising derived and/or modified sequence from LASV(G1442-SLE-2011;Clade IV)__AIT17180__GPCmut7 (opt1)
aggagagucccgcagucggcguccagcggcucugcuuguucgugugugugucguugcaggccuuauucaagcuuaccaugggccagaucgugaccuucuuccaggaggucccccacgugaucgaggaggugaugaacaucguccugaucgcccucagcauccuggccgugcugaaggggcucuacaacguggcgaccugcggccugaucgggcuggucacguuccuccugcugugcggccgcuccugcaccaccacccucuacaaggggguguacgagcugcagacgcuggagcucaacauggagacccugaacaugaccaugccgcugagcugcaccaagaacaacucccaccacuacauccgggugggcaacgagacgggccucgagcugacccugaccaacaccagcaucaucaaccacaaguucugcaaccucuccgacgcccacaagaagaaccuguacgaccacgcccugaugagcaucaucuccacguuccaccucagcauccccaacuucaaccaguacgaggccauguccugcgacuucaacgggggcaagaucagcguccaguacaaccugucccacagcuacgccggggacgcggccaaccacugcggcaccguggccaacggggugcugcagaccuucaugcgcauggccuggggcggcuccuacaucgcgcucgacagcgggcggggcaacugggacugcaucaugaccuccuaccaguaccugaucauccagaacacgaccugggacgaccacugccaguucagccgccccucccccaucggguaccugggccuccugagccagcggacccgcgacgucuacaucucccggcgccugcucggcaccuucacguggacccugagcgacagcgaggggaaggacaccccgggcggguacugccugacccgguggaugcucaucgaggccgagcugaagugcuucggcaacacggccguggccaagugcaacgagaagcacgacgaggaguucugcgacaugcugcgccucuucgacuucaacaagcaggccauccagcggcugaaggcgcccgcccagauguccauccagcugaucaacaaggccgugaacgcccucaucaacgaccagcugaucaugaagaaccaccuccgcgacaucauggggauccccuacugcaacuacagcaaguacugcuaccugaacaacaccgccaccggcaagaccucccugcccaagugcugccugaucagcaacggcuccuaccucaacgagacgcacuucagcgacgacaucgagcaggaggcggacaacaugaucaccgagaugcugcagaaggaguacauggagcggcaggggaagaccccgcugggccuggucgaccucuucguguucuccaccagcuucuaccugaucuccaucuuccugcaccucgugaagauccccacgcaccgccacaucgucggcaagagcugccccaagccccaccggcugaaccacauggggaucugcuccugcgggcuguacaagcagccgggcgugcccgugcgcuggaagcggugaggacuaguaauaaggaaacuguaugaaugucugugggcaggaagugaagagauccuucuguaaagguuuuuggaauuaugucugcugaauaauaaacuuuuuugaaauaauaaaucugguagaaaaaugagaucuaaaaaaaaaaaaaaaaaaaaaaaaaaaaaaaaaaaaaaaaaaaaaaaaaaaaaaaaaaaaaaaaaaaaaaaaaaaaaaaaaaaaaaaaaaaaaaaaaaaa

SEQ ID NO: 32669 - RNA, 1788 nt, Artificial Sequence
  mRNA product Design b-4 (A100) comprising derived and/or modified sequence from LASV(G3010-SLE-2013;Clade IV)__AIT17344__GPCmut7 (opt1)
aggagagucccgcagucggcguccagcggcucugcuuguucgugugugugucguugcaggccuuauucaagcuuaccaugggccagaucgugaccuucuuccaggaggucccccacgugaucgaggaggugaugaacaucguccugaucgcccucagcauccuggccgugcugaaggggcucuacaacuucgcgaccugcggccugguggggcuggucacguuccuccugcugugcggccgcuccugcaccaccagccucuacaaggggguguacgagcugcagacccuggagcucaacauggagacgcugaacaugaccaugccgcuguccugcaccaagaacaacagccaccacuacaucauggugggcaacgagaccggccucgagcugacgcugaccaacaccuccaucaucaaccacaaguucugcaaccucagcgacgcccacaagaagaaccuguacaaccacgcccugauguccaucaucagcaccuuccaccucuccauccccaacuucaaccaguacgaggccaugagcugcgacuucaacgggggcaagaucuccguccaguacaaccugagccacuccuacgccggggacgcggccagccacugcggcacgguggccaacggggugcugcagaccuucaugcggauggccuggggcggcuccuacaucgcgcucgacagcggguacggcaagugggacugcaucaugaccuccuaccaguaccugaucauccagaacaccacgugggaggaccacugccaguucagccgccccucccccaucggguaccugggccuccugagccagcggacccgcgacaucuacaucagccggcgccugcucggcaccuucaccuggacgcuguccgacagcgaggggaaggacaccccgggcggguacugccugacccgguggaugcucaucgaggccgagcugaagugcuucggcaacaccgccgucgccaagugcaacgagaagcacgacgaggaguucugcgacaugcugcgccucuucgacuucaacaagcaggccauccagcggcugaagacgcccgcgcagauguccauccagcugaucaacaaggccgugaacgcccucaucaacgaccagcugaucaugaagaaccaccuccgcgacaucauggggauccccuacugcaacuacagcaaguacugcuaccugaaccacaccaccaccggcaagacgucccugcccaagugcugccuggugagcaacggcuccuaccucaacgagacccacuucagcgacgacaucgagcagcaggccgacaacaugaucaccgagaugcugcagaaggaguacauggagcggcaggggaagaccccgcugggccuggucgaccucuucguguucuccacgagcuucuaccugaucuccaucuuccugcaccucgugaagauccccacccaccgccacaucgucggcaagagcugccccaagccccaccggcugaaccacauggggaucugcuccugcgggcuguacaagcagccgggcgugcccgugcgcuggaagcggugaggacuaguaauaaggaaacuguaugaaugucugugggcaggaagugaagagauccuucuguaaagguuuuuggaauuaugucugcugaauaauaaacuuuuuugaaauaauaaaucugguagaaaaaugagaucuaaaaaaaaaaaaaaaaaaaaaaaaaaaaaaaaaaaaaaaaaaaaaaaaaaaaaaaaaaaaaaaaaaaaaaaaaaaaaaaaaaaaaaaaaaaaaaaaaaaa

SEQ ID NO: 32670 - RNA, 1788 nt, Artificial Sequence
  mRNA product Design b-4 (A100) comprising derived and/or modified sequence from LASV(G502-SLE-2009;Clade IV)__AIT17126__GPCmut7 (opt1)
aggagagucccgcagucggcguccagcggcucugcuuguucgugugugugucguugcaggccuuauucaagcuuaccaugggccagaucgugaccuucuuccaggaggucccccacgugaucgaggaggugaugaacaucguccugaucgcccucagcauccuggccgugcugaaggggcucuacaacuucgcgaccugcggccugguggggcugcucacguuccugcugcucugcggccgcuccugcaccaccgggcuguacaagggcgucuacgagcugcagacccucgagcugaacauggagacgcugaacaugaccaugccgcucagcugcaccaagaacaacucccaccacuacaucauggugggcaacgagaccgggcuggagcugacgcucaccaacaccagcaucaucaaccacaaguucugcaaccuguccgacgcccacaagaagaaccuguacgaccacgcccucaugagcaucaucuccaccuuccaccugagcauccccaacuucaaccaguacgaggccauguccugcgacuucaacggcgggaagaucagcgugcaguacaaccugucccacagcuacgccggcgacgcggccgaccacugcgggacggucgccaacggcgugcuccagaccuucaugcggauggccuggggcggguccuacaucgcgcuggacagcggccgcgggcggugggacugcaucaugaccuccuaccaguaccugaucauccagaacaccacgugggaggaccacugccaguucagccgccccucccccaucggcuaccucggccugcugagccagcggacccgcgacaucuacaucucccggcgccuccuggggaccuucaccuggacgcugagcgacagcgagggcaaggacacccccgggggcuacugccucacccgguggaugcugaucgaggccgagcugaagugcuucgggaacaccgccguggccaagugcaacgagaagcacgacgaggaguucugcgacaugcuccgccuguucgacuucaacaagcaggccauccagcggcugaaggcgccggcccagauguccauccagcucaucaacaaggccgucaacgcccugaucaacgaccagcuggugaugaagaaccaccuccgcgacaucaugggcauccccuacugcaacuacagccgguacugcuaccugaaccacacgaccaccggccgcaccucccugcccaagugcugccucgugagcaacggguccuaccugaacgagacgcacuucagcgacgacaucgagcagcaggccgacaacaugaucaccgagaugcugcagaaggaguacauggagcggcagggcaagaccccgcuggggcucgucgaccuguucguguucuccaccagcuucuaccugaucuccaucuuccuccaccuggugaagauccccacgcaccgccacaucgucggcaagagcugccccaagccccaccggcugaaccacauggggaucugcuccugcggccucuacaagcagccgggcgugcccgugaaguggaagcgcugaggacuaguaauaaggaaacuguaugaaugucugugggcaggaagugaagagauccuucuguaaagguuuuuggaauuaugucugcugaauaauaaacuuuuuugaaauaauaaaucugguagaaaaaugagaucuaaaaaaaaaaaaaaaaaaaaaaaaaaaaaaaaaaaaaaaaaaaaaaaaaaaaaaaaaaaaaaaaaaaaaaaaaaaaaaaaaaaaaaaaaaaaaaaaaaaa

SEQ ID NO: 32671 - RNA, 1788 nt, Artificial Sequence
  mRNA product Design b-4 (A100) comprising derived and/or modified sequence from LASV(G733-SLE-2010;Clade IV)__AIT17154__GPCmut7 (opt1)
aggagagucccgcagucggcguccagcggcucugcuuguucgugugugugucguugcaggccuuauucaagcuuaccaugggccagaucgugaccuucuuccaggaggucccccacgugaucgaggaggugaugaacaucguccugaucgcccucagcauccuggccgugcugaaggggcucuacaacuucgcgaccugcggcaucguggggcuggucuccuuccugcuccugugcggccgcagcugcacgaccucccuguacaaggggguguacgagcuccagacccuggagcugaacauggagacccucaacaugacgaugccgcugagcugcaccaagaacaacucccaccacuacaucauggugggcaacgagaccggccuggagcucacccugacgaacaccagcaucaucaaccacaaguucugcaaccuguccgacgcccacaagaagaaccucuacgaccacgcccugaugagcaucaucuccaccuuccaccugagcauccccaacuucaaccaguacgaggccauguccugcgacuucaacgggggcaagaucagcguccaguacaaccucucccacagcuacgccggggacgcggccaaccacugcggcaccaucgccaacggggugcugcagacguucaugcggauggccuggggcggcuccuacaucgcgcuggacagcgggcgcgaccggugggacugcaucaugaccuccuaccaguaccucaucauccagaacaccaccugggaggaccacugccaguucagccgccccucccccaucggcuaccuggggcugcucagccagcggacgcgcgacaucuacaucagccggcgccugcugggcaccuucaccuggacccucuccgacagcgagggcaaggacacgcccgggggcuacugccugacccgguggaugcugaucgaggccgagcucaagugcuucgggaacaccgccguggccaagugcaacgagaagcacgacgaggaguucugcgacaugcugcgccuguucgacuucaacaagcaggccauccagcggcucaaggcgccggcccagauguccauccagcugaucaacaaggccgucaacgcccugaucaacgaccagcucaucaugaagaaccaccuccgcgacaucaugggcauccccuacugcaacuacagcaaguacugcuaccugaaccacaccacgaccgggaagaccucccugcccaagugcugccuggugagcaacggcuccuaccugaacgagacccacuucagcgacgacaucgagcagcaggccgacaacaugaucacggagaugcuccagaaggaguacauggagcggcagggcaagaccccgcuggggcugguggaccuguucgucuucuccaccagcuucuaccucaucuccaucuuccugcaccuggugaagauccccacccaccgccacguggucggcaagagcugccccaagccccaccggcucaaccacauggggaucugcuccugcggccuguacgggcagccgggcgugcccgugaaguggaagcgcugaggacuaguaauaaggaaacuguaugaaugucugugggcaggaagugaagagauccuucuguaaagguuuuuggaauuaugucugcugaauaauaaacuuuuuugaaauaauaaaucugguagaaaaaugagaucuaaaaaaaaaaaaaaaaaaaaaaaaaaaaaaaaaaaaaaaaaaaaaaaaaaaaaaaaaaaaaaaaaaaaaaaaaaaaaaaaaaaaaaaaaaaaaaaaaaaa

SEQ ID NO: 32672 - RNA, 1788 nt, Artificial Sequence
  mRNA product Design b-4 (A100) comprising derived and/or modified sequence from MOPV/LASV reassortant(IGS-1;Clade IV)__AFY05576__GPCmut7 (opt1)
aggagagucccgcagucggcguccagcggcucugcuuguucgugugugugucguugcaggccuuauucaagcuuaccaugggccagaucgugaccuucuuccaggaggucccccacgugaucgaggaggugaugaacaucguccugaucgcccucagcgugcuggccgugcugaaggggcucuacaacuucgcgaccugcggccuggucgggcuggugacguuccuccugcugugcggccgcuccugcaccaccagccucuacaaggggguguacgagcugcagacccuggagcucaacauggagacgcugaacaugaccaugccgcuguccugcaccaagaacaacagccaccacuacaucauggucggcaacgagaccggccucgagcugacgcugaccaacaccuccaucaucaaccacaaguucugcaaccucagcgacgcccacaagaagaaccuguacgaccacgcccugauguccaucaucagcaccuuccaccucuccauccccaacuucaaccaguacgaggccaugagcugcgacuucaacgggggcaagaucuccgugcaguacaaccugagccacuccuacgccggggacgcggccaaccacugcggcacgguggccaacgggguccugcagaccuucaugcggauggccuggggcggcagcuacaucgcgcucgacuccgggcgcggcaacugggacugcaucaugaccagcuaccaguaccugaucauccagaacaccacgugggaggaccacugccaguucucccggcccagccccaucggguaccugggccuccugucccagcgcacccgggacaucuacaucagccgccggcugcucggcaccuucaccuggacgcugagcgacuccgagggggaggacaccccgggcggguacugccugacccgcuggaugcucaucgaggccgagcugaagugcuucggcaacaccgccguggccaagugcaacgagaagcacgacgaggaguucugcgacaugcugcggcuguucgacuucaacaagcaggccauccagcgccugaaggcgcccgcccagaugagcauccagcugaucaacaaggccgugaacgcccucaucaacgaccagcugaucaugaagaaccaccuccgggacaucauggggauccccuacugcaacuacuccaaguacugcuaccucaaccacacgaccaccggccgcaccagccugcccaagugcugccuggucuccaacggcagcuaccucaacgagacgcacuucuccgacgacaucgagcagcaggccgacaacaugaucaccgagaugcugcagaaggaguacauggagcggcaggggaagaccccgcugggccugguggaccucuucguguucagcaccuccuucuaccugaucagcaucuuccugcaccucgucaagauccccacgcaccgccacaucguggggaaguccugccccaagccccaccggcugaaccacaugggcaucugcagcugcgggcuguacaagcagccgggcgugcccgucaaguggaagcgcugaggacuaguaauaaggaaacuguaugaaugucugugggcaggaagugaagagauccuucuguaaagguuuuuggaauuaugucugcugaauaauaaacuuuuuugaaauaauaaaucugguagaaaaaugagaucuaaaaaaaaaaaaaaaaaaaaaaaaaaaaaaaaaaaaaaaaaaaaaaaaaaaaaaaaaaaaaaaaaaaaaaaaaaaaaaaaaaaaaaaaaaaaaaaaaaaa

SEQ ID NO: 32673 - RNA, 1788 nt, Artificial Sequence
  mRNA product Design b-4 (A100) comprising derived and/or modified sequence from LASV(LM765-SLE-2012;Clade IV)__AIT17814__GPCmut7 (opt1)
aggagagucccgcagucggcguccagcggcucugcuuguucgugugugugucguugcaggccuuauucaagcuuaccaugggccagaucgugaccuucuuccaggaggucccccacgugaucgaggaggugaugaacaucguccugaucgcccucagcauccuggccgugcugaaggggcucuacaacuucgcgaccugcggccugguggggcuggucacguuccuccugcugugcggccgcuccugcaccaccagccucuacaaggggguguacgagcugcagacccuggagcucaacauggagacgcugaacaugaccaugccgcuguccugcaccaagaacaacagccaccacuacaucauggugggcaacgagaccggccucgagcugacgcugaccaacaccuccaucaucgaccacaaguucugcaaccucagcgacgcccaccggaagaaccuguacgaccacgcccugauguccaucaucagcaccuuccaccucuccauccccaacuucaaccaguacgaggccaugagcugcgacuucaacgggggcaagaucuccguccaguacaaccugagccacuccuacgccaaggacgcggccgaccacugcgggacgguggccaacggcgugcugcagaccuucaugcgcauggccuggggcgggagcuacaucgcgcucgacuccggccgggggcgcugggacugcaucaugaccagcuaccaguaccugaucauccagaacaccacgugggaggaccacugccaguucucccggcccagccccaucggcuaccuggggcuccugucccagcgcacccgggacaucuacaucagccgccggcugcucggcaccuucaccuggacgcugagcgacuccgagggcaaggacacccccgggggcuacugccugacccgcuggaugcucaucgaggccgagcugaagugcuucgggaacaccgccgucgccaagugcaacgagaagcacgacgaggaguucugcgacaugcugcggcuguucgacuucaacaagcaggccauccagcgccugaaggcgccggcccagaugagcauccagcugaucaacaaggccgugaacgcccucaucaacgaccagcugaucaugaagaaccaccuccgggacaucaugggcauccccuacugcaacuacuccaaguacugcuaccucaaccacacgaccaccgggaagaccagccugcccaagugcugccugguguccaacggcagcuaccucaacgagacgcacuucuccgacgacaucgagcagcaggccgacaacaugaucaccgagaugcugcagaaggaguacauggagcgccagggcaagaccccgcuggggcuggucgaccucuucguguucagcaccuccuucuaccugaucagcaucuuccugcaccucgugaagauccccacgcaccggcacaucgucggcaagcccugccccaagccgcaccgccugaaccacauggggaucugcuccugcggccuguacaagcagcccggggugcccgugaaguggaagcggugaggacuaguaauaaggaaacuguaugaaugucugugggcaggaagugaagagauccuucuguaaagguuuuuggaauuaugucugcugaauaauaaacuuuuuugaaauaauaaaucugguagaaaaaugagaucuaaaaaaaaaaaaaaaaaaaaaaaaaaaaaaaaaaaaaaaaaaaaaaaaaaaaaaaaaaaaaaaaaaaaaaaaaaaaaaaaaaaaaaaaaaaaaaaaaaaa

SEQ ID NO: 32674 - RNA, 1788 nt, Artificial Sequence
  mRNA product Design b-4 (A100) comprising derived and/or modified sequence from LASV(LM776-SLE-2012;Clade IV)__AIT17824__GPCmut7 (opt1)
aggagagucccgcagucggcguccagcggcucugcuuguucgugugugugucguugcaggccuuauucaagcuuaccaugggccagaucgugaccuucuuccaggaggucccccacgugaucgaggaggugaugaacaucguccugaucgcccucagcauccuggccgugcugaaggggcucuacaacuucgcgaccugcggccugguggggcuggucacguuccuccugcugugcggccgcuccugcaccaccagcguguacaaggggguguacgagcuccagacccuggagcugaacauggagacgcucaacaugaccaugccgcuguccugcaccaagaacaacagccaccacuacaucauggucggcaacgagaccggccuggagcucacgcugaccaacaccuccaucaucaaccacaaguucugcaaccugagcgacgcccacaagaagaaccucuacgaccacgcccugauguccaucaucagcaccuuccaccuguccauccccaacuucaaccaguacgaggccaugagcugcgacuucaacgggggcaagaucuccgugcaguacaaccucagccacuccuacgccggggacgcggccaaccacugcggcacgguggccaacgggguccugcagaccuucaugcggauggccuggggcggcagcuacaucgcgcuggacuccgggcacggcaagugggacugcaucaugaccagcuaccaguaccucaucauccagaacaccacgugggaggaccacugccaguucucccgccccagccccaucggguaccugggccugcucucccagcggacccgcgacaucuacaucagccggcgccugcugggcaccuucaccuggacgcucagcgacuccgaggggaaggacaccccgggcggguacugccugacccgguggaugcugaucgaggccgagcucaagugcuucggcaacaccgccguggccaagugcaacgagaagcacgacgaggaguucugcgacaugcugcgccuguucgacuucaacaagcaggccauccagcggcucaaggcgcccgcccagaugagcauccagcugaucaacaaggccgugaacgcccugaucaacgaccagcucaucaugaagaaccaccuccgcgacaucauggggauccccuacugcaacuacuccaaguacugcuaccugaaccacacgaccaccggcaagaccagccugcccaagugcugccuggucuccaacggcagcuaccugaacgagacgcacuucuccgacgacaucgagcagcaggccgacaacaugaucaccgagaugcuccagaaggaguacauggagcggcaggggaagaccccgcugggccugguggaccuguucguguucagcaccuccuucuaccucaucagcaucuuccugcaccuggucaagauccccacgcaccgccacaucguggggaaguccugccccaagccccaccggcucaaccacaugggcaucugcagcugcgggcuguacaagcagccgggcgugcccguccgcuggaagcggugaggacuaguaauaaggaaacuguaugaaugucugugggcaggaagugaagagauccuucuguaaagguuuuuggaauuaugucugcugaauaauaaacuuuuuugaaauaauaaaucugguagaaaaaugagaucuaaaaaaaaaaaaaaaaaaaaaaaaaaaaaaaaaaaaaaaaaaaaaaaaaaaaaaaaaaaaaaaaaaaaaaaaaaaaaaaaaaaaaaaaaaaaaaaaaaaa

SEQ ID NO: 32675 - RNA, 1788 nt, Artificial Sequence
  mRNA product Design b-4 (A100) comprising derived and/or modified sequence from LASV(Mad39;Clade IV)__ANH09722__GPCmut7 (opt1)
aggagagucccgcagucggcguccagcggcucugcuuguucgugugugugucguugcaggccuuauucaagcuuaccaugggccagaucgugaccuucuuccaggaggucccccacgugaucgaggaggugaugaacaucguccugaucgcccucagcauccuggccgugcugaaggggcucuacaacguggcgaccugcggccugaucgggcuggucacguuccuccugcugugcggccgcuccugcaccaccacccucuacaaggggguguacgagcugcaggcccuggagcucaacauggagacgcugaacaugaccaugccgcugagcugcaccaagaacaacucccaccacuacauccgggugggcaacgagaccggccucgagcugacgcugaccaacaccagccucaucaaccacaaguucugcaaccuguccgacgcccacaagaagaaccuguacgaccacgcccucaugagcaucaucuccaccuuccaccugagcauccccaacuucaaccaguacgaggccauguccugcgacuucaacgacgggaagaucagcguccaguacaaccugucccacacguacgcgggcgacaccgccaaccacugcgggaccguggccaacggcgugcuccagaccuucaugcgcauggccuggggcgggagcuacaucgcgcuggacuccggccgcgggggcugggacugcaucaugacgagcuaccaguaccugaucauccagaacaccaccugggaggaccacugccaguucucccggcccagccccaucggguaccucggccugcugucccagcggacccgcgacaucuacaucagccggcgccuccugggcacguucaccuggacccuguccgacagcgaggggaaggacaccccgggcggguacugccucacgcgguggaugcugaucgaggccgagcugaagugcuucggcaacaccgccgucgccaagugcaacgagaagcacgacgaggaguucugcgacaugcuccgccuguucgacuucaacaagcaggccauccagcggcugaaggcgcccgcccagaugagcauccagcucaucaacaaggccgugaacgcccugaucaacgaccagcugaucaugaagaaccaccuccgcgacaucauggggauccccuacugcaacuacuccaaguacugcuaccugaaccacaccgugaccggcaagacgagccugcccaagugcugccucgucuccaacggcagcuaccugaacgagacccacuucuccgacgacaucgagcagcaggccgacaacaugaucaccgagaugcugcagaaggaguacauggagcggcaggggaagaccccgcugggccucguggaccuguucguguucagcacguccuucuaccugaucagcaucuuccuccaccuggucaagauccccacccaccgccacgugguggggaagcccugccccaagccgcaccggcugaaccacaugggcaucugcuccugcggguucuacaagcagcccggcguccccgugcgcuggaagcggugaggacuaguaauaaggaaacuguaugaaugucugugggcaggaagugaagagauccuucuguaaagguuuuuggaauuaugucugcugaauaauaaacuuuuuugaaauaauaaaucugguagaaaaaugagaucuaaaaaaaaaaaaaaaaaaaaaaaaaaaaaaaaaaaaaaaaaaaaaaaaaaaaaaaaaaaaaaaaaaaaaaaaaaaaaaaaaaaaaaaaaaaaaaaaaaaa

SEQ ID NO: 32676 - RNA, 1788 nt, Artificial Sequence
  mRNA product Design b-4 (A100) comprising derived and/or modified sequence from LASV(Z0947-SLE-2011;Clade IV)__AIT17840__GPCmut7 (opt1)
aggagagucccgcagucggcguccagcggcucugcuuguucgugugugugucguugcaggccuuauucaagcuuaccaugggccagaucgugaccuucuuccaggaggucccccacgugaucgaggaggugaugaacaucguccugaucgcccucagcauccuggccgugcugaaggggcucuacaacuucgcgaccugcggccugguggggcuggucacguuccuccugcugugcggccgcuccugcaccaucagccucuacaaggggguguacgagcugcagacccuggagcucaacauggagacccugaacaugacgaugccgcuguccugcaccaagaacaacagccaccacuacaucauggugggcaacgagaccggccucgagcugacccugacgaacaccuccaucaucaaccacaaguucugcaaccucagcgacgcccacaagaagaaccuguacgaccacgcccugauguccaucaucagcaccuuccaccucuccauccccaacuucaaccaguacgaggccaugagcugcgacuucaacgggggcaagaucuccguccaguacaaccugagccacuccuacgccggggacgcggccaaccacugcggcaccguggccaacggggugcugcagacguucaugcggauggccuggggcggcagcuacaucgcgcucgacuccgggcgcgaccggugggacugcaucaugaccagcuaccaguaccugaucauccagaacaccaccugggaggaccacugccaguucucccgccccagccccaucggcuaccuggggcuccugucccagcggacgcgcgacaucuacaucagccggcgccugcucggcaccuucaccuggacccugagcgacuccgagggcaaggacacgcccgggggcuacugccugacccgguggaugcucaucgaggccgagcugaagugcuucgggaacaccgccgucgccaagugcaacgagaagcacgacgaggaguucugcgacaugcugcgccucuucgacuucaacaagcaggccauccagcggcugaaggcgccggcccagaugagcauccagcugaucaacaaggccgugaacgcccucaucaacgaccagcugaucaugaagaaccaccuccgcgacaucaugggcauccccuacugcaacuacuccaaguacugcuaccugaaccacaccacgaccgggaagaccagccugcccaagugcugccugguguccaacggcagcuaccucaacgagacccacuucuccgacgacaucgagcagcaggccgacaacaugaucacggagaugcugcagaaggaguacauggagcggcagggcaagaccccgcuggggcuggucgaccucuucguguucagcaccuccuucuaccugaucagcaucuuccugcaccucgugaagauccccacccaccgccacaucgucggcaagcccugccccaagccgcaccggcugaaccacauggggaucugcuccugcggccuguacaagcagcccggggugcccgugaaguggaagcgcugaggacuaguaauaaggaaacuguaugaaugucugugggcaggaagugaagagauccuucuguaaagguuuuuggaauuaugucugcugaauaauaaacuuuuuugaaauaauaaaucugguagaaaaaugagaucuaaaaaaaaaaaaaaaaaaaaaaaaaaaaaaaaaaaaaaaaaaaaaaaaaaaaaaaaaaaaaaaaaaaaaaaaaaaaaaaaaaaaaaaaaaaaaaaaaaaa

SEQ ID NO: 32677 - RNA, 1788 nt, Artificial Sequence
  mRNA product Design b-4 (A100) comprising derived and/or modified sequence from LASV(Josiah;Clade IV)__NP_694870__GPCmut7 (opt4)
aggagagucccgcagucggcguccagcggcucugcuuguucgugugugugucguugcaggccuuauucaagcuuaccaugggccagaucgugaccuucuuccaggaggugccccacgugaucgaggaggugaugaacaucgugcugaucgcccugagcgugcuggccgugcugaagggccuguacaacuucgccaccugcggccuggugggccuggugaccuuccugcugcugugcggcagaagcugcaccaccagccuguacaagggcguguacgagcugcagacccuggagcugaacauggagacccugaacaugaccaugccccugagcugcaccaagaacaacagccaccacuacaucauggugggcaacgagaccggccuggagcugacccugaccaacaccagcaucaucaaccacaaguucugcaaccugagcgacgcccacaagaagaaccuguacgaccacgcccugaugagcaucaucagcaccuuccaccugagcauccccaacuucaaccaguacgaggccaugagcugcgacuucaacggcggcaagaucagcgugcaguacaaccugagccacagcuacgccggcgacgccgccaaccacugcggcaccguggccaacggcgugcugcagaccuucaugagaauggccuggggcggcagcuacaucgcccuggacagcggcagaggcaacugggacugcaucaugaccagcuaccaguaccugaucauccagaacaccaccugggaggaccacugccaguucagcagacccagccccaucggcuaccugggccugcugagccagagaaccagagacaucuacaucagcagaagacugcugggcaccuucaccuggacccugagcgacagcgagggcaaggacacccccggcggcuacugccugaccagauggaugcugaucgaggccgagcugaagugcuucggcaacaccgccguggccaagugcaacgagaagcacgacgaggaguucugcgacaugcugagacuguucgacuucaacaagcaggccauccagagacugaaggcccccgcccagaugagcauccagcugaucaacaaggccgugaacgcccugaucaacgaccagcugaucaugaagaaccaccugagagacaucaugggcauccccuacugcaacuacagcaaguacugcuaccugaaccacaccaccaccggcagaaccagccugcccaagugcugccuggugagcaacggcagcuaccugaacgagacccacuucagcgacgacaucgagcagcaggccgacaacaugaucaccgagaugcugcagaaggaguacauggagagacagggcaagaccccccugggccugguggaccuguucguguucagcaccagcuucuaccugaucagcaucuuccugcaccuggugaagauccccacccacagacacaucgugggcaagagcugccccaagccccacagacugaaccacaugggcaucugcagcugcggccuguacaagcagcccggcgugcccgugaaguggaagagaugaggacuaguaauaaggaaacuguaugaaugucugugggcaggaagugaagagauccuucuguaaagguuuuuggaauuaugucugcugaauaauaaacuuuuuugaaauaauaaaucugguagaaaaaugagaucuaaaaaaaaaaaaaaaaaaaaaaaaaaaaaaaaaaaaaaaaaaaaaaaaaaaaaaaaaaaaaaaaaaaaaaaaaaaaaaaaaaaaaaaaaaaaaaaaaaaa

SEQ ID NO: 32678 - RNA, 1785 nt, Artificial Sequence
  mRNA product Design b-4 (A100) comprising derived and/or modified sequence from LASV(LP;Clade I)__AAF86701__GPCmut7 (opt4)
aggagagucccgcagucggcguccagcggcucugcuuguucgugugugugucguugcaggccuuauucaagcuuaccaugggccagaucaucaccuucuuccaggaggugccccacgugaucgaggaggugaugaacaucgugcugaucgcccugagccugcuggccauccugaagggccuguacaacaucgccaccugcggcaucaucggccugguggccuuccuguuccugugcggcaagagcugcagccugacccugaagggcggcuacgagcugcagacccuggagcugaacauggagacccugaacaugaccaugccccugagcugcaccaagaacagcagccaccacuacaucagagugggcaacgagaccggccuggagcugacccugaccaacaccagcaucaucaaccacaaguucugcaaccugagcgacgcccacaagaagaaccuguacgaccacgcccugaugagcaucaucagcaccuuccaccugagcauccccaacuucaaccaguacgaggccaugagcugcgacuucaacggcggcaagaucagcgugcaguacaaccugagccacagcuacgccggcgacgccgccgagcacugcggcaccguggccaacggcgugcugcagaccuucaugagaauggccuggggcggcagauacaucgcccuggacagcggcaagggcaacugggacugcaucaugaccagcuaccaguaccugaucauccagaacaccaccugggaggaccacugccaguucagcagacccagccccaucggcuaccugggccugcugagccagagaaccagagacaucuacaucagcagaagacugcugggcaccuucaccuggacccugagcgacagcgagggcaacgagacccccggcggcuacugccugaccagauggaugcugaucgaggccgagcugaagugcuucggcaacaccgccguggccaagugcaacgagaagcacgacgaggaguucugcgacaugcugagacuguucgacuucaacaagcaggccaucagaagacugaaggcccccgcccagaugagcauccagcugaucaacaaggccgugaacgcccugaucaacgaccagcugaucaugaagaaccaccugagagacaucaugggcauccccuacugcaacuacagcaaguacugcuaccugaaccacaccagcagcggcagaaccagccugcccaagugcugccugaucagcaacggcagcuaccugaacgagacccaguucagcgacgacaucgagcagcaggccgacaacaugaucaccgagaugcugcagaaggaguacaucgagagacagggcaagaccccccugggccugguggacaucuucaucuucagcaccagcuucuaccugaucagcaucuuccugcaccugaucaagauccccacccacagacacaucgugggcaagcccugccccaagccccacagacugaaccacaugggcgugugcagcugcggccuguacaagcaccccggcgugcccaccaaguggaagagaugaggacuaguaauaaggaaacuguaugaaugucugugggcaggaagugaagagauccuucuguaaagguuuuuggaauuaugucugcugaauaauaaacuuuuuugaaauaauaaaucugguagaaaaaugagaucuaaaaaaaaaaaaaaaaaaaaaaaaaaaaaaaaaaaaaaaaaaaaaaaaaaaaaaaaaaaaaaaaaaaaaaaaaaaaaaaaaaaaaaaaaaaaaaaaaaaa

SEQ ID NO: 32679 - RNA, 1785 nt, Artificial Sequence
  mRNA product Design b-4 (A100) comprising derived and/or modified sequence from LASV(803213;Clade II)__AAF86703__GPCmut7 (opt4)
aggagagucccgcagucggcguccagcggcucugcuuguucgugugugugucguugcaggccuuauucaagcuuaccaugggccagaucaucaccuucuuccaggaggugccccacgugaucgaggaggugaugaacaucgugcugaucgcccugagccugcuggccauccugaagggcaucuacaacguggccaccugcggccuguucggccugaucagcuuccugcugcugugcggcagaagcugcagcgugaccuacaagggcguguacgagcugcagacccuggagcugaacauggccaaccugaacaugaccaugccccugagcugcaccaagaacaacagccaccacuacaucauggugggcaacgagaccggccuggagcugacccugaccaacaccagcaucaucaaccacaaguucugcaaccugagcgacgcccacaagaagaaccuguacgaccacgcccugaugagcaucaucagcaccuuccaccugagcauccccaacuucaaccaguacgaggccaugagcugcgacuucaacggcggcaagaucagcgugcaguacaaccugagccacagcuucgccguggacgccgccaaccacugcggcaccaucgccaacggcgugcugcagaccuucaugagaauggccuggggcggcagcuacaucgcccuggacagcggcaagggcaacugggacugcaucaugaccagcuaccaguaccugaucauccagaacaccaccugggaggaccacugccaguucagcagacccagccccaucggcuaccugggccugcugagccagagaaccagagacaucuacaucagcagaagacugcugggcaccuucaccuggacccugagcgacagcgagggcaacgaggcccccggcggcuacugccugaccagauggaugcugaucgaggccgagcugaagugcuucggcaacaccgccguggccaagugcaacgagaagcacgacgaggaguucugcgacaugcugagacuguucgacuucaacaagcaggccaucaagagacugaagacccccgcccagaugagcauccagcugaucaacaaggccgugaacgcccugaucaacgaccagcugaucaugaagaaccaccugagagacaucaugggcauccccuacugcaacuacagcagauacugcuaccugaaccacaccgugaccggcaagaccagccugcccagaugcugccuggugagcaacggcagcuaccugaacgagacccacuucagcgacgacaucgagcagcaggccgacaacaugaucaccgagaugcugcagaaggaguacauggacagacagggcaagaccccccugggccugguggaccuguucguguucagcaccagcuucuaccugaucagcaucuuccugcaccuggugaagauccccacccacagacacaucgugggcaagcccugccccaagccccacagacugaaccacaugggcaucugcagcugcggccuguacaagcaccccggcgugcccgugaaguggaagagaugaggacuaguaauaaggaaacuguaugaaugucugugggcaggaagugaagagauccuucuguaaagguuuuuggaauuaugucugcugaauaauaaacuuuuuugaaauaauaaaucugguagaaaaaugagaucuaaaaaaaaaaaaaaaaaaaaaaaaaaaaaaaaaaaaaaaaaaaaaaaaaaaaaaaaaaaaaaaaaaaaaaaaaaaaaaaaaaaaaaaaaaaaaaaaaaaa

SEQ ID NO: 32680 - RNA, 1785 nt, Artificial Sequence
  mRNA product Design b-4 (A100) comprising derived and/or modified sequence from LASV(GA391;Clade III)__CAA36645__GPCmut7 (opt4)
aggagagucccgcagucggcguccagcggcucugcuuguucgugugugugucguugcaggccuuauucaagcuuaccaugggccagaucgugaccuucuuccaggaggugccccacgugaucgaggaggugaugaacaucgugcugaucgcccugagcauccuggccauccugaagggccuguacaacguggccaccugcggccugaucggccuggugaccuuccugcugcugagcggcagaagcugcagccugaucuacaagggcaccuacgagcugcagacccuggagcugaacauggagacccugaacaugaccaugccccugagcugcaccaagaacaacagccaccacuacaucagagugggcaacgagaccggccuggagcugacccugaccaacaccagcauccugaaccacaaguucugcaaccugagcgacgcccacaagagaaaccuguacgaccacagccugaugagcaucaucagcaccuuccaccugagcauccccaacuucaaccaguacgaggccaugagcugcgacuucaacggcggcaagaucaccgugcaguacaaccugagccacagcuucgccguggacgccgccggccacugcggcacccuggccaacggcgugcugcagaccuucaugagaauggccuggggcggcagcuacaucgcccuggacagcggcagaggcaacugggacugcaucaugaccagcuaccaguaccugaucauccagaacaccaccugggacgaccacugccaguucagcagacccagccccaucggcuaccugggccugcugagccagagaaccagagacaucuacaucagcagaagacugcugggcaccuucaccuggacccugagcgacagcgagggcaacgagacccccggcggcuacugccugaccagauggaugcugaucgaggccgagcugaagugcuucggcaacaccgccguggccaagugcaacgagaagcacgacgaggaguucugcgacaugcugagacuguucgacuucaacaagcaggccaucagaagacugaagacccccgcccagaugagcauccagcugaucaacaaggccgugaacgcccugaucaacgaccagcugaucaugaagaaccaccugagagacaucaugggcauccccuacugcaacuacagcagauacugcuaccugaaccacaccagcaccggcaagaccagccugcccagaugcugccugaucagcaacggcagcuaccugaacgagaccaaguucagcgacgacaucgagcagcaggccgacaacaugaucaccgagaugcugcagaaggaguacaucgacagacagggcaagaccccccugggccugguggaccuguucguguucagcaccagcuucuaccugaucagcaucuuccugcaccuggugaagauccccacccacagacacaucgugggcaagcccugccccaagccccacagacugaaccacaugggcaucugcagcugcggccuguacaagcagcccggcgugcccgugagauggaagagaugaggacuaguaauaaggaaacuguaugaaugucugugggcaggaagugaagagauccuucuguaaagguuuuuggaauuaugucugcugaauaauaaacuuuuuugaaauaauaaaucugguagaaaaaugagaucuaaaaaaaaaaaaaaaaaaaaaaaaaaaaaaaaaaaaaaaaaaaaaaaaaaaaaaaaaaaaaaaaaaaaaaaaaaaaaaaaaaaaaaaaaaaaaaaaaaaa

SEQ ID NO: 32681 - RNA, 1788 nt, Artificial Sequence
  mRNA product Design b-4 (A100) comprising derived and/or modified sequence from LASV(AV;Clade V)__CCA30314__GPCmut7 (opt4)
aggagagucccgcagucggcguccagcggcucugcuuguucgugugugugucguugcaggccuuauucaagcuuaccaugggccagaucgugaccuucuuccaggaggugccccacgugaucgaggaggugaugaacaucgugcugaucgcccugagcauccuggccgugcugaagggccuguacaacaucgccaccugcggccugaucggccugaucaccuuccugcugcugugcggcagaagcugcagcagcaaccuguacaagggcguguacgagcugcagagccuggaccugaacauggagacccugaacaugaccaugccccugagcugcaccaagaacaacagccaccacuacaucagagugggcaacgacaccggccuggagcugacccugaccaacaccagcauccugaaccacaaguucugcaaccugagcgacgcccacaagaaggaccuguacgaccacgcccugaugagcaucaucagcaccuuccaccugagcauccccaacuucaaccaguacgaggccaugagcugcgacuucaacggcggcaagaucagcgugcaguacaaccugagccacagcuacgccaucgacgccgccaaccacugcggcaccguggccaacggcauccugcagaccuucaugagaauggccuggggcggcagcuacaucgcccuggacagcggcagaggcaacugggacugcaucaugaccagcuaccaguaccugaucauccagaacaccaccugggagaaccacugccaguucagcagacccagccccaucggcuaccugggccugcugagccagagaaccagagacaucuacaucagcagaagacugcugggcaccuucaccuggacccugagcgacagcgagggcaacgccacccccggcggcuacugccugaccagauggaugcugaucgaggccgagcugaagugcuucggcaacaccgccguggccaagugcaacgagaagcacgacgaggaguucugcgacaugcugagacuguucgacuucaacaagcaggccaucagcagacugaagagccccgcccagaugagcauccagcugaucaacaaggccgugaacgcccugaucaacgaccagcugaucaugaagaaccaccugagagacaucaugggcauccccuacugcaacuacagcaaguacugcuaccugaaccacaccaucaccggcaagaccagccugcccaagugcugccuggugagcaacggcagcuaccugaacgagacccacuucagcgacgacaucgagcagcaggccgacaacaugaucaccgagaugcugcagaaggaguacauggagagacagggcaagaccccccugggccugguggaccuguucguguucagcaccagcuucuaccugaucagcaucuuccugagacuggugaagauccccacccacagacacaucgugggcaagcccugccccaagccccacagacugaaccacaugggcaucugcagcugcggccuguacaagcagcccggcgugcccgugagauggaagagaugaggacuaguaauaaggaaacuguaugaaugucugugggcaggaagugaagagauccuucuguaaagguuuuuggaauuaugucugcugaauaauaaacuuuuuugaaauaauaaaucugguagaaaaaugagaucuaaaaaaaaaaaaaaaaaaaaaaaaaaaaaaaaaaaaaaaaaaaaaaaaaaaaaaaaaaaaaaaaaaaaaaaaaaaaaaaaaaaaaaaaaaaaaaaaaaaa

SEQ ID NO: 32682 - RNA, 1785 nt, Artificial Sequence
  mRNA product Design b-4 (A100) comprising derived and/or modified sequence from LASV(Togo/2016/7082;Clade VI)__AMR44577__GPCmut7 (opt4)
aggagagucccgcagucggcguccagcggcucugcuuguucgugugugugucguugcaggccuuauucaagcuuaccaugggccagaucaucaccuucuuccaggaggugccccacgugaucgaggaggugaugaacaucgugcugaucgcccugagccugcuggccauccugaagggcguguacaacguggccaccugcggcaucaucggccuggugaccuuccuguuccugugcggcagaagcugcagccugaucuacaagggcagcuacgagcugcagacccuggagcugaacauggagacccugaacaugaccaugccccugagcugcaccaagaacagcagccaccacuacaucagagugggcaacgagaccggccuggagcugacccugaccaacaccagcaucaucaaccacaaguucugcaaccugagcgacgcccacaagagaaaccuguacgaccacgcccugaugagcauccugagcaccuuccaccugagcauccccaacuucaaccaguacgaggccaugagcugcgacuucaacggcggcaagaucagcgugcaguacaaccugagccacgccuacgccguggacgccgccgagcacugcggcaccguggccaacggcgugcugcagaccuucaugagaauggccuggggcggcagcuacaucgcccuggacagcggcagaggcaacugggacugcaucaugaccagcuaccaguaccugaucauccagaacaccaccugggaggaccacugccaguucagcagacccagccccaucggcuaccugggccugcugagccagagaaccagagacaucuacaucagcagaagacugcugggcaccuucaccuggacccugagcgacagcgagggcaacgagacccccggcggcuacugccugaccagauggaugcugaucgaggccgagcugaagugcuucggcaacaccgccguggccaagugcaacgagaagcacgacgaggaguucugcgacaugcugagacuguucgacuucaacaagcaggccauccagagacugaagagccccgcccagaugagcauccagcugaucaacaaggccgugaacgcccugaucaacgaccagcugaucaugaagaaccaccugagagacaugaugggcauccccuacugcaacuacagcaaguacugcuaccugaaccacaccagcagcggcagaaccagccugcccaagugcugccuggugagcaacggcagcuaccugaacgagacccacuucagcgacgacaucgagcagcaggccgacaacaugaucaccgagaugcugcagaaggaguacaucgacagacagggcaagaccccccugggccugguggaccuguucguguucagcaccagcuucuaccugaucagcaucuuccugcaccugaucaagauccccacccacagacacaucgugggcaagcccugccccaagccccacagacugaaccacaugggcaucugcagcugcggccuguacaagcagcccggcgugcccaccagauggaagagaugaggacuaguaauaaggaaacuguaugaaugucugugggcaggaagugaagagauccuucuguaaagguuuuuggaauuaugucugcugaauaauaaacuuuuuugaaauaauaaaucugguagaaaaaugagaucuaaaaaaaaaaaaaaaaaaaaaaaaaaaaaaaaaaaaaaaaaaaaaaaaaaaaaaaaaaaaaaaaaaaaaaaaaaaaaaaaaaaaaaaaaaaaaaaaaaaa

SEQ ID NO: 32683 - RNA, 1785 nt, Artificial Sequence
  mRNA product Design b-4 (A100) comprising derived and/or modified sequence from LASV(KAK-428;Clade n.d. (VII))__ANH09740__GPCmut7 (opt4)
aggagagucccgcagucggcguccagcggcucugcuuguucgugugugugucguugcaggccuuauucaagcuuaccaugggccagaucgugaccuucuuccaggaggugccccacgugaucgaggaggugaugaacaucgugcugaucgcccugagccugcuggccauccugaagggccuguacaacuucgccaccugcggcgugaucggccugaucaccuuccugcugcugugcggcagaagcugcagcgccaccuacaagggccaguacgagcugcagacccuggagcugaacauggagagccugaacaugaccaugccccugagcugcaccaagaacaacagccaccacuacaucagagccggcaacaacaccggccuggagcugacccugaccaacaccagcaucaucagccacaaguucugcaaccugagcgacgcccacaagaagaaccuguacgaccacacccugaugagcaucaucaccaccuuccaccugagcauccccaacuucaaccaguacgaggccaugagcugcgacuucaacggcggcaagaucagcauccaguacaaccugagccacagcuacgccggcgacgccgcccagcacugcggcaccguggccaacggcgugcugcagaccuucaugagaauggccuggggcggcagcuaccuggcccuggacagcggcagaagaggcugggacugcaucaucagcagcuaccaguaccugaucauccagaacaccaccugggacgaccacugccaguucagcagacccagccccaucggcuaccugggcuucgugagccagaagaccagagacaucuacaucagcagaagacugcugggcaccuucaccuggacccugagcgacagcgagggccacgacaugcccggcggcuacugccugaccagauggaugcugaucgaggccgaccugaagugcuucggcaacaccgccguggccaagugcaacgagaagcacgacgaggaguucugcgacauguggagacuguucgacuucaacaagcaggccauccagagacugaaggcccccgcccagaugaacauccagcugaucaacaaggccgugaacgcccugaucaacgaccagcugaugaugaagaaccaccugagagacaucaugggcauccccuacugcaacuacagcaaguucugcuaccugaacaacaccaccaccggcagaaccagccugcccagaugcugccugaucagcaacggcagcuaccugaacgagacccacuucagcgacgacaucgagcagcaggccgacaacaugaucaccgagaugcugcagaaggaguacauggacagacagggcaagaccccccugggccugguggaccuguucguguucagcaccagcuucuaccugaucaccaucuuccugcaccuggugaagauccccacccacagacacaucgugggcaagcccugccccaagccccacagacugaaccacaugggcaucugcagcugcggccuguacaagcagcccggcgugcccgugagauggaagagaugaggacuaguaauaaggaaacuguaugaaugucugugggcaggaagugaagagauccuucuguaaagguuuuuggaauuaugucugcugaauaauaaacuuuuuugaaauaauaaaucugguagaaaaaugagaucuaaaaaaaaaaaaaaaaaaaaaaaaaaaaaaaaaaaaaaaaaaaaaaaaaaaaaaaaaaaaaaaaaaaaaaaaaaaaaaaaaaaaaaaaaaaaaaaaaaaa

SEQ ID NO: 32684 - RNA, 1785 nt, Artificial Sequence; identical to SEQ ID NO: 32678
  mRNA product Design b-4 (A100) comprising derived and/or modified sequence from LASV(Pinneo-NIG-1969;Clade I)__AIT17836__GPCmut7 (opt4)

SEQ ID NO: 32685 - RNA, 1785 nt, Artificial Sequence
  mRNA product Design b-4 (A100) comprising derived and/or modified sequence from LASV(ISTH0009-NIG-2011;Clade II)__AIT17404__GPCmut7 (opt4)
aggagagucccgcagucggcguccagcggcucugcuuguucgugugugugucguugcaggccuuauucaagcuuaccaugggccagaucaucaccuucuuccaggaggugccccacgugaucgaggaggugaugaacaucgugcugaucgcccugagccugcuggccauccugaagggcaucuacaacguggccaccugcggccuguucggccuggugagcuuccugcugcugugcggcagaagcugcagcaccaccuacaagggcguguacgagcugcagacccuggagcuggacauggccagccugaacaugaccaugccccugagcugcaccaagaacaacagccaccacuacaucauggugggcaacgagaccggccuggagcugacccugaccaacaccagcaucaucaaccacaaguucugcaaccugagcgacgcccacaagaagaaccuguacgaccacgcccugaugagcaucaucagcaccuuccaccugagcauccccaacuucaaccaguacgaggccaugagcugcgacuucaacggcggcaagaucagcgugcaguacaaccugagccacgccuacgccguggacgccgccaaccacugcggcaccaucgccaacggcgugcugcagaccuucaugagaauggccuggggcggcagcuacaucgcccuggacagcggcaagggcagcugggacugcaucaugaccagcuaccaguaccugaucauccagaacaccaccugggaggaccacugccaguucagcagacccagccccaucggcuaccugggccugcugagccagagaaccagagacaucuacaucagcagaagacugcugggcaccuucaccuggacccugagcgacagcgagggcaacgagacccccggcggcuacugccugaccagauggaugcugaucgaggccgagcugaagugcuucggcaacaccgccguggccaagugcaacgagaagcacgacgaggaguucugcgacaugcugagacuguucgacuucaacaagcaggccaucagaagacugaagacccccgcccagaugagcauccagcugaucaacaaggccgugaacgcccugaucaacgaccagcugaucaugaagaaccaccugagagacaucaugggcauccccuacugcaacuacagcaaguacugcuaccugaaccacaccgugaccggcaagaccagccugcccagaugcugccuggugagcaacggcagcuaccugaacgagacccacuucagcgacgacaucgagcagcaggccgacaacaugaucaccgagcugcugcagaaggaguacauggacagacagggcaagaccccccugggccugguggaccuguucguguucagcaccagcuucuaccugaucagcaucuuccugcaccugaucaagauccccacccacagacacaucaccggcaagcccugccccaagccccacagacugaaccacaugggcaucugcagcugcggccuguacaagcaccccggcgugcccgugaaguggaagagaugaggacuaguaauaaggaaacuguaugaaugucugugggcaggaagugaagagauccuucuguaaagguuuuuggaauuaugucugcugaauaauaaacuuuuuugaaauaauaaaucugguagaaaaaugagaucuaaaaaaaaaaaaaaaaaaaaaaaaaaaaaaaaaaaaaaaaaaaaaaaaaaaaaaaaaaaaaaaaaaaaaaaaaaaaaaaaaaaaaaaaaaaaaaaaaaaa

SEQ ID NO: 32686 - RNA, 1785 nt, Artificial Sequence
  mRNA product Design b-4 (A100) comprising derived and/or modified sequence from LASV(ISTH2010-NIG-2012;Clade II)__AIT17482__GPCmut7 (opt4)
aggagagucccgcagucggcguccagcggcucugcuuguucgugugugugucguugcaggccuuauucaagcuuaccaugggccagaucaucaccuucuuccaggaggugccccacgugaucgaggaggugaugaacaucgugcugaucgcccugagccugcuggccauccugaagggcaucuacaacguggccaccugcggccuguucggccuggugagcuuccugcugcugugcggcagaagcugcagcaccaccuacaagggcguguacgagcugcagacccuggagcuggacauggccagccugaacaugaccaugccccugagcugcaccaagaacaacagccaccacuacaucauggugggcaacgagaccggccuggagcugacccugaccaacaccagcaucaucaaccacaaguucugcaaccugagcgacgcccacaagaagaaccuguacgaccacgcccugaugagcaucaucagcaccuuccaccugagcauccccaacuucaaccaguacgaggccaugagcugcgacuucaacggcggcaagaucagcgugcaguacaaccugagccacgccuacgccguggacgccgccaaccacugcggcaccaucgccaacggcgugcugcagaccuucaugagaauggccuggggcggcagcuacaucgcccuggacagcggcaagggcagcugggacugcaucaugaccagcuaccaguaccugaucauccagaacaucaccugggaggaccacugccaguucagcagacccagccccaucggcuaccugggccugcugagccagagaaccagagacaucuacaucagcagaagacugcugggcaccuucaccuggacccugagcgacagcgagggcaacgagacccccggcggcuacugccugaccagauggaugcugaucgaggccgagcugaagugcuucggcaacaccgccguggccaagugcaacgagaagcacgacgaggaguucugcgacaugcugagacuguucgacuucaacaagcaggccaucagaagacugaagacccccgcccagaugagcauccagcugaucaacaaggccgugaacgcccugaucaacgaccagcugaucaugaagaaccaccugagagacaucaugggcauccccuacugcaacuacagcaaguacugcuaccugaaccacaccgugaccggcaagaccagccugcccagaugcugccuggugagcaacggcagcuaccugaacgagacccacuucagcgacgacaucgagcagcaggccgacaacaugaucaccgagcugcugcagaaggaguacaucgacagacagggcaagaccccccugggccugguggaccuguucguguucagcaccagcuucuaccugaucagcaucuuccugcaccuggugaagauccccacccacagacacguggugggcaagcccugccccaagccccacagacugaaccacaugggcaucugcagcugcggccuguacaagcaccccggcgugcccgugaaguggaagagaugaggacuaguaauaaggaaacuguaugaaugucugugggcaggaagugaagagauccuucuguaaagguuuuuggaauuaugucugcugaauaauaaacuuuuuugaaauaauaaaucugguagaaaaaugagaucuaaaaaaaaaaaaaaaaaaaaaaaaaaaaaaaaaaaaaaaaaaaaaaaaaaaaaaaaaaaaaaaaaaaaaaaaaaaaaaaaaaaaaaaaaaaaaaaaaaaa

SEQ ID NO: 32687 - RNA, 1785 nt, Artificial Sequence
  mRNA product Design b-4 (A100) comprising derived and/or modified sequence from LASV(Lassa virus/H.sapiens-wt/NGA/2015/ISTH_0543;Clade II)__AVO03639__GPCmut7 (opt4)
aggagagucccgcagucggcguccagcggcucugcuuguucgugugugugucguugcaggccuuauucaagcuuaccaugggccagaucaucaccuucuuccaggaggugccccacgugaucgaggaggugaugaacaucgugcugaucgcccugagccugcuggccauccugaagggcaucuacaacguggccaccugcggccuguucggccuggugagcuuccugcugcugugcggcagaagcugcagcaccaccuacaagggcguguacgagcugcagacccuggagcuggacauggccaaccugaacaugaccaugccccugagcugcaccaagaacaacagccaccacuacaucauggugggcaacgagaccggccuggagcugacccugaccaacaccagcaucaucaaccacaaguucugcaaccugagcgacgcccacaagaagaaccuguacgaccacgcccugaugagcaucaucagcaccuuccaccugagcauccccaacuucaaccaguacgaggccaugagcugcgacuucaacggcggcaagaucagcgugcaguacaaccugagccacaccuacgccguggacgccgccaaccacugcggcaccaucgccaacggcgugcugcagaccuucaugagaauggccuggggcggcagcuacaucgcccuggacagcggcaagggcagcugggacugcaucaugaccagcuaccaguaccuggugauccagaacaccaccugggaggaccacugccaguucagcagacccagccccaucggcuaccugggccugcugagccagagaaccagagacaucuacaucagcagaagacugcugggcaccuucaccuggacccugagcgacagcgagggcaacgagacccccggcggcuacugccugaccagauggaugcugaucgaggccgagcugaagugcuucggcaacaccgccguggccaagugcaacgagaagcacgacgaggaguucugcgacaugcugagacuguucgacuucaacaagcaggccaucagaagacugaagacccccgcccagaugagcauccagcugaucaacaaggccgugaacgcccugaucaacgaccagcugaucaugaagaaccaccugagagacaucaugggcauccccuacugcaacuacagcaaguacugcuaccugaaccacaccgugaccggcaagaccagccugcccagaugcugccuggugagcaacggcagcuaccugaacgagacccacuucagcgacgacaucgagcagcaggccgacaacaugaucaccgagcugcugcagaaggaguacaucgacagacagggcaagaccccccugggccugguggaccuguucguguucagcaccagcuucuaccugaucagcaucuuccugcaccuggugaagauccccacccacagacacaucaccggcaagcccugccccaagccccacagacugaaccacaugggcaucugcagcugcggccuguacaagcaccccggcgugcccgugaaguggaagagaugaggacuaguaauaaggaaacuguaugaaugucugugggcaggaagugaagagauccuucuguaaagguuuuuggaauuaugucugcugaauaauaaacuuuuuugaaauaauaaaucugguagaaaaaugagaucuaaaaaaaaaaaaaaaaaaaaaaaaaaaaaaaaaaaaaaaaaaaaaaaaaaaaaaaaaaaaaaaaaaaaaaaaaaaaaaaaaaaaaaaaaaaaaaaaaaaa

SEQ ID NO: 32688 - RNA, 1785 nt, Artificial Sequence
  mRNA product Design b-4 (A100) comprising derived and/or modified sequence from LASV(Lassa virus/H.sapiens-wt/NGA/2016/ISTH_0009;Clade II)__AVO03571__GPCmut7 (opt4)
aggagagucccgcagucggcguccagcggcucugcuuguucgugugugugucguugcaggccuuauucaagcuuaccaugggccagaucaucaccuucuuccaggaggugccccacgugaucgaggaggugaugaacaucgugcugaucgcccugagccugcuggccauccugaagggcaucuacaacguggccaccugcggccugcugggccuggugagcuuccugcugcugugcggcagaagcugcagcaccaccuacaagggcguguacgagcugcagacccuggagcuggacauggccagccugaacaugaccaugccccugagcugcaccaagaacaacagccaccacuacaucauggugggcaacgagaccggccuggagcugacccugaccaacaccagcaucaucaaccacaaguucugcaaccugagcgacgcccacaagaagaaccuguacgaccacgcccugaugagcaucaucagcaccuuccaccugagcauccccaacuucaaccaguacgaggccaugagcugcgacuucaacggcggcagaaucagcgugcaguacaaccugagccacagcuacgccguggacgccgccaaccacugcggcaccaucgccaacggcgugcugcagaccuucaugagaauggccuggggcggcagcuacaucgcccuggacagcggcaagggcagcugggacugcaucaugaccagcuaccaguaccugaucauccagaacaccaccugggaggaccacugccaguucagcagacccagccccaucggcuaccugggccugcugagccagagaaccagagacaucuacaucagcagaagacugcugggcaccuucaccuggacccugagcgacagcgagggcaacgagacccccggcggcuacugccugaccagauggaugcugaucgaggccgagcugaagugcuucggcaacaccgccguggccaagugcaacgagaagcacgacgaggaguucugcgacaugcugagacuguucgacuucaacaagcaggccaucagaagacugaagacccccgcccagaugagcauccagcugaucaacaaggccgugaacgcccugaucaacgaccagcugaucaugaagaaccaccugagagacaucaugggcauccccuacugcaacuacagcaaguacugcuaccugaaccacaccgugaccggcaagaccagccugcccagaugcugccuggugagcaacggcagcuaccugaacgagacccacuucagcgacgacaucgagcagcaggccgacaacaugaucaccgagcugcugcagaaggaguacaucgacagacagggcaagaccccccugggccugguggaccuguucguguucagcaccagcuucuaccugaucagcaucuuccugcaccuggugaagauccccacccacagacacaucaccggcaagcccugccccaagccccacagacugaaccacaugggcaucugcagcugcggccuguacaaccaccccggcgugcccgugaaguggaagagaugaggacuaguaauaaggaaacuguaugaaugucugugggcaggaagugaagagauccuucuguaaagguuuuuggaauuaugucugcugaauaauaaacuuuuuugaaauaauaaaucugguagaaaaaugagaucuaaaaaaaaaaaaaaaaaaaaaaaaaaaaaaaaaaaaaaaaaaaaaaaaaaaaaaaaaaaaaaaaaaaaaaaaaaaaaaaaaaaaaaaaaaaaaaaaaaaa

SEQ ID NO: 32689 - RNA, 1785 nt, Artificial Sequence
  mRNA product Design b-4 (A100) comprising derived and/or modified sequence from LASV(Lassa virus/H.sapiens-wt/NGA/2016/ISTH_0017;Clade II)__AVO03567__GPCmut7 (opt4)
aggagagucccgcagucggcguccagcggcucugcuuguucgugugugugucguugcaggccuuauucaagcuuaccaugggccagaucaucaccuucuuccaggaggugccccacgugaucgaggaggugaugaacaucgugcugaucgcccugagccugcuggccauccugaagggcaucuacaacguggccaccugcggccuguucggccuggugagcuuccugcugcugugcggcagaagcugcagcaccaccuacaagggcguguacgagcugcagacccuggagcuggacauggccagccugaacaugaccaugccccugagcugcaccaagaacaacagccaccacuacaucauggugggcaacgagaccggccuggagcugacccugaccaacaccagcaucaucaaccacaaguucugcaaccugagcgacgcccacaagaagaaccuguacgaccacgcccugaugagcaucaucagcaccuuccaccugagcauccccaacuucaaccaguacgaggccaugagcugcgacuucaacggcggcaagaucagcgugcaguacaaccugagccacaccuacgccaucgacgccgccaaccacugcggcaccaucgccaacggcgugcugcagaccuucaugagaauggccuggggcggcagcuacaucgcccuggacagcggcaagggcagcugggacugcaucaugaccagcuaccaguaccugaucauccagaacaccaccugggaggaccacugccaguucagcagacccagccccaucggcuaccugggccugcugagccagagaaccagagacaucuacaucagcagaagacugcugggcaccuucaccuggacccugagcgacagcgagggcaacgagacccccggcggcuacugccugaccagauggaugcugaucgaggccgagcugaagugcuucggcaacaccgccguggccaagugcaacgagaagcacgacgaggaguucugcgacaugcugagacuguucgacuucaacaagcaggccaucagaagacugaagacccccgcccagaugagcauccagcugaucaacaaggccgugaacgcccugaucaacgaccagcugaucaugaagaaccaccugagagacaucaugggcauccccuacugcaacuacagcaaguacugcuaccugaaccacaccgugaccggcaagaccagccugcccagaugcugccuggugagcaacggcagcuaccugaacgagacccacuucagcgacgacaucgagcagcaggccgacaacaugaucaccgagcugcugcagaaggaguacauggacagacagggcaagaccccccugggccugguggaccuguucguguucagcaccagcuucuaccugaucagcaucuuccugcaccuggugagaauccccacccacagacacgugaucggcaagcccugccccaagccccacagacugaaccacaugggcaucugcagcugcggccuguacaagcaccccggcgugcccgugaaguggaagagaugaggacuaguaauaaggaaacuguaugaaugucugugggcaggaagugaagagauccuucuguaaagguuuuuggaauuaugucugcugaauaauaaacuuuuuugaaauaauaaaucugguagaaaaaugagaucuaaaaaaaaaaaaaaaaaaaaaaaaaaaaaaaaaaaaaaaaaaaaaaaaaaaaaaaaaaaaaaaaaaaaaaaaaaaaaaaaaaaaaaaaaaaaaaaaaaaa

SEQ ID NO: 32690 - RNA, 1785 nt, Artificial Sequence
  mRNA product Design b-4 (A100) comprising derived and/or modified sequence from LASV(Lassa virus/H.sapiens-wt/NGA/2018/ISTH_0959;Clade II)__AVV65099__GPCmut7 (opt4)
aggagagucccgcagucggcguccagcggcucugcuuguucgugugugugucguugcaggccuuauucaagcuuaccaugggccagaucaucaccuucuuccaggaggugccccacgugaucgaggaggugaugaacaucgugcugaucgcccugagccugcuggccauccugaagggcaucuacaacguggugaccugcggccuguucggccuggugagcuuccugcugcugugcggcagaagcugcagcaccaccuacaagggcguguacgagcugcagacccuggagcuggacauggccagccugaacaugaccaugccccugagcugcaccaagaacaacagccaccacuacaucauggugggcaacgagaccggccuggagcugacccugaccaacaccagcaucaucaaccacaaguucugcaaccugagcgacgcccacaagaagaaccuguacgaccacgcccugaugagcaucaucagcaccuuccaccugagcauccccaacuucaaccaguacgaggccaugagcugcgacuucaacggcggcaagaucagcgugcaguacaaccugagccacgccuacgccaucgacgccgccaaccacugcggcaccaucgccaacggcgugcugcagaccuucaugagaauggccuggggcggcagcuacaucgcccuggacagcggcaagggcagcugggacugcaucaugaccagcuaccaguaccugaucauccagaacaccaccugggaggaccacugccaguucagcagacccagccccaucggcuaccugggccugcugagccagagaaccagagacaucuacaucagcagaagacugcugggcaccuucaccuggacccugagcgacagcgagggcaacgagacccccggcggcuacugccugaccagauggaugcugaucgaggccgagcugaagugcuucggcaacaccgccguggccaagugcaacgagaagcacgacgaggaguucugcgacaugcugagacuguucgacuucaacaagcaggccaucagaagacugaagacccccgcccagaugagcauccagcugaucaacaaggccgugaacgcccugaucaacgaccagcugaucaugaagaaccaccugagagacaucaugggcauccccuacugcaacuacagcaaguacugcuaccugaaccacaccgugaccggcaagaccagccugcccagaugcugccuggugagcaacggcagcuaccugaacgagacccacuucagcgacgacaucgagcagcaggccgacaacaugaucaccgagcugcugcagaaggaguacaucgacagacagggcaagaccccccugggccugguggaccuguucguguucagcaccagcuucuaccugaucagcaucuuccugcaccuggugaagauccccacccacagacacgugaucggcaagcccugccccaagccccacagacugaaccacaugggcaucugcagcugcggccuguacaagcaccccggcgugcccgugaaguggaagagaugaggacuaguaauaaggaaacuguaugaaugucugugggcaggaagugaagagauccuucuguaaagguuuuuggaauuaugucugcugaauaauaaacuuuuuugaaauaauaaaucugguagaaaaaugagaucuaaaaaaaaaaaaaaaaaaaaaaaaaaaaaaaaaaaaaaaaaaaaaaaaaaaaaaaaaaaaaaaaaaaaaaaaaaaaaaaaaaaaaaaaaaaaaaaaaaaa

SEQ ID NO: 32691 - RNA, 1785 nt, Artificial Sequence
  mRNA product Design b-4 (A100) comprising derived and/or modified sequence from LASV(LASV003-NIG-2008;Clade II)__AIT17580__GPCmut7 (opt4)
aggagagucccgcagucggcguccagcggcucugcuuguucgugugugugucguugcaggccuuauucaagcuuaccaugggccagaucaucaccuucuuccaggaggugccccacgugaucgaggaggugaugaacaucgugcugaucgcccugagccugcuggccauccugaagggcaucuacaacguggccaccugcggccuguucggccuggugagcuuccugcugcugugcggcagaagcugcagcaccaccuacaagggcguguacgagcugcagacccuggagcuggacauggccagccugaacaugaccaugccccugagcugcaccaagaacaacagccaccacuacaucauggugggcaacgagaccggccuggagcugacccugaccaacaccagcaucaucaaccacaaguucugcaaccugagcgacgcccacaagaagaaccuguacgaccacgcccugaugagcaucaucagcaccuuccaccugagcauccccaacuucaaccaguacgaggccaugagcugcgacuucaacggcggcaagaucagcgugcaguacaaccugagccacaccuacgccguggacgccgccaaccacugcggcaccaucgccaacggcgugcugcagaccuucaugagaauggccuggggcggcagcuacaucgcccuggacagcggcaagggcagcugggacugcaucaugaccagcuaccaguaccugaucauccagaacaccaccugggaggaccacugccaguucagcagacccagccccaucggcuaccugggccugcugagccagagaaccagagacaucuacaucagcagaagacugcugggcaccuucaccuggacccugagcgacagcgagagcaacgagacccccggcggcuacugccugaccagauggaugcugaucgaggccgagcugaagugcuucggcaacaccgccguggccaagugcaacgagaagcacgacgaggaguucugcgacaugcugagacuguucgacuucaacaagcaggccaucagaagacugaaggcccccgcccagaugagcauccagcugaucaacaaggccgugaacgcccugaucaacgaccagcugaucaugaagaaccaccugagagacaucaugggcauccccuacugcaacuacagcaaguacugcuaccugaaccacaccgugaccggcagaaccagccugcccagaugcugccuggugagcaacggcagcuaccugaacgagacccacuucagcgacgacaucgagcagcaggccgacaacaugaucaccgagcugcugcagaaggaguacauggacagacagggcaagaccccccugggccugguggaccuguucguguucagcaccagcuucuaccugaucagcaucuuccugcaccuggugaagauccccacccacagacacgugaucggcaagcccugccccaagccccacagacugaaccacaugggcaucugcagcugcggccuguacaagcaccccggcgugcccgugaaguggaagagaugaggacuaguaauaaggaaacuguaugaaugucugugggcaggaagugaagagauccuucuguaaagguuuuuggaauuaugucugcugaauaauaaacuuuuuugaaauaauaaaucugguagaaaaaugagaucuaaaaaaaaaaaaaaaaaaaaaaaaaaaaaaaaaaaaaaaaaaaaaaaaaaaaaaaaaaaaaaaaaaaaaaaaaaaaaaaaaaaaaaaaaaaaaaaaaaaa

SEQ ID NO: 32692 - RNA, 1785 nt, Artificial Sequence
  mRNA product Design b-4 (A100) comprising derived and/or modified sequence from LASV(LASV035-NIG-2009;Clade II)__AIT17588__GPCmut7 (opt4)
aggagagucccgcagucggcguccagcggcucugcuuguucgugugugugucguugcaggccuuauucaagcuuaccaugggccagaucaucaccuucuuccaggaggugccccacgugaucgaggaggugaugaacaucgugcugaucgcccugagccugcuggccauccugaagggcaucuacaacguggccaccugcggccuguucggccuggugagcuuccugcugcugugcggcagaagcugcagcaccaccuacaagggcguguacgagcugcagacccuggagcuggacauggccagccugaacaugaccaugccccugagcugcaccaagaacaacagccaccacuacaucauggugggcaacgagaccggccuggagcugacccugaccaacaccagcaucaucaaccacaaguucugcaaccugagcgacgcccacaagaagaaccuguacgaccacgcccugaugagcaucaucagcaccuuccaccugagcauccccaacuucaaccaguacgaggccaugagcugcgacuucaacggcggcaagaucagcgugcaguacaaccugagccacgccuacgccguggacgccgccaaccacugcggcaccaucgccaacggcgugcugcagaccuucaugagaauggccuggggcggcagcuacaucgcccuggacagcggcaagggcagcugggacugcaucaugaccagcuaccaguaccugaucauccagaacaccaccugggaggaccacugccaguucagcagacccagccccaucggcuaccugggccugcugagccagagaaccagagacaucuacaucagcagaagacugcugggcaccuucaccuggacccugagcgacagcgagggcaacgagacccccggcggcuacugccugaccagauggaugcugaucgaggccgagcugaagugcuucggcaacaccgccguggccaagugcaacgagaagcacgacgaggaguucugcgacaugcugagacuguucgacuucaacaagcaggccaucagaagacugaaggcccccgcccagaugagcauccagcugaucaacaaggccgugaacgcccugaucaacgaccagcugaucaugaagaaccaccugagagacaucaugggcauccccuacugcaacuacagcaaguacugcuaccugaaccacaccgugaccggcaagaccagccugcccagaugcugccuggugagcaacggcagcuaccugaacgagacccacuucagcgacgacaucgagcagcaggccgacaacaugaucaccgagcugcugcagaaggaguacaucgacagacagggcaagaccccccugggccugguggaccuguucguguucagcaccagcuucuaccugaucagcaucuuccugcaccuggugaagauccccacccacagacacgugaucggcaagcccugccccaagccccacagacugaaccacaugggcaucugcagcugcggccuguacaagcaccccggcgugcccgugaaguggaagagaugaggacuaguaauaaggaaacuguaugaaugucugugggcaggaagugaagagauccuucuguaaagguuuuuggaauuaugucugcugaauaauaaacuuuuuugaaauaauaaaucugguagaaaaaugagaucuaaaaaaaaaaaaaaaaaaaaaaaaaaaaaaaaaaaaaaaaaaaaaaaaaaaaaaaaaaaaaaaaaaaaaaaaaaaaaaaaaaaaaaaaaaaaaaaaaaaa

SEQ ID NO: 32693 - RNA, 1785 nt, Artificial Sequence
  mRNA product Design b-4 (A100) comprising derived and/or modified sequence from LASV(LASV1000-NIG-2009;Clade II)__AIT17782__GPCmut7 (opt4)
aggagagucccgcagucggcguccagcggcucugcuuguucgugugugugucguugcaggccuuauucaagcuuaccaugggccagaucaucaccuucuuccaggaggugccccacgugaucgaggaggugaugaacaucgugcugaucgcccugagccugcuggccauccugaagggcaucuacaacguggccaccugcggccuguucggccuggugagcuuccugcugcugugcggcagaagcugcagcaccaccuacaagggcguguacgagcugcagacccuggagcuggacauggccagccugaacaugaccaugccccugagcugcaccaagaacaacagccaccacuacaucauggugggcaacgagaccggccuggagcugacccugaccaacaccagcaucaucaaccacaaguucugcaaccugagcgacgcccacaagaagaaccuguacgaccacgcccugaugagcaucaucagcaccuuccaccugagcauccccaacuucaaccaguacgaggccaugagcugcgacuucaacggcggcaagaucagcgugcaguacaaccugagccacaccuacgccguggacgccgccaaccacugcggcaccaucgccaacggcgugcugcagaccuucaugagaauggccuggggcggcagcuacaucgcccuggacagcggcaagggcagcugggacugcaucaugaccagcuaccaguaccugaucauccagaacaccaccugggaggaccacugccaguucagcagacccagccccaucggcuaccugggccugcugagccagagaaccagagacaucuacaucagcagaagacugcugggcaccuucaccuggacccugagcgacagcgagggcaacgagacccccggcggcuacugccugaccagauggaugcugaucgaggccgagcugaagugcuucggcaacaccgccguggccaagugcaacgagaagcacgacgaggaguucugcgacaugcugagacuguucgacuucaacaagcaggccaucaagagacugaagacccccgcccagaugagcauccagcugaucaacaaggccgugaacgcccugaucaacgaccagcugaucaugaagaaccaccugagagacaucaugggcauccccuacugcaacuacagcaaguacugcuaccugaaccacaccgugaccggcaagaccagccugcccagaugcugccuggugagcaacggcagcuaccugaacgagacccacuucagcgacgacaucgagcagcaggccgacaacaugaucaccgagcugcugcagaaggaguacaucgacagacagggcaagaccccccugggccugguggaccuguucguguucagcaccagcuucuaccugaucagcaucuuccugcaccuggugaagauccccacccacagacacguggugggcaagcccugccccaagccccacagacugaaccacaugggcaucugcagcugcggccuguacaagcaccccggcgugcccgugaaguggaagagaugaggacuaguaauaaggaaacuguaugaaugucugugggcaggaagugaagagauccuucuguaaagguuuuuggaauuaugucugcugaauaauaaacuuuuuugaaauaauaaaucugguagaaaaaugagaucuaaaaaaaaaaaaaaaaaaaaaaaaaaaaaaaaaaaaaaaaaaaaaaaaaaaaaaaaaaaaaaaaaaaaaaaaaaaaaaaaaaaaaaaaaaaaaaaaaaaa

SEQ ID NO: 32694 - RNA, 1785 nt, Artificial Sequence
  mRNA product Design b-4 (A100) comprising derived and/or modified sequence from LASV(LASV221-NIG-2010;Clade II)__AIT17624__GPCmut7 (opt4)
aggagagucccgcagucggcguccagcggcucugcuuguucgugugugugucguugcaggccuuauucaagcuuaccaugggccagaucaucaccuucuuccaggaggugccccacgugaucgaggaggugaugaacaucgugcugaucgcccugagccugcuggccauccugaagggcaucuacaacguggccaccugcggccuguucggccuggugagcuuccugcugcugugcggcagaagcugcagcaccaccuacaagggcguguacgagcugcagacccuggagcuggacauggccagccugaacaugaccaugccccugagcugcaccaagaacaacagccaccacuacaucauggugggcaacgagaccggccuggagcugacccugaccaacaccagcaucaucaaccacaaguucugcaaccugagcgacgcccacaagaagaaccuguacgaccacgcccugaugagcaucaucagcaccuuccaccugagcauccccaacuucaaccaguacgaggccaugagcugcgacuucaacggcggcaagaucagcgugcaguacaaccugagccacaccuacgccaucgacgccgccaaccacugcggcaccaucgccaacggcgugcugcagaccuucaugagaauggccuggggcggcagcuacaucgcccuggacagcggcaagggcagcugggacugcaucaugaccagcuaccaguaccugaucauccagaacaccaccugggaggaccacugccaguucagcagacccagccccaucggcuaccugggccugcugagccagagaaccagagacaucuacaucagcagaagacugcugggcaccuucaccuggacccugagcgacagcgagggcaacgagacccccggcggcuacugccugaccagauggaugcugaucgaggccgagcugaagugcuucggcaacaccgccguggccaagugcaacgagaagcacgacgaggaguucugcgacaugcugagacuguucgacuucaacaagcaggccaucagaagacugaagacccccgcccagaugagcauccagcugaucaacaaggccgugaacgcccugaucaacgaccagcugaucaugaagaaccaccugagagacaucaugggcauccccuacugcaacuacagcaaguacugcuaccugaaccacaccgugaccggcaagaccagccugcccagaugcugccuggugagcaacggcagcuaccugaacgagacccacuucagcgacgacaucgagcagcaggccgacaacaugaucaccgagaugcugcagaaggaguacauggacagacagggcaagaccccccugggccugguggaccuguucguguucagcaccagcuucuaccugaucagcaucuuccugcaccuggugaagauccccacccacagacacgugaucggcaagcccugccccaagccccacagacugaaccacaugggcaucugcagcugcggccuguacaagcaccccggcgugcccgugaaguggaagagaugaggacuaguaauaaggaaacuguaugaaugucugugggcaggaagugaagagauccuucuguaaagguuuuuggaauuaugucugcugaauaauaaacuuuuuugaaauaauaaaucugguagaaaaaugagaucuaaaaaaaaaaaaaaaaaaaaaaaaaaaaaaaaaaaaaaaaaaaaaaaaaaaaaaaaaaaaaaaaaaaaaaaaaaaaaaaaaaaaaaaaaaaaaaaaaaaa

SEQ ID NO: 32695 - RNA, 1785 nt, Artificial Sequence
  mRNA product Design b-4 (A100) comprising derived and/or modified sequence from LASV(LASV237-NIG-2010;Clade II)__AIT17638__GPCmut7 (opt4)
aggagagucccgcagucggcguccagcggcucugcuuguucgugugugugucguugcaggccuuauucaagcuuaccaugggccagaucaucaccuucuuccaggaggugccccacgugaucgaggaggugaugaacaucgugcugaucgcccugagccugcuggccauccugaagggcaucuacaacguggccaccugcggccuguucggccuggugagcuuccugcugcugugcggcagaagcugcagcaccaccuacaagggcguguacgagcugcagacccuggagcuggacauggccagccugaacaugaccaugccccugagcugcaccaagaacaacagccaccacuacaucauggugggcaacgagaccggccuggagcugacccugaccaacaccagcaucaucaaccacaaguucugcaaccugagcgacgcccacaagaaggaccuguacgaccacgcccugaugagcaucaucagcaccuuccaccugagcauccccaacuucaaccaguacgaggccaugagcugcgacuucaacggcggcaagaucagcgugcaguacaaccugagccacaccuacgccguggacgccgccaaccacugcggcaccaucgccaacggcgugcugcagaccuucaugagaauggccuggggcggcagcuacaucgcccuggacagcggcaagggcagcugggacugcaucaugaccagcuaccaguaccugaucauccagaacaccaccugggaggaccacugccaguucagcagacccagccccaucggcuaccugggccugcugagccagagaaccagagacaucuacaucagcagaagacugcugggcaccuucaccuggacccugagcgacagcgagggcaacgagacccccggcggcuacugccugaccagauggaugcugaucgaggccgagcugaagugcuucggcaacaccgccguggccaagugcaacgagaagcacgacgaggaguucugcgacaugcugagacuguucgacuucaacaagcaggccaucagaagacugaagacccccgcccagaugagcauccagcugaucaacaaggccgugaacgcccugaucaacgaccagcugaucaugaagaaccaccugagagacaucaugggcauccccuacugcaacuacagcaaguacugcuaccugaaccacaccgugaccggcaagaccagccugcccagaugcugccuggugagcaacggcagcuaccugaacgagacccacuucagcgacgacaucgagcagcaggccgacaacaugaucaccgagcugcugcagaaggaguacauggacagacagggcaagaccccccugggccugguggaccuguucguguucagcaccagcuucuaccugaucagcaucuuccugcaccugaucaagauccccacccacagacacaucaccggcaagcccugccccaagccccacagacugaaccacaugggcaucugcagcugcggccuguacaagcaccccggcgugcccgugaaguggaagagaugaggacuaguaauaaggaaacuguaugaaugucugugggcaggaagugaagagauccuucuguaaagguuuuuggaauuaugucugcugaauaauaaacuuuuuugaaauaauaaaucugguagaaaaaugagaucuaaaaaaaaaaaaaaaaaaaaaaaaaaaaaaaaaaaaaaaaaaaaaaaaaaaaaaaaaaaaaaaaaaaaaaaaaaaaaaaaaaaaaaaaaaaaaaaaaaaa

SEQ ID NO: 32696 - RNA, 1785 nt, Artificial Sequence
  mRNA product Design b-4 (A100) comprising derived and/or modified sequence from LASV(LASV253-NIG-2011;Clade II)__AIT17670__GPCmut7 (opt4)
aggagagucccgcagucggcguccagcggcucugcuuguucgugugugugucguugcaggccuuauucaagcuuaccaugggccagaucaucaccuucuuccaggaggugccccacgugaucgaggaggugaugaacaucgugcugaucgcccugagccugcuggccauccugaagggcaucuacaacguggccaccugcggccuguucggccuggugagcuuccugcugcugugcggcagaagcugcagcaccaccuacaagggcguguacgagcugcagacccuggagcuggacauggccagccugaacaugaccaugccccugagcugcaccaagaacaacagccaccacuacaucauggugggcaacgagaccggccuggagcugacccugaccaacaccagcaucaucaaccacaaguucugcaaccugagcgacgcccacaagaagaaccuguacgaccacgcccugaugagcaucaucagcaccuuccaccugagcauccccaacuucaaccaguacgaggccaugagcugcgacuucaacggcggcaagaucagcgugcaguacaaccugagccacaccuacgccguggacgccgccaaccacugcggcaccaucgccaacggcgugcugcagaccuucaugagaauggccuggggcggcagcuacaucgcccuggacagcggcaagggcagcugggacugcaucaugaccagcuaccaguaccugaucauccagaacaccaccugggaggaccacugccaguucagcagacccagccccaucggcuaccugggccugcugagccagagaaccagagacaucuacaucagcagaagacugcugggcaccuucaccuggacccugagcgacagcgagggcaacgagacccccggcggcuacugccugaccagauggaugcugaucgaggccgagcugaagugcuucggcaacaccgccguggccaagugcaacgagaagcacgacgaggaguucugcgacaugcugagacuguucgacuucaacaagcaggccaucagaagacugaaggcccccgcccagaugagcauccagcugaucaacaaggccgugaacgcccugaucaacgaccagcugaucaugaagaaccaccugagagacaucaugggcauccccuacugcaacuacagcaaguacugcuaccugaaccacaccgugaccggcagaaccagccugcccagaugcugccuggugagcaacggcagcuaccugaacgagacccacuucagcgacgacaucgagcagcaggccgacaacaugaucaccgagcugcugcagaaggaguacaucgacagacagggcaagaccccccugggccugguggaccuguucguguucagcaccagcuucuaccugaucagcaucuuccugcaccuggugaagauccccacccacagacacaucaucggcaagcccugccccaagccccacagacugaaccacaugggcaucugcagcugcggccuguacaagcaccccggcgugcccgugaaguggaagagaugaggacuaguaauaaggaaacuguaugaaugucugugggcaggaagugaagagauccuucuguaaagguuuuuggaauuaugucugcugaauaauaaacuuuuuugaaauaauaaaucugguagaaaaaugagaucuaaaaaaaaaaaaaaaaaaaaaaaaaaaaaaaaaaaaaaaaaaaaaaaaaaaaaaaaaaaaaaaaaaaaaaaaaaaaaaaaaaaaaaaaaaaaaaaaaaaa

SEQ ID NO: 32697 - RNA, 1785 nt, Artificial Sequence
  mRNA product Design b-4 (A100) comprising derived and/or modified sequence from LASV(LASV254-NIG-2011;Clade II)__AIT17674__GPCmut7 (opt4)
aggagagucccgcagucggcguccagcggcucugcuuguucgugugugugucguugcaggccuuauucaagcuuaccaugggccagaucaucaccuucuuccaggaggugccccacgugaucgaggaggugaugaacaucgugcugaucgcccugagccugcuggccauccugaagggcaucuacaacguggccaccugcggccuguucggccuggugagcuuccugcugcugugcggcagaagcugcagcaccaccuacaagggcguguacgagcugcagacccuggagcuggacaugaccaaccugaacaugaccaugccccugagcugcaccaagaacaacagccaccacuacaucauggugggcaacgagaccggccuggagcugacccugaccaacaccagcaucaucaaccacaaguucugcaaccugagcgacgcccacaagaagaaccuguacaaccacgcccugaugagcaucaucagcaccuuccaccugagcauccccaacuucaaccaguacgaggccaugagcugcgacuucaacggcggcaagaucagcgugcaguacaaccugagccacagcuacgccguggacgccgccaaccacugcggcaccaucgccaacggcgugcugcagaccuucaugagaauggccuggggcggcagcuacaucgcccuggacagcggcaagggcaacugggacugcaucaugaccagcuaccaguaccugaucauccagaacaccaccugggaggaccacugccaguucagcagacccagccccaucggcuaccugggccugcugagccagagaaccagagacaucuacaucagcagaagacugcugggcaccuucaccuggacccugagcgacagcgagggcaacgagacccccggcggcuacugccugaccagauggaugcugaucgaggccgagcugaagugcuucggcaacaccgccguggccaagugcaacgagaagcacgacgaggaguucugcgacaugcugagacuguucgacuucaacaagcaggccaucagaagacugaagacccccgcccaggccaacauccagcugaucaacaaggccgugaacgcccugaucaacgaccagcugaucaugaagaaccaccugagagacaucaugggcauccccuacugcaacuacagcaaguacugcuaccugaaccacaccgugaccggcaagaccagccugcccagaugcugccuggugagcaacggcagcuaccugaacgagacccacuucagcgacgacaucgagcagcaggccgacaacaugaucaccgagcugcugcagaaggaguacauggacagacagggcaagaccccccugggccugguggaccuguucguguucagcaccagcuucuaccugaucagcaucuuccugcaccuggugaagauccccacccacagacacgugaucggcaagcccugccccaagccccacagacugaaccacaugggcaucugcagcugcggccuguacaagcaccccggcgugcccgugaaguggaagagaugaggacuaguaauaaggaaacuguaugaaugucugugggcaggaagugaagagauccuucuguaaagguuuuuggaauuaugucugcugaauaauaaacuuuuuugaaauaauaaaucugguagaaaaaugagaucuaaaaaaaaaaaaaaaaaaaaaaaaaaaaaaaaaaaaaaaaaaaaaaaaaaaaaaaaaaaaaaaaaaaaaaaaaaaaaaaaaaaaaaaaaaaaaaaaaaaa

SEQ ID NO: 32698 - RNA, 1785 nt, Artificial Sequence
  mRNA product Design b-4 (A100) comprising derived and/or modified sequence from LASV(Nig08-A19;Clade III)__ADU56618__GPCmut7 (opt4)
aggagagucccgcagucggcguccagcggcucugcuuguucgugugugugucguugcaggccuuauucaagcuuaccaugggccagaucgugaccuucuuccaggaggugccccacgugaucgaggaggugaugaacaucgugcugaucgcccugagcauccuggccauccugaagggccuguacaacaucgccaccugcggccugaucggccuggugaccuuccugcugcugagcggcagaagcugcagcaugaccuacaagggcguguacgagcugcagacccuggagcugaacaugaacacccugaacaugaccaugccccugagcugcaccaagaacaacagccaccacuacaucauggugggcaacgagaccggccuggagcugacccugaccaacaccagccugcugcaccacaaguucugcaaccugagcgacgcccacaagaagaaccuguacgaccacacccugaugagcaucaucagcaccuuccaccugagcauccccaacuucaaccaguacgaggccaugagcugcgacuucaacggcggcaagaucaccgugcaguacaaccugagccacagcuacgccaucgacgccgccaaccacugcggcaccguggccaacggcgugcugcagaccuucaugagaauggccuggggcggcagcuacaucgcccuggacagcggcagaggcaagugggacugcaucaugaccagcuaccaguaccugaucauccagaacaccaccugggaggaccacugccaguucagcagacccagccccaucggcuaccugggccugcugagccagagaaccagagacaucuacaucagcagaagacugcugggcaccuucaccuggacccugagcgacagcgagggcaacgagacccccggcggcuacugccugaccagauggaugcugaucgaggccgagcugaagugcuucggcaacaccgccguggccaagugcaacgagaagcacgacgaggaguucugcgacaugcugagacuguucgacuucaacaagcaggccaucagaagacugaaggcccccgcccagaugagcauccagcugaucaacaaggccgugaacgcccugaucaacgaccagcugaucaugaagaaccaccugagagacaucaugggcauccccuacugcaacuacagcaaguacugcuaccugaaccacaccagcaccggcagaaccagccugcccagaugcugccuggugagcaacggcagcuaccugaacgagacccacuucagcgacgacaucgagcagcaggccgacaacaugaucaccgagaugcugcagaaggaguaccuggacagacagggcaagaccccccugggccugguggaccuguucguguucagcaccagcuucuaccugaucagcaucuuccugcaccuggugaagauccccacccacagacacaucgugggcaagcccugccccaagccccacagacugaaccacaugggcaucugcagcugcggccuguacaagcagcccggcgugcccgugagauggaagagaugaggacuaguaauaaggaaacuguaugaaugucugugggcaggaagugaagagauccuucuguaaagguuuuuggaauuaugucugcugaauaauaaacuuuuuugaaauaauaaaucugguagaaaaaugagaucuaaaaaaaaaaaaaaaaaaaaaaaaaaaaaaaaaaaaaaaaaaaaaaaaaaaaaaaaaaaaaaaaaaaaaaaaaaaaaaaaaaaaaaaaaaaaaaaaaaaa

SEQ ID NO: 32699 - RNA, 1788 nt, Artificial Sequence
  mRNA product Design b-4 (A100) comprising derived and/or modified sequence from LASV(G1180-SLE-2010;Clade IV)__AIT17168__GPCmut7 (opt4)
aggagagucccgcagucggcguccagcggcucugcuuguucgugugugugucguugcaggccuuauucaagcuuaccaugggccagaucgugaccuucuuccaggaggugccccacgugaucgaggaggugaugaacaucgugcugaucgcccugagcauccuggccgugcugaagggccuguacaacuucgccaccugcggccuggugggccugcugaccuuccugcugcugugcggcagaagcugcaccgccagcagauacaagggcguguacgagcugcagacccuggagcugaacauggagacccugaacaugaccaugccccugagcugcaccaagaacaacagccaccacuacaucauggugggcaacgagaccggccuggagcugacccugaccaacaccagcaucaucaaccacaaguucugcaaccugagcgacgcccacaagaagaaccuguacgaccacgcccugaugagcaucaucagcaccuuccaccugagcauccccaacuucaaccaguacgaggccaugagcugcgacuucaacggcggcaagaucagcgugcaguacaaccugagccacagcuacgccggcgacgccgccaaccacugcggcaccguggccaacggcgugcugcagaccuucaugagaauggccuggggcggcagcuacaucgcccuggacagcggccacggcagcugggacugcaucaugaccagcuaccaguaccugaucauccagaacaccaccugggaggaccacugccaguucagcagacccagccccaucggcuaccugggccugcugagccagagaaccagagacaucuacaucagcagaagacugcugggcaccuucaccuggacccugagcgacagcgagggcaaggacacccccggcggcuacugccugaccagauggaugcugaucgaggccgagcugaagugcuucggcaacaccgccguggccaagugcaacgagaagcacgacgaggaguucugcgacaugcugagacuguucgacuucaacaagcaggccauccagagacugaaggcccccgcccagaugagcauccagcugaucaacaaggccgugaacgcccugaucaacgaccagcugaucaugaagaaccaccugagagacaucaugggcauccccuacugcaacuacagcaaguacugcuaccugaaccacaccaccaccggcaagaccagccugcccaagugcugccuggugagcaacggcagcuaccugaacgagacccacuucagcgacgacaucgagcagcaggccgacaacaugaucaccgagaugcugcagaaggaguacauggagagacagggcaagaccccccugggccugguggaccuguucguguucagcaccagcuucuaccugaucagcaucuuccugcaccuggugaagauccccacccacagacacaucgugggcaagagcugccccaagccccacagacugaaccacaugggcaucugcagcugcggccuguacaagcagcccggcgugcccgugaaguggaagagaugaggacuaguaauaaggaaacuguaugaaugucugugggcaggaagugaagagauccuucuguaaagguuuuuggaauuaugucugcugaauaauaaacuuuuuugaaauaauaaaucugguagaaaaaugagaucuaaaaaaaaaaaaaaaaaaaaaaaaaaaaaaaaaaaaaaaaaaaaaaaaaaaaaaaaaaaaaaaaaaaaaaaaaaaaaaaaaaaaaaaaaaaaaaaaaaaa

SEQ ID NO: 32700 - RNA, 1788 nt, Artificial Sequence
  mRNA product Design b-4 (A100) comprising derived and/or modified sequence from LASV(G1442-SLE-2011;Clade IV)__AIT17180__GPCmut7 (opt4)
aggagagucccgcagucggcguccagcggcucugcuuguucgugugugugucguugcaggccuuauucaagcuuaccaugggccagaucgugaccuucuuccaggaggugccccacgugaucgaggaggugaugaacaucgugcugaucgcccugagcauccuggccgugcugaagggccuguacaacguggccaccugcggccugaucggccuggugaccuuccugcugcugugcggcagaagcugcaccaccacccuguacaagggcguguacgagcugcagacccuggagcugaacauggagacccugaacaugaccaugccccugagcugcaccaagaacaacagccaccacuacaucagagugggcaacgagaccggccuggagcugacccugaccaacaccagcaucaucaaccacaaguucugcaaccugagcgacgcccacaagaagaaccuguacgaccacgcccugaugagcaucaucagcaccuuccaccugagcauccccaacuucaaccaguacgaggccaugagcugcgacuucaacggcggcaagaucagcgugcaguacaaccugagccacagcuacgccggcgacgccgccaaccacugcggcaccguggccaacggcgugcugcagaccuucaugagaauggccuggggcggcagcuacaucgcccuggacagcggcagaggcaacugggacugcaucaugaccagcuaccaguaccugaucauccagaacaccaccugggacgaccacugccaguucagcagacccagccccaucggcuaccugggccugcugagccagagaaccagagacguguacaucagcagaagacugcugggcaccuucaccuggacccugagcgacagcgagggcaaggacacccccggcggcuacugccugaccagauggaugcugaucgaggccgagcugaagugcuucggcaacaccgccguggccaagugcaacgagaagcacgacgaggaguucugcgacaugcugagacuguucgacuucaacaagcaggccauccagagacugaaggcccccgcccagaugagcauccagcugaucaacaaggccgugaacgcccugaucaacgaccagcugaucaugaagaaccaccugagagacaucaugggcauccccuacugcaacuacagcaaguacugcuaccugaacaacaccgccaccggcaagaccagccugcccaagugcugccugaucagcaacggcagcuaccugaacgagacccacuucagcgacgacaucgagcaggaggccgacaacaugaucaccgagaugcugcagaaggaguacauggagagacagggcaagaccccccugggccugguggaccuguucguguucagcaccagcuucuaccugaucagcaucuuccugcaccuggugaagauccccacccacagacacaucgugggcaagagcugccccaagccccacagacugaaccacaugggcaucugcagcugcggccuguacaagcagcccggcgugcccgugagauggaagagaugaggacuaguaauaaggaaacuguaugaaugucugugggcaggaagugaagagauccuucuguaaagguuuuuggaauuaugucugcugaauaauaaacuuuuuugaaauaauaaaucugguagaaaaaugagaucuaaaaaaaaaaaaaaaaaaaaaaaaaaaaaaaaaaaaaaaaaaaaaaaaaaaaaaaaaaaaaaaaaaaaaaaaaaaaaaaaaaaaaaaaaaaaaaaaaaaa

SEQ ID NO: 32701 - RNA, 1788 nt, Artificial Sequence
  mRNA product Design b-4 (A100) comprising derived and/or modified sequence from LASV(G3010-SLE-2013;Clade IV)__AIT17344__GPCmut7 (opt4)
aggagagucccgcagucggcguccagcggcucugcuuguucgugugugugucguugcaggccuuauucaagcuuaccaugggccagaucgugaccuucuuccaggaggugccccacgugaucgaggaggugaugaacaucgugcugaucgcccugagcauccuggccgugcugaagggccuguacaacuucgccaccugcggccuggugggccuggugaccuuccugcugcugugcggcagaagcugcaccaccagccuguacaagggcguguacgagcugcagacccuggagcugaacauggagacccugaacaugaccaugccccugagcugcaccaagaacaacagccaccacuacaucauggugggcaacgagaccggccuggagcugacccugaccaacaccagcaucaucaaccacaaguucugcaaccugagcgacgcccacaagaagaaccuguacaaccacgcccugaugagcaucaucagcaccuuccaccugagcauccccaacuucaaccaguacgaggccaugagcugcgacuucaacggcggcaagaucagcgugcaguacaaccugagccacagcuacgccggcgacgccgccagccacugcggcaccguggccaacggcgugcugcagaccuucaugagaauggccuggggcggcagcuacaucgcccuggacagcggcuacggcaagugggacugcaucaugaccagcuaccaguaccugaucauccagaacaccaccugggaggaccacugccaguucagcagacccagccccaucggcuaccugggccugcugagccagagaaccagagacaucuacaucagcagaagacugcugggcaccuucaccuggacccugagcgacagcgagggcaaggacacccccggcggcuacugccugaccagauggaugcugaucgaggccgagcugaagugcuucggcaacaccgccguggccaagugcaacgagaagcacgacgaggaguucugcgacaugcugagacuguucgacuucaacaagcaggccauccagagacugaagacccccgcccagaugagcauccagcugaucaacaaggccgugaacgcccugaucaacgaccagcugaucaugaagaaccaccugagagacaucaugggcauccccuacugcaacuacagcaaguacugcuaccugaaccacaccaccaccggcaagaccagccugcccaagugcugccuggugagcaacggcagcuaccugaacgagacccacuucagcgacgacaucgagcagcaggccgacaacaugaucaccgagaugcugcagaaggaguacauggagagacagggcaagaccccccugggccugguggaccuguucguguucagcaccagcuucuaccugaucagcaucuuccugcaccuggugaagauccccacccacagacacaucgugggcaagagcugccccaagccccacagacugaaccacaugggcaucugcagcugcggccuguacaagcagcccggcgugcccgugagauggaagagaugaggacuaguaauaaggaaacuguaugaaugucugugggcaggaagugaagagauccuucuguaaagguuuuuggaauuaugucugcugaauaauaaacuuuuuugaaauaauaaaucugguagaaaaaugagaucuaaaaaaaaaaaaaaaaaaaaaaaaaaaaaaaaaaaaaaaaaaaaaaaaaaaaaaaaaaaaaaaaaaaaaaaaaaaaaaaaaaaaaaaaaaaaaaaaaaaa

SEQ ID NO: 32702 - RNA, 1788 nt, Artificial Sequence
  mRNA product Design b-4 (A100) comprising derived and/or modified sequence from LASV(G502-SLE-2009;Clade IV)__AIT17126__GPCmut7 (opt4)
aggagagucccgcagucggcguccagcggcucugcuuguucgugugugugucguugcaggccuuauucaagcuuaccaugggccagaucgugaccuucuuccaggaggugccccacgugaucgaggaggugaugaacaucgugcugaucgcccugagcauccuggccgugcugaagggccuguacaacuucgccaccugcggccuggugggccugcugaccuuccugcugcugugcggcagaagcugcaccaccggccuguacaagggcguguacgagcugcagacccuggagcugaacauggagacccugaacaugaccaugccccugagcugcaccaagaacaacagccaccacuacaucauggugggcaacgagaccggccuggagcugacccugaccaacaccagcaucaucaaccacaaguucugcaaccugagcgacgcccacaagaagaaccuguacgaccacgcccugaugagcaucaucagcaccuuccaccugagcauccccaacuucaaccaguacgaggccaugagcugcgacuucaacggcggcaagaucagcgugcaguacaaccugagccacagcuacgccggcgacgccgccgaccacugcggcaccguggccaacggcgugcugcagaccuucaugagaauggccuggggcggcagcuacaucgcccuggacagcggcagaggcagaugggacugcaucaugaccagcuaccaguaccugaucauccagaacaccaccugggaggaccacugccaguucagcagacccagccccaucggcuaccugggccugcugagccagagaaccagagacaucuacaucagcagaagacugcugggcaccuucaccuggacccugagcgacagcgagggcaaggacacccccggcggcuacugccugaccagauggaugcugaucgaggccgagcugaagugcuucggcaacaccgccguggccaagugcaacgagaagcacgacgaggaguucugcgacaugcugagacuguucgacuucaacaagcaggccauccagagacugaaggcccccgcccagaugagcauccagcugaucaacaaggccgugaacgcccugaucaacgaccagcuggugaugaagaaccaccugagagacaucaugggcauccccuacugcaacuacagcagauacugcuaccugaaccacaccaccaccggcagaaccagccugcccaagugcugccuggugagcaacggcagcuaccugaacgagacccacuucagcgacgacaucgagcagcaggccgacaacaugaucaccgagaugcugcagaaggaguacauggagagacagggcaagaccccccugggccugguggaccuguucguguucagcaccagcuucuaccugaucagcaucuuccugcaccuggugaagauccccacccacagacacaucgugggcaagagcugccccaagccccacagacugaaccacaugggcaucugcagcugcggccuguacaagcagcccggcgugcccgugaaguggaagagaugaggacuaguaauaaggaaacuguaugaaugucugugggcaggaagugaagagauccuucuguaaagguuuuuggaauuaugucugcugaauaauaaacuuuuuugaaauaauaaaucugguagaaaaaugagaucuaaaaaaaaaaaaaaaaaaaaaaaaaaaaaaaaaaaaaaaaaaaaaaaaaaaaaaaaaaaaaaaaaaaaaaaaaaaaaaaaaaaaaaaaaaaaaaaaaaaa

SEQ ID NO: 32703 - RNA, 1788 nt, Artificial Sequence
  mRNA product Design b-4 (A100) comprising derived and/or modified sequence from LASV(G733-SLE-2010;Clade IV)__AIT17154__GPCmut7 (opt4)
aggagagucccgcagucggcguccagcggcucugcuuguucgugugugugucguugcaggccuuauucaagcuuaccaugggccagaucgugaccuucuuccaggaggugccccacgugaucgaggaggugaugaacaucgugcugaucgcccugagcauccuggccgugcugaagggccuguacaacuucgccaccugcggcaucgugggccuggugagcuuccugcugcugugcggcagaagcugcaccaccagccuguacaagggcguguacgagcugcagacccuggagcugaacauggagacccugaacaugaccaugccccugagcugcaccaagaacaacagccaccacuacaucauggugggcaacgagaccggccuggagcugacccugaccaacaccagcaucaucaaccacaaguucugcaaccugagcgacgcccacaagaagaaccuguacgaccacgcccugaugagcaucaucagcaccuuccaccugagcauccccaacuucaaccaguacgaggccaugagcugcgacuucaacggcggcaagaucagcgugcaguacaaccugagccacagcuacgccggcgacgccgccaaccacugcggcaccaucgccaacggcgugcugcagaccuucaugagaauggccuggggcggcagcuacaucgcccuggacagcggcagagacagaugggacugcaucaugaccagcuaccaguaccugaucauccagaacaccaccugggaggaccacugccaguucagcagacccagccccaucggcuaccugggccugcugagccagagaaccagagacaucuacaucagcagaagacugcugggcaccuucaccuggacccugagcgacagcgagggcaaggacacccccggcggcuacugccugaccagauggaugcugaucgaggccgagcugaagugcuucggcaacaccgccguggccaagugcaacgagaagcacgacgaggaguucugcgacaugcugagacuguucgacuucaacaagcaggccauccagagacugaaggcccccgcccagaugagcauccagcugaucaacaaggccgugaacgcccugaucaacgaccagcugaucaugaagaaccaccugagagacaucaugggcauccccuacugcaacuacagcaaguacugcuaccugaaccacaccaccaccggcaagaccagccugcccaagugcugccuggugagcaacggcagcuaccugaacgagacccacuucagcgacgacaucgagcagcaggccgacaacaugaucaccgagaugcugcagaaggaguacauggagagacagggcaagaccccccugggccugguggaccuguucguguucagcaccagcuucuaccugaucagcaucuuccugcaccuggugaagauccccacccacagacacguggugggcaagagcugccccaagccccacagacugaaccacaugggcaucugcagcugcggccuguacggccagcccggcgugcccgugaaguggaagagaugaggacuaguaauaaggaaacuguaugaaugucugugggcaggaagugaagagauccuucuguaaagguuuuuggaauuaugucugcugaauaauaaacuuuuuugaaauaauaaaucugguagaaaaaugagaucuaaaaaaaaaaaaaaaaaaaaaaaaaaaaaaaaaaaaaaaaaaaaaaaaaaaaaaaaaaaaaaaaaaaaaaaaaaaaaaaaaaaaaaaaaaaaaaaaaaaa

SEQ ID NO: 32704 - RNA, 1788 nt, Artificial Sequence
  mRNA product Design b-4 (A100) comprising derived and/or modified sequence from MOPV/LASV reassortant(IGS-1;Clade IV)__AFY05576__GPCmut7 (opt4)
aggagagucccgcagucggcguccagcggcucugcuuguucgugugugugucguugcaggccuuauucaagcuuaccaugggccagaucgugaccuucuuccaggaggugccccacgugaucgaggaggugaugaacaucgugcugaucgcccugagcgugcuggccgugcugaagggccuguacaacuucgccaccugcggccuggugggccuggugaccuuccugcugcugugcggcagaagcugcaccaccagccuguacaagggcguguacgagcugcagacccuggagcugaacauggagacccugaacaugaccaugccccugagcugcaccaagaacaacagccaccacuacaucauggugggcaacgagaccggccuggagcugacccugaccaacaccagcaucaucaaccacaaguucugcaaccugagcgacgcccacaagaagaaccuguacgaccacgcccugaugagcaucaucagcaccuuccaccugagcauccccaacuucaaccaguacgaggccaugagcugcgacuucaacggcggcaagaucagcgugcaguacaaccugagccacagcuacgccggcgacgccgccaaccacugcggcaccguggccaacggcgugcugcagaccuucaugagaauggccuggggcggcagcuacaucgcccuggacagcggcagaggcaacugggacugcaucaugaccagcuaccaguaccugaucauccagaacaccaccugggaggaccacugccaguucagcagacccagccccaucggcuaccugggccugcugagccagagaaccagagacaucuacaucagcagaagacugcugggcaccuucaccuggacccugagcgacagcgagggcgaggacacccccggcggcuacugccugaccagauggaugcugaucgaggccgagcugaagugcuucggcaacaccgccguggccaagugcaacgagaagcacgacgaggaguucugcgacaugcugagacuguucgacuucaacaagcaggccauccagagacugaaggcccccgcccagaugagcauccagcugaucaacaaggccgugaacgcccugaucaacgaccagcugaucaugaagaaccaccugagagacaucaugggcauccccuacugcaacuacagcaaguacugcuaccugaaccacaccaccaccggcagaaccagccugcccaagugcugccuggugagcaacggcagcuaccugaacgagacccacuucagcgacgacaucgagcagcaggccgacaacaugaucaccgagaugcugcagaaggaguacauggagagacagggcaagaccccccugggccugguggaccuguucguguucagcaccagcuucuaccugaucagcaucuuccugcaccuggugaagauccccacccacagacacaucgugggcaagagcugccccaagccccacagacugaaccacaugggcaucugcagcugcggccuguacaagcagcccggcgugcccgugaaguggaagagaugaggacuaguaauaaggaaacuguaugaaugucugugggcaggaagugaagagauccuucuguaaagguuuuuggaauuaugucugcugaauaauaaacuuuuuugaaauaauaaaucugguagaaaaaugagaucuaaaaaaaaaaaaaaaaaaaaaaaaaaaaaaaaaaaaaaaaaaaaaaaaaaaaaaaaaaaaaaaaaaaaaaaaaaaaaaaaaaaaaaaaaaaaaaaaaaaa

SEQ ID NO: 32705 - RNA, 1788 nt, Artificial Sequence
  mRNA product Design b-4 (A100) comprising derived and/or modified sequence from LASV(LM765-SLE-2012;Clade IV)__AIT17814__GPCmut7 (opt4)
aggagagucccgcagucggcguccagcggcucugcuuguucgugugugugucguugcaggccuuauucaagcuuaccaugggccagaucgugaccuucuuccaggaggugccccacgugaucgaggaggugaugaacaucgugcugaucgcccugagcauccuggccgugcugaagggccuguacaacuucgccaccugcggccuggugggccuggugaccuuccugcugcugugcggcagaagcugcaccaccagccuguacaagggcguguacgagcugcagacccuggagcugaacauggagacccugaacaugaccaugccccugagcugcaccaagaacaacagccaccacuacaucauggugggcaacgagaccggccuggagcugacccugaccaacaccagcaucaucgaccacaaguucugcaaccugagcgacgcccacagaaagaaccuguacgaccacgcccugaugagcaucaucagcaccuuccaccugagcauccccaacuucaaccaguacgaggccaugagcugcgacuucaacggcggcaagaucagcgugcaguacaaccugagccacagcuacgccaaggacgccgccgaccacugcggcaccguggccaacggcgugcugcagaccuucaugagaauggccuggggcggcagcuacaucgcccuggacagcggcagaggcagaugggacugcaucaugaccagcuaccaguaccugaucauccagaacaccaccugggaggaccacugccaguucagcagacccagccccaucggcuaccugggccugcugagccagagaaccagagacaucuacaucagcagaagacugcugggcaccuucaccuggacccugagcgacagcgagggcaaggacacccccggcggcuacugccugaccagauggaugcugaucgaggccgagcugaagugcuucggcaacaccgccguggccaagugcaacgagaagcacgacgaggaguucugcgacaugcugagacuguucgacuucaacaagcaggccauccagagacugaaggcccccgcccagaugagcauccagcugaucaacaaggccgugaacgcccugaucaacgaccagcugaucaugaagaaccaccugagagacaucaugggcauccccuacugcaacuacagcaaguacugcuaccugaaccacaccaccaccggcaagaccagccugcccaagugcugccuggugagcaacggcagcuaccugaacgagacccacuucagcgacgacaucgagcagcaggccgacaacaugaucaccgagaugcugcagaaggaguacauggagagacagggcaagaccccccugggccugguggaccuguucguguucagcaccagcuucuaccugaucagcaucuuccugcaccuggugaagauccccacccacagacacaucgugggcaagcccugccccaagccccacagacugaaccacaugggcaucugcagcugcggccuguacaagcagcccggcgugcccgugaaguggaagagaugaggacuaguaauaaggaaacuguaugaaugucugugggcaggaagugaagagauccuucuguaaagguuuuuggaauuaugucugcugaauaauaaacuuuuuugaaauaauaaaucugguagaaaaaugagaucuaaaaaaaaaaaaaaaaaaaaaaaaaaaaaaaaaaaaaaaaaaaaaaaaaaaaaaaaaaaaaaaaaaaaaaaaaaaaaaaaaaaaaaaaaaaaaaaaaaaa

SEQ ID NO: 32706 - RNA, 1788 nt, Artificial Sequence
  mRNA product Design b-4 (A100) comprising derived and/or modified sequence from LASV(LM776-SLE-2012;Clade IV)__AIT17824__GPCmut7 (opt4)
aggagagucccgcagucggcguccagcggcucugcuuguucgugugugugucguugcaggccuuauucaagcuuaccaugggccagaucgugaccuucuuccaggaggugccccacgugaucgaggaggugaugaacaucgugcugaucgcccugagcauccuggccgugcugaagggccuguacaacuucgccaccugcggccuggugggccuggugaccuuccugcugcugugcggcagaagcugcaccaccagcguguacaagggcguguacgagcugcagacccuggagcugaacauggagacccugaacaugaccaugccccugagcugcaccaagaacaacagccaccacuacaucauggugggcaacgagaccggccuggagcugacccugaccaacaccagcaucaucaaccacaaguucugcaaccugagcgacgcccacaagaagaaccuguacgaccacgcccugaugagcaucaucagcaccuuccaccugagcauccccaacuucaaccaguacgaggccaugagcugcgacuucaacggcggcaagaucagcgugcaguacaaccugagccacagcuacgccggcgacgccgccaaccacugcggcaccguggccaacggcgugcugcagaccuucaugagaauggccuggggcggcagcuacaucgcccuggacagcggccacggcaagugggacugcaucaugaccagcuaccaguaccugaucauccagaacaccaccugggaggaccacugccaguucagcagacccagccccaucggcuaccugggccugcugagccagagaaccagagacaucuacaucagcagaagacugcugggcaccuucaccuggacccugagcgacagcgagggcaaggacacccccggcggcuacugccugaccagauggaugcugaucgaggccgagcugaagugcuucggcaacaccgccguggccaagugcaacgagaagcacgacgaggaguucugcgacaugcugagacuguucgacuucaacaagcaggccauccagagacugaaggcccccgcccagaugagcauccagcugaucaacaaggccgugaacgcccugaucaacgaccagcugaucaugaagaaccaccugagagacaucaugggcauccccuacugcaacuacagcaaguacugcuaccugaaccacaccaccaccggcaagaccagccugcccaagugcugccuggugagcaacggcagcuaccugaacgagacccacuucagcgacgacaucgagcagcaggccgacaacaugaucaccgagaugcugcagaaggaguacauggagagacagggcaagaccccccugggccugguggaccuguucguguucagcaccagcuucuaccugaucagcaucuuccugcaccuggugaagauccccacccacagacacaucgugggcaagagcugccccaagccccacagacugaaccacaugggcaucugcagcugcggccuguacaagcagcccggcgugcccgugagauggaagagaugaggacuaguaauaaggaaacuguaugaaugucugugggcaggaagugaagagauccuucuguaaagguuuuuggaauuaugucugcugaauaauaaacuuuuuugaaauaauaaaucugguagaaaaaugagaucuaaaaaaaaaaaaaaaaaaaaaaaaaaaaaaaaaaaaaaaaaaaaaaaaaaaaaaaaaaaaaaaaaaaaaaaaaaaaaaaaaaaaaaaaaaaaaaaaaaaa

SEQ ID NO: 32707 - RNA, 1788 nt, Artificial Sequence
  mRNA product Design b-4 (A100) comprising derived and/or modified sequence from LASV(Mad39;Clade IV)__ANH09722__GPCmut7 (opt4)
aggagagucccgcagucggcguccagcggcucugcuuguucgugugugugucguugcaggccuuauucaagcuuaccaugggccagaucgugaccuucuuccaggaggugccccacgugaucgaggaggugaugaacaucgugcugaucgcccugagcauccuggccgugcugaagggccuguacaacguggccaccugcggccugaucggccuggugaccuuccugcugcugugcggcagaagcugcaccaccacccuguacaagggcguguacgagcugcaggcccuggagcugaacauggagacccugaacaugaccaugccccugagcugcaccaagaacaacagccaccacuacaucagagugggcaacgagaccggccuggagcugacccugaccaacaccagccugaucaaccacaaguucugcaaccugagcgacgcccacaagaagaaccuguacgaccacgcccugaugagcaucaucagcaccuuccaccugagcauccccaacuucaaccaguacgaggccaugagcugcgacuucaacgacggcaagaucagcgugcaguacaaccugagccacaccuacgccggcgacaccgccaaccacugcggcaccguggccaacggcgugcugcagaccuucaugagaauggccuggggcggcagcuacaucgcccuggacagcggcagaggcggcugggacugcaucaugaccagcuaccaguaccugaucauccagaacaccaccugggaggaccacugccaguucagcagacccagccccaucggcuaccugggccugcugagccagagaaccagagacaucuacaucagcagaagacugcugggcaccuucaccuggacccugagcgacagcgagggcaaggacacccccggcggcuacugccugaccagauggaugcugaucgaggccgagcugaagugcuucggcaacaccgccguggccaagugcaacgagaagcacgacgaggaguucugcgacaugcugagacuguucgacuucaacaagcaggccauccagagacugaaggcccccgcccagaugagcauccagcugaucaacaaggccgugaacgcccugaucaacgaccagcugaucaugaagaaccaccugagagacaucaugggcauccccuacugcaacuacagcaaguacugcuaccugaaccacaccgugaccggcaagaccagccugcccaagugcugccuggugagcaacggcagcuaccugaacgagacccacuucagcgacgacaucgagcagcaggccgacaacaugaucaccgagaugcugcagaaggaguacauggagagacagggcaagaccccccugggccugguggaccuguucguguucagcaccagcuucuaccugaucagcaucuuccugcaccuggugaagauccccacccacagacacguggugggcaagcccugccccaagccccacagacugaaccacaugggcaucugcagcugcggcuucuacaagcagcccggcgugcccgugagauggaagagaugaggacuaguaauaaggaaacuguaugaaugucugugggcaggaagugaagagauccuucuguaaagguuuuuggaauuaugucugcugaauaauaaacuuuuuugaaauaauaaaucugguagaaaaaugagaucuaaaaaaaaaaaaaaaaaaaaaaaaaaaaaaaaaaaaaaaaaaaaaaaaaaaaaaaaaaaaaaaaaaaaaaaaaaaaaaaaaaaaaaaaaaaaaaaaaaaa

SEQ ID NO: 32708 - RNA, 1788 nt, Artificial Sequence
  mRNA product Design b-4 (A100) comprising derived and/or modified sequence from LASV(Z0947-SLE-2011;Clade IV)__AIT17840__GPCmut7 (opt4)
aggagagucccgcagucggcguccagcggcucugcuuguucgugugugugucguugcaggccuuauucaagcuuaccaugggccagaucgugaccuucuuccaggaggugccccacgugaucgaggaggugaugaacaucgugcugaucgcccugagcauccuggccgugcugaagggccuguacaacuucgccaccugcggccuggugggccuggugaccuuccugcugcugugcggcagaagcugcaccaucagccuguacaagggcguguacgagcugcagacccuggagcugaacauggagacccugaacaugaccaugccccugagcugcaccaagaacaacagccaccacuacaucauggugggcaacgagaccggccuggagcugacccugaccaacaccagcaucaucaaccacaaguucugcaaccugagcgacgcccacaagaagaaccuguacgaccacgcccugaugagcaucaucagcaccuuccaccugagcauccccaacuucaaccaguacgaggccaugagcugcgacuucaacggcggcaagaucagcgugcaguacaaccugagccacagcuacgccggcgacgccgccaaccacugcggcaccguggccaacggcgugcugcagaccuucaugagaauggccuggggcggcagcuacaucgcccuggacagcggcagagacagaugggacugcaucaugaccagcuaccaguaccugaucauccagaacaccaccugggaggaccacugccaguucagcagacccagccccaucggcuaccugggccugcugagccagagaaccagagacaucuacaucagcagaagacugcugggcaccuucaccuggacccugagcgacagcgagggcaaggacacccccggcggcuacugccugaccagauggaugcugaucgaggccgagcugaagugcuucggcaacaccgccguggccaagugcaacgagaagcacgacgaggaguucugcgacaugcugagacuguucgacuucaacaagcaggccauccagagacugaaggcccccgcccagaugagcauccagcugaucaacaaggccgugaacgcccugaucaacgaccagcugaucaugaagaaccaccugagagacaucaugggcauccccuacugcaacuacagcaaguacugcuaccugaaccacaccaccaccggcaagaccagccugcccaagugcugccuggugagcaacggcagcuaccugaacgagacccacuucagcgacgacaucgagcagcaggccgacaacaugaucaccgagaugcugcagaaggaguacauggagagacagggcaagaccccccugggccugguggaccuguucguguucagcaccagcuucuaccugaucagcaucuuccugcaccuggugaagauccccacccacagacacaucgugggcaagcccugccccaagccccacagacugaaccacaugggcaucugcagcugcggccuguacaagcagcccggcgugcccgugaaguggaagagaugaggacuaguaauaaggaaacuguaugaaugucugugggcaggaagugaagagauccuucuguaaagguuuuuggaauuaugucugcugaauaauaaacuuuuuugaaauaauaaaucugguagaaaaaugagaucuaaaaaaaaaaaaaaaaaaaaaaaaaaaaaaaaaaaaaaaaaaaaaaaaaaaaaaaaaaaaaaaaaaaaaaaaaaaaaaaaaaaaaaaaaaaaaaaaaaaa

SEQ ID NO: 32709 - RNA, 1788 nt, Artificial Sequence
  mRNA product Design b-4 (A100) comprising derived and/or modified sequence from LASV(Josiah;Clade IV)__NP_694870__GPCmut7 (opt5)
aggagagucccgcagucggcguccagcggcucugcuuguucgugugugugucguugcaggccuuauucaagcuuaccaugggccagaucgugaccuucuuucaagaggucccccacguuauugaagaggugaugaacaucgugcugauugcccucagcguccuggcugugcuuaaggggcuguacaauuucgccacaugcggacucguuggccuggugacguuucuucugcucugugggagauccugcaccacaucucuguauaaaggagucuacgaacugcagacccucgagcugaacauggaaacacuuaauaugaccaugccucugagcuguacaaagaacaauucccaucacuauaucauggugggcaacgagaccgggcucgagcugacgcuuaccaauacaucuauuaucaaccauaaauucugcaaucugagcgacgcgcacaagaaaaaccucuacgaucaugcucugauguccaucauuucuaccuuucaccugagcaucccgaauuucaaccaguaugaagccauguccugugacuuuaauggaggcaagauuagcguucaguacaaccucucucacuccuaugccggcgaugcugccaaucauugcgggacaguggcuaacggaguccugcaaaccuucaugcggauggccuggggcgggagcuacaucgcgcuugacucuggacgcggcaacugggauuguauuaugacguccuaccaguaucugaucauucagaauacaaccugggaggaccacugccaguuuagcagacccucuccuaucggguaccucggacugcuuucccaacggacacgcgauaucuauauuagcagacggcugcucggcaccuucaccuggacacuguccgacucugaaggcaaggauacgcccgggggauacugucugacccgcuggaugcucaucgaggccgagcugaaaugcuuuggcaacacagcuguggccaaguguaaugaaaaacaugacgaggaguucugcgauaugcuuagacuguuugacuucaacaagcaggcuauucagcggcucaaagccccugcgcagaugagcauccaacugauuaauaaggccgugaacgcucuuaucaaugaucagcugaucaugaagaaccaccuccgcgacauuauggggauccccuauugcaauuacuccaaauauuguuaccugaaccacaccacaaccggaagaacgagccugccuaagugcugucucgucucuaauggcuccuaccugaacgaaacacauuucagcgacgauauugaacagcaagccgacaauaugaucaccgagaugcuucagaaagaguauauggaacggcaggggaagaccccgcugggacucguugaucuguuuguguucucuaccagcuuuuaccugauuuccaucuuccuucaccucgugaaaauccccacacaucgccacauugucggcaagucuugcccuaaaccccauagacugaaccacaugggcaucuguagcugcgggcuguauaagcagccuggagugcccguuaaguggaaacggugaggacuaguaauaaggaaacuguaugaaugucugugggcaggaagugaagagauccuucuguaaagguuuuuggaauuaugucugcugaauaauaaacuuuuuugaaauaauaaaucugguagaaaaaugagaucuaaaaaaaaaaaaaaaaaaaaaaaaaaaaaaaaaaaaaaaaaaaaaaaaaaaaaaaaaaaaaaaaaaaaaaaaaaaaaaaaaaaaaaaaaaaaaaaaaaaa

SEQ ID NO: 32710 - RNA, 1785 nt, Artificial Sequence
  mRNA product Design b-4 (A100) comprising derived and/or modified sequence from LASV(LP;Clade I)__AAF86701__GPCmut7 (opt5)
aggagagucccgcagucggcguccagcggcucugcuuguucgugugugugucguugcaggccuuauucaagcuuaccaugggccagaucauuaccuucuuucaagaggugccccacgucaucgaagagguuaugaacauugugcugaucgcccucagccugcuugcuauucugaaggggcucuacaauaucgccacaugcggaaucauuggccugguggcguuccuuuuucugugugggaaauccugcucucucacgcugaagggaggcuaugaacugcagacccucgagcugaacauggaaacacuuaauaugaccaugccucugagcuguaccaaaaacuccucucaucacuacaucagagucgggaaugagacaggacucgagcugacacuuaccaacacgagcauuaucaaucauaaguucugcaaccuguccgacgcucacaaaaagaaucucuaugaucaugcccugaugucuauuaucagcaccuuucaccuguccauuccgaacuucaaucaguacgaagccaugagcugugacuuuaacggcggcaagaucucugugcaguauaaucucucccacagcuacgcuggggaugccgcugagcauugcggaacaguugccaacggcgugcugcaaaccuucaugcggauggcguggggagggcgcuauaucgcccuugacucuggcaaagggaauugggauuguauuaugacauccuaccaguaccugaucauucagaacaccacgugggaagaccacugccaguuuagcagacccucuccuaucggauaucucggccugcuuucccaacggacacgcgauauuuacaucagcagacggcugcucggcaccuucacauggacccuguccgacucugaggggaacgagacccccggaggcuauugucugacacgcuggaugcucaucgaagcugagcugaagugcuuugggaauacggccgucgcuaaauguaacgaaaagcaugaugaggaguucugcgacaugcuuagacuguuugauuucaauaaacaggccauucggcgccucaaggcgccugcccagaugagcauccagcugauuaacaaggcugugaaugcccuuaucaacgaccaacugauuaugaaaaaucaccucagagauaucaugggaauccccuacugcaacuauuccaaguacuguuaucugaaucacaccagcucuggccggacaucccugccuaaaugcugucucauuagcaacgggucuuaccugaaugaaacccaguucagcgacgacaucgagcagcaagcugauaacaugauuacagaaaugcuucagaaggaguacaucgaacgccagggaaaaaccccgcugggccucguugacauuuuuaucuucuccacgucuuuuuaucugauuagcaucuuccugcaucuuaucaagauucccacacacagacauaucgugggcaaaccuugccccaagccucaccggcucaaucauaugggggucuguuccugcggacuguacaagcaccccggcgugccgaccaaauggaagcgcugaggacuaguaauaaggaaacuguaugaaugucugugggcaggaagugaagagauccuucuguaaagguuuuuggaauuaugucugcugaauaauaaacuuuuuugaaauaauaaaucugguagaaaaaugagaucuaaaaaaaaaaaaaaaaaaaaaaaaaaaaaaaaaaaaaaaaaaaaaaaaaaaaaaaaaaaaaaaaaaaaaaaaaaaaaaaaaaaaaaaaaaaaaaaaaaaa

SEQ ID NO: 32711 - RNA, 1785 nt, Artificial Sequence
  mRNA product Design b-4 (A100) comprising derived and/or modified sequence from LASV(803213;Clade II)__AAF86703__GPCmut7 (opt5)
aggagagucccgcagucggcguccagcggcucugcuuguucgugugugugucguugcaggccuuauucaagcuuaccaugggccagaucauuaccuucuuucaagaggugccccacgucaucgaagagguuaugaacauugugcugaucgcccucagccugcuugcuauucugaaggggaucuacaauguggccacaugcggacucuucggccugaucuccuuucuucugcucugugggagaucuugcagcgucacguauaaaggaguguacgaacugcagacccuggagcucaacauggcgaaucugaacaugacaaugccucuuuccuguaccaagaauaacucucaucacuauauuaugguuggcaaugaaacagggcuggagcucacccugacaaacaccagcaucauuaaucauaaauucugcaaccuuuccgacgcucacaagaaaaaucuguacgaucaugcccucaugucuaucauuagcacguuucaccuguccaucccgaacuucaaucaguaugaggccaugagcugugacuuuaacggaggcaagauuucugugcaguacaaucugucccacagcuucgcugucgaugccgcuaaccauugcggcaccaucgccaacggggugcuccaaacauuuaugcggauggcguggggaggcucuuauaucgcccuggacuccgggaagggaaauugggauuguauuaugaccagcuaccaguaccuuaucauucagaacacaaccugggaagaccacugccaguucucucgccccuccccuaucggcuaucuggggcuccugagccaaagaacgcgggauauuuacaucucccgcagacuucugggaacauuuaccuggacacucucugacagcgagggcaaugaagcucccggcggguauugucugacccgguggaugcugaucgaggccgagcucaaaugcuucggaaacaccgcuguugccaaguguaaugaaaaacaugaugaggaauuuugcgacaugcugcgccuuuucgauuucaacaagcaggcgauuaaaagacugaagacgccugcccagauguccauccagcucauuaauaaggcugugaacgcccugaucaaugaccaacuuauuaugaaaaaccaucugcgggauaucaugggcauccccuacugcaauuauagccgcuacuguuaucucaaccacacagucaccgggaagacaucucugccuagaugcugucugguguccaauggaagcuaccucaacgagacccacuuuucugacgacauugaacagcaggcugauaauaugaucacagagaugcugcaaaaagaguacauggaccggcagggcaagaccccgcuugggcugguggaucucuucgucuuuagcacguccuucuaucugauuucuaucuuucugcaccuuguuaaaauucccacacaucgccacaucgugggaaagccuugccccaaaccucauagacucaaccacaugggcauuuguagcugcggccuguacaagcaccccggggugccggucaaguggaaacggugaggacuaguaauaaggaaacuguaugaaugucugugggcaggaagugaagagauccuucuguaaagguuuuuggaauuaugucugcugaauaauaaacuuuuuugaaauaauaaaucugguagaaaaaugagaucuaaaaaaaaaaaaaaaaaaaaaaaaaaaaaaaaaaaaaaaaaaaaaaaaaaaaaaaaaaaaaaaaaaaaaaaaaaaaaaaaaaaaaaaaaaaaaaaaaaaa

SEQ ID NO: 32712 - RNA, 1785 nt, Artificial Sequence
  mRNA product Design b-4 (A100) comprising derived and/or modified sequence from LASV(GA391;Clade III)__CAA36645__GPCmut7 (opt5)
aggagagucccgcagucggcguccagcggcucugcuuguucgugugugugucguugcaggccuuauucaagcuuaccaugggccagaucgugaccuucuuucaagaggucccccacguuauugaagaggugaugaacaucgugcugauugcccucagcauccuggcuauucuuaaggggcuguacaaugucgccacaugcggacucaucggccuggugacguuccuucugcucuccgggagaucuuguagccugaucuauaaaggaaccuacgaacugcagacacucgagcugaacauggaaacccuuaauaugacaaugccucuguccugcaccaagaacaauucucaucacuauauucggguuggcaacgagacagggcucgagcugacccuuacgaauaccagcauccugaaccauaaauuuuguaaucucuccgacgcgcacaagcgcaaccuguacgaucauucucugaugagcauuaucuccacauuccaccucagcauuccgaauuuuaaccaguaugaagcuaugucuugcgacuucaauggaggcaaaaucaccgugcaguacaaccugucccacagcuuugccgucgaugccgcuggccauugugggacacuugccaauggagugcugcaaaccuucaugagaauggcuuggggcgggucuuauauugcccucgacuccggacggggcaacugggauugcaucaugacgagcuaccaguaccugaucauucagaacacaaccugggacgaucacugucaguuuucucgccccuccccuaucggguaucuuggacugcucagccaaagaacacgggacauuuacaucucccgcagacugcugggcaccuucaccuggacacucucugauagcgagggcaaugaaacgcccgggggauauugccugacccgguggaugcuuauugaggcggagcugaaguguuuuggcaacacagccguugcuaagugcaaugaaaaacaugacgaggaguucugugauaugcuccgccuguuugacuucaacaagcaggccaucagacggcuuaaaaccccugcucagauguccauccagcugauuaauaaggccgugaacgcgcucaucaaugaucaacugauuaugaaaaaccaucugcgcgacaucauggggauucccuacugcaauuauagcagauacugcuaucucaaccacacaucuaccggaaagacgucccugccucgguguugccuuaucagcaauggcucuuaccugaacgaaacaaaguucagcgacgauaucgaacagcaggccgacaauaugauuaccgagaugcuccaaaaagaguacaucgaucgccaggggaagaccccgcugggacuggucgaccuuuuuguguucuccacaucuuuuuaucucauuagcaucuuccugcaccuggugaaaauucccacccacagacauaucgucggcaagccuugucccaaaccucaccggcucaaccauaugggcauuugcuccugugggcuguacaagcagcccggaguuccggugagauggaaacgcugaggacuaguaauaaggaaacuguaugaaugucugugggcaggaagugaagagauccuucuguaaagguuuuuggaauuaugucugcugaauaauaaacuuuuuugaaauaauaaaucugguagaaaaaugagaucuaaaaaaaaaaaaaaaaaaaaaaaaaaaaaaaaaaaaaaaaaaaaaaaaaaaaaaaaaaaaaaaaaaaaaaaaaaaaaaaaaaaaaaaaaaaaaaaaaaaa

SEQ ID NO: 32713 - RNA, 1788 nt, Artificial Sequence
  mRNA product Design b-4 (A100) comprising derived and/or modified sequence from LASV(AV;Clade V)__CCA30314__GPCmut7 (opt5)
aggagagucccgcagucggcguccagcggcucugcuuguucgugugugugucguugcaggccuuauucaagcuuaccaugggccagaucgugaccuucuuucaagaggucccccacguuauugaagaggugaugaacaucgugcugauugcccucagcauccuggcuguccuuaaggggcuguacaauauugccacaugcggacucaucggccugaucacguuccuucugcucugugggagauccugcucuagcaaccuguauaaaggaguguacgaacugcagucccucgaccugaauauggagacccuuaacaugacaaugccucugucuuguaccaagaauaacagccaucacuauauucggguuggcaaugauacagggcucgaacugacccuuacaaacaccuccauccugaaucauaaauuuugcaaccucucugacgcgcacaagaaagaucuguacgaccaugcucugaugagcauuaucuccacguuccaccucagcauuccgaauuuuaaccaguaugaggccaugucuugugauuucaauggaggcaagaucuccgugcaguacaaccugagccacucuuaugccauugacgcugccaaucauugcggcaccgucgcuaacgggauccuucaaacauuuaugcgcauggccuggggaggcuccuacaucgcgcuggauagcgggagaggaaacugggacuguauuaugaccucuuaccaguaucucaucauucagaauacaaccugggagaaccacugccaguucucccggcccagcccuaucggcuaccuggggcuucugucccaacgcacgagagauauuuauaucucucggcgccuccugggaacauuuaccuggacacugagcgacuccgaaggcaaugccacccccggcggguacugucucaccagauggaugcugaucgaggcugaacuuaagugcuucggaaacacagccguggcuaaauguaaugagaagcaugaugaggaauuuugcgacaugcugcgccucuucgauuuuaacaaacaggccauuagccggcugaagucuccugcgcagauguccauccagcuuauuaauaaagccguuaacgcucugaucaaugaccaacucauuaugaagaaccaccugagagacaucaugggcauccccuauugcaauuacagcaaguauuguuaccugaaccacacgauuaccgggaaaacaucucucccuaagugcugucuggugagcaauggauccuaccuuaacgagacccauuucucugaugacaucgaacagcaggccgauaauaugauuacagagaugcugcaaaaagaauauauggagcggcagggcaagaccccgcucgggcuggucgaccuguucguguuuagcacguccuucuaccuuaucagcauuuuucuccgccuggugaaaauccccacacacagacauauugucggaaagccuugccccaaaccucaccggcugaaccauaugggcaucuguucuugcggccucuauaagcagcccgggguuccggugcgcuggaagagaugaggacuaguaauaaggaaacuguaugaaugucugugggcaggaagugaagagauccuucuguaaagguuuuuggaauuaugucugcugaauaauaaacuuuuuugaaauaauaaaucugguagaaaaaugagaucuaaaaaaaaaaaaaaaaaaaaaaaaaaaaaaaaaaaaaaaaaaaaaaaaaaaaaaaaaaaaaaaaaaaaaaaaaaaaaaaaaaaaaaaaaaaaaaaaaaaa

SEQ ID NO: 32714 - RNA, 1785 nt, Artificial Sequence
  mRNA product Design b-4 (A100) comprising derived and/or modified sequence from LASV(Togo/2016/7082;Clade VI)__AMR44577__GPCmut7 (opt5)
aggagagucccgcagucggcguccagcggcucugcuuguucgugugugugucguugcaggccuuauucaagcuuaccaugggccagaucauuaccuucuuucaagaggugccccacgucaucgaagagguuaugaacauugugcugaucgcccucagccugcuugcuauucugaaggggguguacaaugucgccacaugcggaaucaucggccucgugacguuccuguuucuuugugggagauccugcucucugauuuauaaaggaagcuacgaacuccagacccuggagcugaacauggaaacacucaauaugaccaugccucuguccuguacaaagaacucuagccaucacuauauccggguuggcaaugagaccgggcuugagcugacacucaccaacacguccauuaucaaucauaaauucugcaaccugucugacgcgcacaagcgcaaucuuuacgaucaugcucugaugagcauucucuccaccuuucaccugagcaucccgaacuucaaucaguaugaagccaugucuugugacuuuaacggaggcaaaauuuccgugcaguacaaucugagccacgccuaugcugucgaugccgcugagcauugcggcacaguggccaacgggguucuccaaaccuucaugagaauggcguggggaggcucuuacaucgcccuggacuccgggcggggaaauugggauuguaucaugacaagcuaccaguaucuuauuauccagaacaccacgugggaagaccacugccaguuuucucgccccuccccuauuggcuaccuggggcuccugagccaaagaacacgggauaucuauauuucccgcagacuucugggaaccuucacauggacccucucugacagcgagggcaacgagacccccggcggguacugucugacacgguggaugcugaucgaagcugagcucaagugcuuuggaaauacggccguggcuaaguguaacgaaaaacaugaugaggaguucugcgacaugcugcgccuuuuugauuucaauaagcaggccauccagagacugaaauccccugcgcagaugagcauucaacucaucaacaaggccgucaaugcucugauuaacgaccagcuuaucaugaaaaaucaucugcgggauaugaugggcauucccuauugcaacuacucuaaguauuguuaccucaaucacaccuccagcgggcgcacaucucugccuaagugcugucuggugagcaacggauccuaccucaaugaaacccacuucucugacgacaucgagcagcaagccgauaacaugaucacagaaaugcugcagaaagaguauauugacagacagggcaagaccccgcuugggcugguggaucucuuugucuucagcacguccuuuuaccugaucagcauuuuccugcaccuuaucaaaauucccacacaucggcacaucguuggaaagccuugccccaaaccucaucgccucaaucacaugggcauuuguucuugcggccuguauaagcagcccggggugccgaccagauggaaacggugaggacuaguaauaaggaaacuguaugaaugucugugggcaggaagugaagagauccuucuguaaagguuuuuggaauuaugucugcugaauaauaaacuuuuuugaaauaauaaaucugguagaaaaaugagaucuaaaaaaaaaaaaaaaaaaaaaaaaaaaaaaaaaaaaaaaaaaaaaaaaaaaaaaaaaaaaaaaaaaaaaaaaaaaaaaaaaaaaaaaaaaaaaaaaaaaa

SEQ ID NO: 32715 - RNA, 1785 nt, Artificial Sequence
  mRNA product Design b-4 (A100) comprising derived and/or modified sequence from LASV(KAK-428;Clade n.d. (VII))__ANH09740__GPCmut7 (opt5)
aggagagucccgcagucggcguccagcggcucugcuuguucgugugugugucguugcaggccuuauucaagcuuaccaugggccagaucgugaccuucuuucaagaggucccccacguuauugaagaggugaugaacaucgugcugauugcccucagccugcuugcuauccugaaggggcucuacaauuucgccacaugcggagucauuggccugaucacguuucuucugcucugugggagauccugcucugcgaccuauaaaggacaguacgaacugcagacacuggagcucaacauggaaagccugaauaugaccaugccucuuuccuguacaaagaacaauucucaucacuauauccgggcuggcaacaauaccgggcuggagcucacacugaccaacacgagcauuaucucccauaaauucugcaaucuuucugacgcccacaagaaaaaccuguacgaucauacccucaugagcauuaucacaaccuuucaccuguccauuccgaauuucaaccaguaugaggccaugagcugugacuuuaauggaggcaagaucucuauucaauacaaccugucccacagcuaugcuggcgaugccgcucagcauugcgggacaguggccaauggaguucuccagaccuucaugcgcauggcguggggcgggucuuaccuggcccuugacuccggaagacggggcugggauuguaucaucagcucuuaccaguaucugauuauccaaaacacgacaugggacgaucacugccaguuuucccgccccagcccuauuggguaccucggauucgugucccagaagaccagagacaucuauauuucucggcgccugcuuggcacauuuaccuggacccugagcgauuccgaaggccaugacaugcccgggggauacugucucacaagauggaugcugaucgaggcugaucugaaaugcuucggcaacacggccgucgcuaaguguaaugaaaaacacgacgaggaguuuugcgauauguggcgccucuucgacuucaacaagcaggccauccaacggcugaaagcgccugcccagaugaauauucagcuuaucaacaaggcugugaaugcccugauuaacgaccaacucaugaugaagaaucaccugagagauaucauggggauucccuauugcaacuacagcaaauuuuguuaucuuaauaacaccacaaccggacggacaucucugccucgcugcugucucaucuccaauggcagcuaccugaacgaaacccauuucucugacgauaucgagcagcaggcugacaauaugauuacggaaaugcugcagaaggaguacauggauagacaagggaaaacaccgcucggacugguugaccuuuuuguguucagcaccuccuuuuaucugaucaccauuuuccuccaccuggucaagauccccacacaucggcacauugugggcaaaccuugccccaagccucaucgccugaaccacaugggcaucuguucuugcgggcuuuacaaacagcccggagugccggucagauggaagcggugaggacuaguaauaaggaaacuguaugaaugucugugggcaggaagugaagagauccuucuguaaagguuuuuggaauuaugucugcugaauaauaaacuuuuuugaaauaauaaaucugguagaaaaaugagaucuaaaaaaaaaaaaaaaaaaaaaaaaaaaaaaaaaaaaaaaaaaaaaaaaaaaaaaaaaaaaaaaaaaaaaaaaaaaaaaaaaaaaaaaaaaaaaaaaaaaa

SEQ ID NO: 32716 - RNA, 1785 nt, Artificial Sequence; identical to SEQ ID NO: 32710
  mRNA product Design b-4 (A100) comprising derived and/or modified sequence from LASV(Pinneo-NIG-1969;Clade I)__AIT17836__GPCmut7 (opt5)

SEQ ID NO: 32717 - RNA, 1785 nt, Artificial Sequence
  mRNA product Design b-4 (A100) comprising derived and/or modified sequence from LASV(ISTH0009-NIG-2011;Clade II)__AIT17404__GPCmut7 (opt5)
aggagagucccgcagucggcguccagcggcucugcuuguucgugugugugucguugcaggccuuauucaagcuuaccaugggccagaucauuaccuucuuucaagaggugccccacgucaucgaagagguuaugaacauugugcugaucgcccucagccugcuugcuauucugaaggggaucuacaauguggccacaugcggacucuucggccuggucuccuuucuucugcucugugggagaucuugcagcacgaccuauaaaggaguguacgaacugcagacacuggagcucgacauggcgucccugaacaugaccaugccucuuucuuguacaaagaauaacagccaucacuauaucaugguuggcaaugaaaccgggcuggagcucacacugaccaacacguccauuaucaaucauaaauucugcaaccuuucugaugcucacaagaaaaaucuguacgaccaugcccucaugagcauuaucuccaccuuucaccugagcauuccgaacuucaaucaguaugaggccaugucuugugauuuuaacggaggcaagaucuccgugcaguacaaucugagccacgcuuaugccgucgacgcugccaaccauugcggcacaauugcgaauggggugcuccaaaccuucaugcggauggccuggggaggcucuuacaucgcucuggauuccgggaagggaagcugggacuguaucaugacaucuuaccaguaucuuauuauccagaacaccacgugggaagaucacugccaguuuucccgccccagcccuauuggcuaccuggggcuccugucccaaagaacacgggacaucuauauuucucgcagacuucugggaaccuucacauggacccucagcgauuccgagggcaacgaaacccccggcggguacugucugacacgguggaugcugaucgaggccgagcucaaaugcuuuggaaauacggcuguugccaaguguaacgaaaaacaugacgaggaguucugcgauaugcugcgccuuuuugacuucaauaagcaggcgaucagacggcugaaaaccccugcccagaugagcauucagcucaucaacaaggcugugaaugcccugauuaacgaucaacuuaucaugaagaaucaucugcgcgacauuaugggcauccccuauugcaacuacucuaaauauuguuaccucaaucacacagucaccgggaagacaucccugccuagaugcugucuggugagcaacggaucuuaccucaaugaaacccacuucagcgacgauaucgaacagcaggcugacaacaugauuacggagcugcuucaaaaagaguauauggaucggcagggcaagacaccgcuggggcucguggaccuguuugucuucuccaccucuuuuuaccugaucagcauuuuccuucaccucaucaaaauucccacccaucgccacaucacaggaaagccuugccccaaaccucauagacugaaucacaugggcauuuguuccugcggccuguauaagcaccccgggguuccggugaaguggaaacggugaggacuaguaauaaggaaacuguaugaaugucugugggcaggaagugaagagauccuucuguaaagguuuuuggaauuaugucugcugaauaauaaacuuuuuugaaauaauaaaucugguagaaaaaugagaucuaaaaaaaaaaaaaaaaaaaaaaaaaaaaaaaaaaaaaaaaaaaaaaaaaaaaaaaaaaaaaaaaaaaaaaaaaaaaaaaaaaaaaaaaaaaaaaaaaaaa

SEQ ID NO: 32718 - RNA, 1785 nt, Artificial Sequence
  mRNA product Design b-4 (A100) comprising derived and/or modified sequence from LASV(ISTH2010-NIG-2012;Clade II)__AIT17482__GPCmut7 (opt5)
aggagagucccgcagucggcguccagcggcucugcuuguucgugugugugucguugcaggccuuauucaagcuuaccaugggccagaucauuaccuucuuucaagaggugccccacgucaucgaagagguuaugaacauugugcugaucgcccucagccugcuugcuauucugaaggggaucuacaauguggccacaugcggacucuucggccuggucuccuuucuucugcucugugggagaucuugcagcacgaccuauaaaggaguguacgaacugcagacacuggagcucgacauggcgucccugaacaugaccaugccucuuucuuguacaaagaauaacagccaucacuauaucaugguuggcaaugaaaccgggcuggagcucacacugaccaacacguccauuaucaaucauaaauucugcaaccuuucugaugcucacaagaaaaaucuguacgaccaugcccucaugagcauuaucuccaccuuucaccugagcauuccgaacuucaaucaguaugaggccaugucuugugauuuuaacggaggcaagaucuccgugcaguacaaucugagccacgcuuaugccgucgacgcugccaaccauugcggcacaauugcgaauggggugcuccaaaccuucaugcggauggccuggggaggcucuuacaucgcucuggauuccgggaagggaagcugggacuguaucaugacaucuuaccaguaucuuauuauccagaacauuaccugggaagaucacugccaguuuucccgccccagcccuaucggcuaccuggggcuccugucccaaagaacgcgggacauuuauaucucucgcagacuucugggaacauucaccuggacacucagcgauuccgagggcaacgaaacccccggcggguacugucugacccgguggaugcugaucgaggccgagcucaaaugcuuuggaaauacagcuguugccaaguguaacgaaaaacaugacgaggaguucugcgauaugcugcgccuuuuugacuucaauaagcaggcgauuagacggcugaaaacgccugcccagaugagcauccagcucauuaacaaggcugugaaugcccugaucaacgaucaacuuauuaugaagaaucaucugcgcgacaucaugggcauccccuauugcaacuacucuaaauauuguuaccucaaucacaccgucacagggaagaccucccugccuagaugcugucuggugagcaacggaucuuaccucaaugaaacacacuucagcgacgauauugaacagcaggcugacaacaugaucaccgagcugcuucaaaaagaguauauugaucggcagggcaagacgccgcuggggcucguggaccuguuugucuucuccacaucuuuuuaccugaucagcauuuuccuucaccucguuaaaauccccacccaucgccacguggugggaaagccuugccccaaaccucauagacugaaucacaugggcauuuguuccugcggccuguauaagcaccccggggucccggugaaguggaaacggugaggacuaguaauaaggaaacuguaugaaugucugugggcaggaagugaagagauccuucuguaaagguuuuuggaauuaugucugcugaauaauaaacuuuuuugaaauaauaaaucugguagaaaaaugagaucuaaaaaaaaaaaaaaaaaaaaaaaaaaaaaaaaaaaaaaaaaaaaaaaaaaaaaaaaaaaaaaaaaaaaaaaaaaaaaaaaaaaaaaaaaaaaaaaaaaaa

SEQ ID NO: 32719 - RNA, 1785 nt, Artificial Sequence
  mRNA product Design b-4 (A100) comprising derived and/or modified sequence from LASV(Lassa virus/H.sapiens-wt/NGA/2015/ISTH_0543;Clade II)__AVO03639__GPCmut7 (opt5)
aggagagucccgcagucggcguccagcggcucugcuuguucgugugugugucguugcaggccuuauucaagcuuaccaugggccagaucauuaccuucuuucaagaggugccccacgucaucgaagagguuaugaacauugugcugaucgcccucagccugcuugcuauucugaaggggaucuacaauguggccacaugcggacucuucggccuggucuccuuucuucugcucugugggagaucuugcagcacgaccuauaaaggaguguacgaacugcagacacuggagcucgacauggcgaaccugaauaugaccaugccucuuuccuguacaaagaacaauucucaucacuauaucaugguuggcaacgaaaccgggcuggagcucacacugaccaauacgagcauuaucaaccauaaauucugcaaucuuuccgaugcucacaagaaaaaccuguacgaccaugcccucaugucuauuaucagcaccuuucaccuguccauuccgaauuucaaccaguaugaggccaugagcugugauuuuaauggaggcaagaucucugugcaguacaaccugucccacacauaugcugucgacgccgcuaaucauugcggcaccauugccaacggggugcuccaaacauucaugcggauggcguggggaggcagcuacaucgcccuggauucugggaagggauccugggacuguaucaugaccagcuaccaguaucuuguuauucagaacacgacaugggaagaucacugccaguuuucucgccccuccccuaucggcuaccuggggcuccugagccaaagaacccgggacauuuauaucucccgcagacuucugggaacauucaccuggacccucucugauagcgagggcaaugaaacacccggcggguacugucugacgcgguggaugcugauugaggcugagcucaaaugcuuuggaaacaccgccguggcuaaguguaaugaaaaacaugacgaggaguucugcgauaugcugcgccuuuuugacuucaacaagcaggccaucagacggcugaaaaccccugcgcagauguccauccagcucauuaauaaggccgucaacgcucugaucaaugaucaacuuauuaugaagaaccaucugcgcgacaucaugggcauucccuauugcaauuacagcaaauauuguuaccucaaccacacagugacagggaagaccucucugccuagaugcugucugguguccaauggaagcuaccucaacgaaacgcacuucucugacgauaucgaacagcaggccgacaauaugaucacagagcugcuucaaaaagaguauauugaucggcagggcaagaccccgcuggggcucgucgaccuguuuguuuucagcaccuccuuuuaccugaucucuauuuuccuucaccucgugaaaauccccacacaucgccacauuaccggaaagccuugccccaaaccucauagacugaaccacaugggcaucuguagcugcggccuguauaagcaccccggggugccggucaaguggaaacggugaggacuaguaauaaggaaacuguaugaaugucugugggcaggaagugaagagauccuucuguaaagguuuuuggaauuaugucugcugaauaauaaacuuuuuugaaauaauaaaucugguagaaaaaugagaucuaaaaaaaaaaaaaaaaaaaaaaaaaaaaaaaaaaaaaaaaaaaaaaaaaaaaaaaaaaaaaaaaaaaaaaaaaaaaaaaaaaaaaaaaaaaaaaaaaaaa

SEQ ID NO: 32720 - RNA, 1785 nt, Artificial Sequence
  mRNA product Design b-4 (A100) comprising derived and/or modified sequence from LASV(Lassa virus/H.sapiens-wt/NGA/2016/ISTH_0009;Clade II)__AVO03571__GPCmut7 (opt5)
aggagagucccgcagucggcguccagcggcucugcuuguucgugugugugucguugcaggccuuauucaagcuuaccaugggccagaucauuaccuucuuucaagaggugccccacgucaucgaagagguuaugaacauugugcugaucgcccucagccugcuugcuauucugaaggggaucuacaauguggccacaugcggacuccugggccuugucuccuuccugcuccugugugggagaucuugcagcacgaccuauaaaggaguguacgaacugcagacacucgagcuggacauggcgucccuuaacaugaccaugccucugucuuguacaaagaauaacagccaucacuauaucaugguuggcaaugaaaccgggcucgagcugacacuuaccaacacguccauuaucaaucauaaauuuugcaaccugucugaugcucacaagaaaaaucucuacgaccaugcccugaugagcauuaucuccaccuuccaccugagcauuccgaacuuuaaucaguaugaggccaugucuugugauuucaacggaggccggaucuccgugcaguacaaucucagccacucuuaugcugucgacgccgcuaaccauugcggcacaauugccaauggggugcugcaaaccuuuaugcgcauggcguggggaggcuccuacaucgcccuugauagcgggaagggaucuugggacuguaucaugacauccuaccaguaucugauuauccagaacaccacgugggaagaucacugccaguucagcagacccuccccuauuggcuaccucgggcugcuuucucaacggacacgcgacaucuauauuagcagacggcugcucggaaccuuuacauggacccuguccgauagcgagggcaacgaaacccccggcggguacugucugacacgcuggaugcucaucgaggcugagcugaagugcuucggaaauacggccguugcuaaauguaacgaaaagcaugacgaggaauuuugcgauaugcuuagacuguucgacuuuaauaaacaggccauccggcgccucaagaccccugcgcagaugucuauucagcugaucaacaaagccgugaaugcucuuauuaacgaucaacugaucaugaagaaucaccucagagacauuaugggcauccccuauugcaacuacuccaaguauuguuaccugaaucacacagucaccgggaaaacaagccugccucggugcugucucgugucuaacggaagcuaccugaaugagacccauuucuccgacgauaucgaacagcaggccgacaacaugauuacggagcuucugcaaaaggaguauaucgaucgccagggcaaaacaccgcucgggcugguggaccuguucgucuuuucuaccagcuucuaccuuauuuccaucuuucuccaccugguuaagauucccacccauagacacaucacaggaaaaccuugccccaagccucaucggcugaaucacaugggcauuuguagcugcggccucuauaaccaccccggggugccggugaaauggaagcgcugaggacuaguaauaaggaaacuguaugaaugucugugggcaggaagugaagagauccuucuguaaagguuuuuggaauuaugucugcugaauaauaaacuuuuuugaaauaauaaaucugguagaaaaaugagaucuaaaaaaaaaaaaaaaaaaaaaaaaaaaaaaaaaaaaaaaaaaaaaaaaaaaaaaaaaaaaaaaaaaaaaaaaaaaaaaaaaaaaaaaaaaaaaaaaaaaa

SEQ ID NO: 32721 - RNA, 1785 nt, Artificial Sequence
  mRNA product Design b-4 (A100) comprising derived and/or modified sequence from LASV(Lassa virus/H.sapiens-wt/NGA/2016/ISTH_0017;Clade II)__AVO03567__GPCmut7 (opt5)
aggagagucccgcagucggcguccagcggcucugcuuguucgugugugugucguugcaggccuuauucaagcuuaccaugggccagaucauuaccuucuuucaagaggugccccacgucaucgaagagguuaugaacauugugcugaucgcccucagccugcuugcuauucugaaggggaucuacaauguggccacaugcggacucuucggccuggucuccuuucuucugcucugugggagaucuugcagcacgaccuauaaaggaguguacgaacugcagacacuggagcucgacauggcgucccugaacaugaccaugccucuuucuuguacaaagaauaacagccaucacuauaucaugguuggcaaugaaaccgggcuggagcucacacugaccaacacguccauuaucaaucauaaauucugcaaccuuucugaugcucacaagaaaaaucuguacgaccaugcccucaugagcauuaucuccaccuuucaccugagcauuccgaacuucaaucaguaugaggccaugucuugugauuuuaacggaggcaagaucuccgugcaguacaaucugagccacacauaugcuauugacgccgcuaaccauugcggcaccaucgccaaugggguccuccaaacauucaugcggauggcguggggaggcucuuacaucgcccuggauuccgggaagggaagcugggacuguauuaugaccucuuaccaguaucuuaucauucagaacacgacaugggaagaucacugccaguuuucccgccccagcccuaucggcuaccuggggcuccugucccaaagaacccgggacauuuauaucucucgcagacuucugggaacauucaccuggacccucagcgauuccgagggcaacgaaacacccggcggguacugucugacgcgguggaugcugaucgaggcugagcucaaaugcuuuggaaauaccgccguggcuaaguguaacgaaaaacaugacgaggaguucugcgauaugcugcgccuuuuugacuucaauaagcaggccauuagacggcugaaaaccccugcgcagaugagcauccagcucauuaacaaggccguuaaugcucugaucaacgaucaacuuauuaugaagaaucaucugcgcgacaucaugggcauccccuauugcaacuacucuaaauauuguuaccucaaucacacagugacagggaagaccucccugccuagaugcugucuggucagcaacggaucuuaccucaaugaaacgcacuucagcgacgauauugaacagcaggccgacaacaugaucacagagcugcuucaaaaagaguauauggaucggcagggcaagaccccgcuggggcucguggaccuguuuguguucuccaccucuuuuuaccugauuagcaucuuccuucaccucguccgcauucccacacauagacacguuaucggaaaaccuugccccaagccucaucggcugaaucacaugggcauuuguuccugcggccuguauaaacaccccggggugccggugaaguggaagcgcugaggacuaguaauaaggaaacuguaugaaugucugugggcaggaagugaagagauccuucuguaaagguuuuuggaauuaugucugcugaauaauaaacuuuuuugaaauaauaaaucugguagaaaaaugagaucuaaaaaaaaaaaaaaaaaaaaaaaaaaaaaaaaaaaaaaaaaaaaaaaaaaaaaaaaaaaaaaaaaaaaaaaaaaaaaaaaaaaaaaaaaaaaaaaaaaaa

SEQ ID NO: 32722 - RNA, 1785 nt, Artificial Sequence
  mRNA product Design b-4 (A100) comprising derived and/or modified sequence from LASV(Lassa virus/H.sapiens-wt/NGA/2018/ISTH_0959;Clade II)__AVV65099__GPCmut7 (opt5)
aggagagucccgcagucggcguccagcggcucugcuuguucgugugugugucguugcaggccuuauucaagcuuaccaugggccagaucauuaccuucuuucaagaggugccccacgucaucgaagagguuaugaacauugugcugaucgcccucagccugcuugcuauucugaaggggaucuacaauguggucacaugcggacucuucggccugguguccuuucuucugcucugugggagaucuugcagcacgaccuauaaaggaguuuacgaacugcagacacuggagcucgacauggccucccugaacaugaccaugccucuuucuuguacaaagaauaacagccaucacuauaucauggugggcaaugaaaccgggcuggagcucacacugaccaacacguccauuaucaaucauaaauucugcaaccuuucugaugcgcacaagaaaaaucuguacgaccaugcucucaugagcauuaucuccaccuuucaccugagcauuccgaacuucaaucaguaugaggccaugucuugugauuuuaacggaggcaagaucuccguccaguacaaucugagccacgccuaugcuauugacgccgcuaaccauugcggcacaaucgccaauggggugcuccaaaccuucaugcggauggcguggggaggcucuuacaucgcccuggauuccgggaagggaagcugggacuguauuaugacaucuuaccaguaucuuaucauucagaacaccacgugggaagaucacugccaguuuucccgccccagcccuaucggcuaccuggggcuccugucccaaagaacacgggacauuuauaucucucgcagacuucugggaaccuucacauggacccucagcgauuccgagggcaacgaaacccccggcggguacugucugacacgguggaugcugaucgaggcugagcucaaaugcuuuggaaauacggccguugcuaaguguaacgaaaaacaugacgaggaguucugcgauaugcugcgccuuuuugacuucaauaagcaggccauuagacggcugaaaaccccugcgcagaugagcauccagcucauuaacaaggccgugaaugcucugaucaacgaucaacuuauuaugaagaaucaucugcgcgacaucaugggcauccccuauugcaacuacucuaaauauuguuaccucaaucacacagucaccgggaagacaucccugccuagaugcugucuggugagcaacggaucuuaccucaaugaaacccacuucagcgacgauauugaacagcaggccgacaacaugaucacggagcugcuucaaaaagaguauauugaucggcagggcaagacaccgcuggggcucguggaccuguuugucuucuccaccucuuuuuaccugaucagcauuuuccuucaccucguuaaaauccccacccaucgccacgugauuggaaagccuugccccaaaccucauagacugaaucacaugggcaucuguuccugcggccuguauaagcaccccggggugccggucaaguggaaacggugaggacuaguaauaaggaaacuguaugaaugucugugggcaggaagugaagagauccuucuguaaagguuuuuggaauuaugucugcugaauaauaaacuuuuuugaaauaauaaaucugguagaaaaaugagaucuaaaaaaaaaaaaaaaaaaaaaaaaaaaaaaaaaaaaaaaaaaaaaaaaaaaaaaaaaaaaaaaaaaaaaaaaaaaaaaaaaaaaaaaaaaaaaaaaaaaa

SEQ ID NO: 32723 - RNA, 1785 nt, Artificial Sequence
  mRNA product Design b-4 (A100) comprising derived and/or modified sequence from LASV(LASV003-NIG-2008;Clade II)__AIT17580__GPCmut7 (opt5)
aggagagucccgcagucggcguccagcggcucugcuuguucgugugugugucguugcaggccuuauucaagcuuaccaugggccagaucauuaccuucuuucaagaggugccccacgucaucgaagagguuaugaacauugugcugaucgcccucagccugcuugcuauucugaaggggaucuacaauguggccacaugcggacucuucggccuggucuccuuucuucugcucugugggagaucuugcagcacgaccuauaaaggaguguacgaacugcagacacuggagcucgacauggcgucccugaacaugaccaugccucuuucuuguacaaagaauaacagccaucacuauaucaugguuggcaaugaaaccgggcuggagcucacacugaccaacacguccauuaucaaucauaaauucugcaaccuuucugaugcucacaagaaaaaucuguacgaccaugcccucaugagcauuaucuccaccuuucaccugagcauuccgaacuucaaucaguaugaggccaugucuugugauuuuaacggaggcaagaucuccgugcaguacaaucugagccacacauaugcugucgacgccgcuaaccauugcggcaccauugccaauggggugcuccaaacauucaugcggauggcguggggaggcucuuacaucgcccuggauuccgggaagggaagcugggacuguaucaugaccucuuaccaguaucuuauuauccagaacacgacaugggaagaucacugccaguuuucccgccccagcccuauuggcuaccuggggcuccugucccaaagaacccgggacaucuauauuucucgcagacuucugggaacauucaccuggacccucagcgauuccgagagcaacgaaacacccggcggcuacugucugacgcgguggaugcugaucgaggcugagcucaaaugcuuugggaauaccgccguugcuaaguguaacgaaaaacaugacgaggaguucugcgauaugcugcgccuuuuugacuucaauaagcaggccaucagacggcugaaagcgccugcccagaugucuauucagcucaucaacaaggcugugaaugcccugauuaacgaucaacuuaucaugaagaaucaucugcgcgacauuaugggaauccccuauugcaacuacuccaaauauuguuaccucaaucacacagucaccggcagaacaagccugccucggugcugucuggugucuaacgggagcuaccucaaugaaacccacuucuccgacgauaucgaacagcaggcugacaacaugauuacggagcugcuucaaaaggaguauauggaucgccagggaaaaacaccgcugggccucguggaccuguuugucuucucuaccagcuuuuaccugaucuccauuuuccuucaccucguuaagauccccacccauagacacgugauugggaaaccuugccccaagccucaucggcugaaucacaugggaaucuguagcugcggccuguauaaacaccccggcgugccggucaaguggaagcgcugaggacuaguaauaaggaaacuguaugaaugucugugggcaggaagugaagagauccuucuguaaagguuuuuggaauuaugucugcugaauaauaaacuuuuuugaaauaauaaaucugguagaaaaaugagaucuaaaaaaaaaaaaaaaaaaaaaaaaaaaaaaaaaaaaaaaaaaaaaaaaaaaaaaaaaaaaaaaaaaaaaaaaaaaaaaaaaaaaaaaaaaaaaaaaaaaa

SEQ ID NO: 32724 - RNA, 1785 nt, Artificial Sequence
  mRNA product Design b-4 (A100) comprising derived and/or modified sequence from LASV(LASV035-NIG-2009;Clade II)__AIT17588__GPCmut7 (opt5)
aggagagucccgcagucggcguccagcggcucugcuuguucgugugugugucguugcaggccuuauucaagcuuaccaugggccagaucauuaccuucuuucaagaggugccccacgucaucgaagagguuaugaacauugugcugaucgcccucagccugcuugcuauucugaaggggaucuacaauguggccacaugcggacucuucggccuggucuccuuucuucugcucugugggagaucuugcagcacgaccuauaaaggaguguacgaacugcagacacuggagcucgacauggcgucccugaacaugaccaugccucuuucuuguacaaagaauaacagccaucacuauaucaugguuggcaaugaaaccgggcuggagcucacacugaccaacacguccauuaucaaucauaaauucugcaaccuuucugaugcucacaagaaaaaucuguacgaccaugcccucaugagcauuaucuccaccuuucaccugagcauuccgaacuucaaucaguaugaggccaugucuugugauuuuaacggaggcaagaucuccgugcaguacaaucugagccacgcuuaugccgucgacgcugccaaccauugcggcacaauugcgaauggggugcuccaaaccuucaugcggauggccuggggaggcucuuacaucgcucuggauuccgggaagggaagcugggacuguaucaugacaucuuaccaguaucuuauuauccagaacaccacgugggaagaucacugccaguuuucccgccccagcccuauuggcuaccuggggcuccugucccaaagaacacgggacaucuauauuucucgcagacuucugggaaccuucacauggacccucagcgauuccgagggcaacgaaacccccggcggguacugucugacacgguggaugcugaucgaggccgagcucaaaugcuuuggaaauacggcuguugccaaguguaacgaaaaacaugacgaggaguucugcgauaugcugcgccuuuuugacuucaauaagcaggcgaucagacggcugaaagccccugcucagaugagcauucagcucaucaacaaggccgugaaugcucugauuaacgaucaacuuaucaugaagaaucaucugcgcgacauuaugggcauccccuauugcaacuacucuaaauauuguuaccucaaucacaccgucacagggaagaccucccugccuagaugcugucuggugagcaacggaucuuaccucaaugaaacacacuucagcgacgauaucgaacagcaggccgacaacaugauuaccgagcugcuucaaaaagaguauaucgaucggcagggcaagacgccgcuggggcucguggaccuguuugucuucuccacaucuuuuuaccugauuagcaucuuccuucaccucguuaaaauucccacccaucgccacgugaucggaaagccuugccccaaaccucauagacugaaucacaugggcauuuguuccugcggccuguauaagcaccccggggugccggucaaguggaaacggugaggacuaguaauaaggaaacuguaugaaugucugugggcaggaagugaagagauccuucuguaaagguuuuuggaauuaugucugcugaauaauaaacuuuuuugaaauaauaaaucugguagaaaaaugagaucuaaaaaaaaaaaaaaaaaaaaaaaaaaaaaaaaaaaaaaaaaaaaaaaaaaaaaaaaaaaaaaaaaaaaaaaaaaaaaaaaaaaaaaaaaaaaaaaaaaaa

SEQ ID NO: 32725 - RNA, 1785 nt, Artificial Sequence
  mRNA product Design b-4 (A100) comprising derived and/or modified sequence from LASV(LASV1000-NIG-2009;Clade II)__AIT17782__GPCmut7 (opt5)
aggagagucccgcagucggcguccagcggcucugcuuguucgugugugugucguugcaggccuuauucaagcuuaccaugggccagaucauuaccuucuuucaagaggugccccacgucaucgaagagguuaugaacauugugcugaucgcccucagccugcuugcuauucugaaggggaucuacaauguggccacaugcggacucuucggccuggucuccuuucuucugcucugugggagaucuugcagcacgaccuauaaaggaguguacgaacugcagacacuggagcucgacauggcgucccugaacaugaccaugccucuuucuuguacaaagaauaacagccaucacuauaucaugguuggcaaugaaaccgggcuggagcucacacugaccaacacguccauuaucaaucauaaauucugcaaccuuucugaugcucacaagaaaaaucuguacgaccaugcccucaugagcauuaucuccaccuuucaccugagcauuccgaacuucaaucaguaugaggccaugucuugugauuuuaacggaggcaagaucuccgugcaguacaaucugagccacacauaugcugucgacgccgcuaaccauugcggcaccauugccaauggggugcuccaaacauucaugcggauggcguggggaggcucuuacaucgcccuggauuccgggaagggaagcugggacuguaucaugaccucuuaccaguaucuuauuauccagaacacgacaugggaagaucacugccaguuuucccgccccagcccuauuggcuaccuggggcuccugucccaaagaacccgggacaucuauauuucucgcagacuucugggaacauucaccuggacccucagcgauuccgagggcaacgaaacacccggcggguacugucugacgcgguggaugcugaucgaggcugagcucaaaugcuuuggaaauaccgccguugcuaaguguaacgaaaaacaugacgaggaguucugcgauaugcugcgccuuuuugacuucaauaagcaggccaucaaaagacugaagaccccugcgcagaugagcauucagcucaucaacaaggccgugaaugcucugauuaacgaucaacuuaucaugaaaaaucaucugcgggacauuaugggcauccccuauugcaacuacucuaaguauuguuaccucaaucacacagucacagggaaaaccucccugccucgcugcugucuggugagcaacggaucuuaccucaaugaaacgcacuucagcgacgauaucgaacagcaggccgacaacaugauuacagagcugcuucaaaaggaguauaucgauagacagggcaaaaccccgcuggggcucguggaccuguuugucuucuccaccucuuuuuaccugauuagcaucuuccuucaccucguuaagauucccacacaucggcacguggugggaaaaccuugccccaagccucaucgccugaaucacaugggcaucuguuccugcggccuguauaagcaccccggggucccggugaaauggaagagaugaggacuaguaauaaggaaacuguaugaaugucugugggcaggaagugaagagauccuucuguaaagguuuuuggaauuaugucugcugaauaauaaacuuuuuugaaauaauaaaucugguagaaaaaugagaucuaaaaaaaaaaaaaaaaaaaaaaaaaaaaaaaaaaaaaaaaaaaaaaaaaaaaaaaaaaaaaaaaaaaaaaaaaaaaaaaaaaaaaaaaaaaaaaaaaaaa

SEQ ID NO: 32726 - RNA, 1785 nt, Artificial Sequence
  mRNA product Design b-4 (A100) comprising derived and/or modified sequence from LASV(LASV221-NIG-2010;Clade II)__AIT17624__GPCmut7 (opt5)
aggagagucccgcagucggcguccagcggcucugcuuguucgugugugugucguugcaggccuuauucaagcuuaccaugggccagaucauuaccuucuuucaagaggugccccacgucaucgaagagguuaugaacauugugcugaucgcccucagccugcuugcuauucugaaggggaucuacaauguggccacaugcggacucuucggccuggucuccuuucuucugcucugugggagaucuugcagcacgaccuauaaaggaguguacgaacugcagacacuggagcucgacauggcgucccugaacaugaccaugccucuuucuuguacaaagaauaacagccaucacuauaucaugguuggcaaugaaaccgggcuggagcucacacugaccaacacguccauuaucaaucauaaauucugcaaccuuucugaugcucacaagaaaaaucuguacgaccaugcccucaugagcauuaucuccaccuuucaccugagcauuccgaacuucaaucaguaugaggccaugucuugugauuuuaacggaggcaagaucuccgugcaguacaaucugagccacacauaugcuauugacgccgcuaaccauugcggcaccaucgccaaugggguccuccaaacauucaugcggauggcguggggaggcucuuacaucgcccuggauuccgggaagggaagcugggacuguauuaugaccucuuaccaguaucuuaucauucagaacacgacaugggaagaucacugccaguuuucccgccccagcccuaucggcuaccuggggcuccugucccaaagaacccgggacauuuauaucucucgcagacuucugggaacauucaccuggacccucagcgauuccgagggcaacgaaacacccggcggguacugucugacgcgguggaugcugaucgaggcugagcucaaaugcuuuggaaauaccgccguggcuaaguguaacgaaaaacaugacgaggaguucugcgauaugcugcgccuuuuugacuucaauaagcaggccauuagacggcugaaaaccccugcgcagaugagcauccagcucauuaacaaggccguuaaugcucugaucaacgaucaacuuauuaugaagaaucaucugcgcgacaucaugggcauccccuauugcaacuacucuaaauauuguuaccucaaucacacagugacagggaagaccucccugccuagaugcugucuggucagcaacggaucuuaccucaaugaaacgcacuucagcgacgauauugaacagcaggccgacaacaugaucacagagaugcugcaaaaagaguauauggaucggcagggcaagaccccgcuugggcugguggaccucuuuguguucuccaccucuuuuuaccugauuagcaucuuccugcaccuugucaaaauucccacacaucgccacguuaucggaaagccuugccccaaaccucauagacucaaucacaugggcauuuguuccugcggccuguauaagcaccccggggugccggugaaguggaaacggugaggacuaguaauaaggaaacuguaugaaugucugugggcaggaagugaagagauccuucuguaaagguuuuuggaauuaugucugcugaauaauaaacuuuuuugaaauaauaaaucugguagaaaaaugagaucuaaaaaaaaaaaaaaaaaaaaaaaaaaaaaaaaaaaaaaaaaaaaaaaaaaaaaaaaaaaaaaaaaaaaaaaaaaaaaaaaaaaaaaaaaaaaaaaaaaaa

SEQ ID NO: 32727 - RNA, 1785 nt, Artificial Sequence
  mRNA product Design b-4 (A100) comprising derived and/or modified sequence from LASV(LASV237-NIG-2010;Clade II)__AIT17638__GPCmut7 (opt5)
aggagagucccgcagucggcguccagcggcucugcuuguucgugugugugucguugcaggccuuauucaagcuuaccaugggccagaucauuaccuucuuucaagaggugccccacgucaucgaagagguuaugaacauugugcugaucgcccucagccugcuugcuauucugaaggggaucuacaauguggccacaugcggacucuucggccuggucuccuuucuucugcucugugggagaucuugcagcacgaccuauaaaggaguguacgaacugcagacacuggagcucgacauggcgucccugaacaugaccaugccucuuucuuguacaaagaauaacagccaucacuauaucaugguuggcaaugaaaccgggcuggagcucacacugaccaacacguccauuaucaaucauaaauucugcaaccuuucugaugcucacaagaaagaccuguacgaucaugcccucaugagcauuaucuccaccuuucaccugagcauuccgaauuucaaccaguaugaggccaugucuugugacuuuaauggaggcaagaucuccgugcaguacaaccugagccacacauaugcugucgaugccgcuaaucauugcggcaccauugccaacggggugcuccaaacauucaugcggauggcguggggaggcucuuacaucgcccuggacuccgggaagggaagcugggauuguaucaugaccucuuaccaguaucuuauuauccagaauacgacaugggaagaccacugccaguuuucccgccccagcccuauuggcuaccuggggcuccugucccaaagaacccgggauaucuauauuucucgcagacuucugggaacauucaccuggacccucagcgacuccgagggcaacgaaacacccggcggguacugucugacgcgguggaugcugaucgaggcugagcucaaaugcuuuggaaacaccgccguugcuaaguguaaugaaaaacaugaugaggaguucugcgacaugcugcgccuuuuugauuucaacaagcaggccaucagacggcugaaaaccccugcgcagaugagcauucagcucaucaauaaggccgugaacgcucugauuaaugaccaacuuaucaugaagaaccaucugcgcgacauuaugggcauccccuauugcaauuacucuaaauauuguuaccucaaccacacagucacagggaagaccucccugccuagaugcugucuggugagcaauggaucuuaccucaacgaaacgcacuucagcgaugacaucgaacagcaggccgauaauaugauuacagagcugcuucaaaaagaguauauggaccggcagggcaagaccccgcuggggcucguggaucuguuugucuucuccaccucuuuuuaccugaucagcauuuuccuucaccucaucaaaauucccacacaucgccacaucaccggaaagccuugccccaaaccucauagacugaaccacaugggcauuuguuccugcggccuguauaagcaccccgggguuccggugaaguggaaacggugaggacuaguaauaaggaaacuguaugaaugucugugggcaggaagugaagagauccuucuguaaagguuuuuggaauuaugucugcugaauaauaaacuuuuuugaaauaauaaaucugguagaaaaaugagaucuaaaaaaaaaaaaaaaaaaaaaaaaaaaaaaaaaaaaaaaaaaaaaaaaaaaaaaaaaaaaaaaaaaaaaaaaaaaaaaaaaaaaaaaaaaaaaaaaaaaa

SEQ ID NO: 32728 - RNA, 1785 nt, Artificial Sequence
  mRNA product Design b-4 (A100) comprising derived and/or modified sequence from LASV(LASV253-NIG-2011;Clade II)__AIT17670__GPCmut7 (opt5)
aggagagucccgcagucggcguccagcggcucugcuuguucgugugugugucguugcaggccuuauucaagcuuaccaugggccagaucauuaccuucuuucaagaggugccccacgucaucgaagagguuaugaacauugugcugaucgcccucagccugcuugcuauucugaaggggaucuacaauguggccacaugcggacucuucggccuggucuccuuucuucugcucugugggagaucuugcagcacgaccuauaaaggaguguacgaacugcagacacuggagcucgacauggcgucccugaacaugaccaugccucuuucuuguacaaagaauaacagccaucacuauaucaugguuggcaaugaaaccgggcuggagcucacacugaccaacacguccauuaucaaucauaaauucugcaaccuuucugaugcucacaagaaaaaucuguacgaccaugcccucaugagcauuaucuccaccuuucaccugagcauuccgaacuucaaucaguaugaggccaugucuugugauuuuaacggaggcaagaucuccgugcaguacaaucugagccacacauaugcugucgacgccgcuaaccauugcggcaccauugccaauggggugcuccaaacauucaugcggauggcguggggaggcucuuacaucgcccuggauuccgggaagggaagcugggacuguaucaugaccucuuaccaguaucuuauuauccagaacacgacaugggaagaucacugccaguuuucccgccccagcccuauuggcuaccuggggcuccugucccaaagaacccgggacaucuauauuucucgcagacuucugggaacauucaccuggacccucagcgauuccgagggcaacgaaacacccggcggguacugucugacgcgguggaugcugaucgaggcugagcucaaaugcuuuggaaauaccgccguugcuaaguguaacgaaaaacaugacgaggaguucugcgauaugcugcgccuuuuugacuucaauaagcaggccaucagacggcugaaagcgccugcccagaugagcauucagcucaucaacaaggcugugaaugcccugauuaacgaucaacuuaucaugaagaaucaucugcgcgacauuaugggcauccccuauugcaacuacucuaaauauuguuaccucaaucacacagucaccgggagaacaucccugccucggugcugucuggugagcaacggaucuuaccucaaugaaacccacuucagcgacgauaucgaacagcaggcugacaacaugauuacggagcugcuucaaaaggaguauaucgaucgccagggcaaaacaccgcuggggcucguggaccuguuugucuucuccaccucuuuuuaccugauuagcaucuuccuucaccucguuaagauucccacccauagacacaucauuggaaaaccuugccccaagccucaucggcugaaucacaugggcaucuguuccugcggccuguauaaacaccccggggugccggugaaguggaagcgcugaggacuaguaauaaggaaacuguaugaaugucugugggcaggaagugaagagauccuucuguaaagguuuuuggaauuaugucugcugaauaauaaacuuuuuugaaauaauaaaucugguagaaaaaugagaucuaaaaaaaaaaaaaaaaaaaaaaaaaaaaaaaaaaaaaaaaaaaaaaaaaaaaaaaaaaaaaaaaaaaaaaaaaaaaaaaaaaaaaaaaaaaaaaaaaaaa

SEQ ID NO: 32729 - RNA, 1785 nt, Artificial Sequence
  mRNA product Design b-4 (A100) comprising derived and/or modified sequence from LASV(LASV254-NIG-2011;Clade II)__AIT17674__GPCmut7 (opt5)
aggagagucccgcagucggcguccagcggcucugcuuguucgugugugugucguugcaggccuuauucaagcuuaccaugggccagaucauuaccuucuuucaagaggugccccacgucaucgaagagguuaugaacauugugcugaucgcccucagccugcuugcuauucugaaggggaucuacaauguggccacaugcggacucuucggccuggucuccuuucuucugcucugugggagaucuugcagcacgaccuauaaaggaguguacgaacugcagacacuggagcucgacaugaccaaccugaauaugacaaugccucuuuccuguaccaagaacaauucucaucacuauaucaugguuggcaacgaaacagggcuggagcucacccugacgaauaccagcauuaucaaccauaaauucugcaaucuuuccgaugcgcacaagaaaaaccuguacaaucaugcucucaugucuauuaucagcacauuucaccuguccauuccgaacuucaaucaguaugaggccaugagcugugacuuuaacggaggcaagaucucugugcaguacaaucugucccacagcuaugccgucgaugcugccaaccauugcggcaccauugcuaacggggugcuccaaacauucaugcggauggccuggggaggcucuuacaucgcgcuggacuccgggaagggaaauugggauuguaucaugaccagcuaccaguaucuuauuauccagaacacgacaugggaagaccacugccaguuuucucgccccuccccuauuggcuaccuggggcuccugagccaaagaacccgggauaucuauauuucccgcagacuucugggaacauucaccuggacccucucugacagcgagggcaaugaaacacccggcggguacugucugacgcgguggaugcugaucgaggccgagcucaaaugcuuuggaaacaccgcuguugccaaguguaaugaaaaacaugaugaggaguucugcgacaugcugcgccuuuuugauuucaacaagcaggcuaucagacggcugaaaaccccugcccaggcgaauauucagcucaucaacaaggccgugaaugcucugauuaacgaccaacuuaucaugaagaaucaucugcgcgauauuaugggcauccccuauugcaacuacuccaaauauuguuaccucaaucacacagucacagggaagaccagccugccuagaugcugucuggugucuaacggauccuaccucaaugaaacgcacuucagcgacgacaucgaacagcaggccgauaacaugauuacagagcugcuucaaaaagaguauauggaccggcagggcaagaccccgcuggggcucguggaucuguuugucuucucuaccagcuuuuaccugaucuccauuuuccuucaccucguuaaaauccccacacaucgccacgugauuggaaagccuugccccaaaccucauagacugaaccacaugggcaucuguucuugcggccuguauaagcaccccggggugccggucaaguggaaacggugaggacuaguaauaaggaaacuguaugaaugucugugggcaggaagugaagagauccuucuguaaagguuuuuggaauuaugucugcugaauaauaaacuuuuuugaaauaauaaaucugguagaaaaaugagaucuaaaaaaaaaaaaaaaaaaaaaaaaaaaaaaaaaaaaaaaaaaaaaaaaaaaaaaaaaaaaaaaaaaaaaaaaaaaaaaaaaaaaaaaaaaaaaaaaaaaa

SEQ ID NO: 32730 - RNA, 1785 nt, Artificial Sequence
  mRNA product Design b-4 (A100) comprising derived and/or modified sequence from LASV(Nig08-A19;Clade III)__ADU56618__GPCmut7 (opt5)
aggagagucccgcagucggcguccagcggcucugcuuguucgugugugugucguugcaggccuuauucaagcuuaccaugggccagaucgugaccuucuuucaagaggucccccacguuauugaagaggugaugaacaucgugcugauugcccucagcauccuggcuauucuuaaggggcuguacaauaucgccacaugcggacucaucggccuggucacguuccuucugcucuccgggagaucuuguagcaugaccuauaaaggaguguacgaacugcagacacuggagcucaacaugaauacccugaacaugacaaugccucuuuccugcaccaagaauaacucucaucacuauauuaugguuggcaaugaaacagggcuggagcucacccugacgaacaccagccuucugcaucacaaauuuuguaaucucuccgacgcgcauaagaaaaaccuguacgaucacacacugaugucuaucauuagcaccuuccaccucuccaucccgaauuuuaaccaguaugaggcuaugagcugcgacuucaauggaggcaagauuacagugcaguacaaccugucucauuccuaugccaucgaugccgcuaaucacuguggcaccgucgccaacggggugcuucaaacguuuaugcggauggcuuggggaggcagcuacauugcccuggacucugggcgcggaaagugggauugcaucaugacauccuaccaguaucucaucauucagaacaccacaugggaagaccauugucaguucagcagacccucuccuaucggcuaccuggggcuucugucccaacggacccgcgauauuuauaucagcagacggcuccugggaaccuuuacauggacgcuguccgacucugagggcaaugaaacccccggcggguacugccucacacgcuggaugcugauugaggcggagcuuaaauguuucggaaacaccgccguugcuaagugcaaugaaaaacacgaugaggaauuuugugacaugcugagacucuucgauuuuaacaagcaggccauccggcgccugaaagcuccugcccagaugagcauccagcuuauuaauaaggcggugaacgcccugaucaaugaccaacucauuaugaagaaccaccugagagauaucaugggcauucccuauugcaauuacuccaaauauugcuaccugaaccauacaagcaccgggcggacgucucucccucgcuguugccuggucuccaauggaagcuaccuuaacgagacacacuucucugacgacaucgaacagcaggcugauaauaugaucaccgagaugcugcaaaaggaguaucucgacagacagggcaaaaccccgcuggggcugguggaucuuuucguguuuagcacauccuucuaccucauuucuaucuuucugcaucuggucaagauucccacccaccggcauaucguuggaaaaccuugucccaagccucaccgccucaaccacaugggcauuugcagcuguggccuguauaaacagcccggggugccggugagauggaagcggugaggacuaguaauaaggaaacuguaugaaugucugugggcaggaagugaagagauccuucuguaaagguuuuuggaauuaugucugcugaauaauaaacuuuuuugaaauaauaaaucugguagaaaaaugagaucuaaaaaaaaaaaaaaaaaaaaaaaaaaaaaaaaaaaaaaaaaaaaaaaaaaaaaaaaaaaaaaaaaaaaaaaaaaaaaaaaaaaaaaaaaaaaaaaaaaaa

SEQ ID NO: 32731 - RNA, 1788 nt, Artificial Sequence
  mRNA product Design b-4 (A100) comprising derived and/or modified sequence from LASV(G1180-SLE-2010;Clade IV)__AIT17168__GPCmut7 (opt5)
aggagagucccgcagucggcguccagcggcucugcuuguucgugugugugucguugcaggccuuauucaagcuuaccaugggccagaucgugaccuucuuucaagaggucccccacguuauugaagaggugaugaacaucgugcugauugcccucagcauccuggcuguccuuaaggggcuguacaauuucgccacaugcggacucgugggccugcuuacguuucugcuccugugugggagauccugcaccgcgucucgguauaaaggaguuuacgaacugcagacacucgagcugaacauggaaacccuuaauaugacaaugccucugagcuguaccaagaacaauucccaucacuauauuauggugggcaacgagacagggcucgagcugacccuuacgaauaccucuaucaucaaccauaaauucugcaaucugagcgacgcucacaagaaaaaccucuacgaucaugcccugauguccauuaucucuacauuucaccugagcauuccgaauuucaaccaguaugaagccauguccugugacuuuaauggaggcaagaucagcguccaguacaaccucucucacuccuaugcuggcgaugccgcuaaucauugcgggaccguggccaacggaguucugcaaacauucaugcgcauggcguggggcgggagcuacauugcccuugacucuggacacggcuccugggauuguaucaugaccagcuaccaguaucugauuauccagaacacgacaugggaggaccauugccaguuuucuagacccuccccuaucggguaccucggacugcuuagccaacggacccgcgauauuuauaucuccagacggcugcucggcacauucaccuggacccugucugacagcgaaggcaaggauacacccgggggauacugucugacgcgcuggaugcucauugaggcugagcugaaaugcuuuggcaauaccgccguggcuaaguguaacgaaaaacacgacgaggaguucugcgauaugcuuagacuguuugacuucaauaagcaggccauccagcggcucaaagcgccugcccagauguccauucaacugaucaacaaggcugucaaugcccuuaucaacgaucagcugauuaugaagaaucaccuccgcgacaucauggggauucccuauugcaacuacagcaaauauuguuaccugaaucauacaaccacaggaaagaccucucugccuaaaugcugucucguguccaacggcagcuaccugaaugaaacgcacuucucugacgauaucgaacagcaagcugacaacaugauuacagagaugcuucagaaggaguauauggaaagacaggggaaaaccccgcugggacucguggaucuguuugucuucagcaccuccuuuuaccugaucucuaucuuccuucaucucguuaagauucccacacaccggcauaucgugggcaaaagcugcccuaagccccaccgccugaaucacaugggcauuuguuccugcgggcuguauaagcagccuggagugcccgucaaauggaagagaugaggacuaguaauaaggaaacuguaugaaugucugugggcaggaagugaagagauccuucuguaaagguuuuuggaauuaugucugcugaauaauaaacuuuuuugaaauaauaaaucugguagaaaaaugagaucuaaaaaaaaaaaaaaaaaaaaaaaaaaaaaaaaaaaaaaaaaaaaaaaaaaaaaaaaaaaaaaaaaaaaaaaaaaaaaaaaaaaaaaaaaaaaaaaaaaaa

SEQ ID NO: 32732 - RNA, 1788 nt, Artificial Sequence
  mRNA product Design b-4 (A100) comprising derived and/or modified sequence from LASV(G1442-SLE-2011;Clade IV)__AIT17180__GPCmut7 (opt5)
aggagagucccgcagucggcguccagcggcucugcuuguucgugugugugucguugcaggccuuauucaagcuuaccaugggccagaucgugaccuucuuucaagaggucccccacguuauugaagaggugaugaacaucgugcugauugcccucagcauccuggcuguccuuaaggggcuguacaauguggccacaugcggacucauuggccugguuacguuccuucugcucugugggagauccugcaccacaacccuguauaaaggaguguacgaacugcagacacucgagcugaacauggaaacccuuaauaugacaaugccucugucuuguaccaagaacaauagccaucacuauauccgggucggcaacgagacggggcucgagcugacccuuacaaauaccuccaucauuaaccauaaauuuugcaaucugucugacgcgcacaagaaaaaccucuacgaucaugcucugaugagcaucauuuccacauuccaccugucuaucccgaauuuuaaccaguaugaagccaugagcugugacuucaauggaggcaagauuuccgugcaguacaaccucagccacucuuaugccggcgaugcugccaaucauugcgggaccguugcuaacggagugcugcaaacguuuaugcgcauggccuggggcggguccuacaucgcgcuugacagcggaagaggcaacugggauuguauuaugacaucuuaccaguaucugaucauccagaauaccacaugggacgaucacugccaguucucccggcccagcccuauuggguaccucggacugcuuucucaacgcaccagagacgucuauaucucccggcgccugcucggcaccuuuacauggacgcugagcgauuccgagggcaaggacacccccgggggauacugucugacaagauggaugcucauugaagccgagcugaaaugcuucggcaacaccgcuguggccaaguguaaugagaaacaugaugaagaguuuugcgacaugcuucggcuguucgauuuuaacaagcaggcuauccagcgccucaaagccccugcgcagaugucuauucaacugaucaauaaggccgugaacgcucuuaucaaugaccagcugauuaugaagaaccaccucagagacaucauggggauucccuauugcaauuacagcaaauauuguuaccugaacaauacagccaccggaaagacgucccugccuaaaugcugucucaucagcaacggcucuuaccugaaugaaacacacuucuccgaugacauugagcaggaagcugauaacaugaucaccgagaugcuucaaaaggaguauauggaacggcaggggaaaaccccgcugggacucgucgaccuguucguuuuuagcacaucuuucuaccugaucagcauuuuucuucaucucgugaagauccccacccaccgccauauugugggcaaauccugcccuaagccccacagacugaaucauaugggcaucuguucuugcgggcuguauaagcagccuggaguccccgugcgguggaaacgcugaggacuaguaauaaggaaacuguaugaaugucugugggcaggaagugaagagauccuucuguaaagguuuuuggaauuaugucugcugaauaauaaacuuuuuugaaauaauaaaucugguagaaaaaugagaucuaaaaaaaaaaaaaaaaaaaaaaaaaaaaaaaaaaaaaaaaaaaaaaaaaaaaaaaaaaaaaaaaaaaaaaaaaaaaaaaaaaaaaaaaaaaaaaaaaaaa

SEQ ID NO: 32733 - RNA, 1788 nt, Artificial Sequence
  mRNA product Design b-4 (A100) comprising derived and/or modified sequence from LASV(G3010-SLE-2013;Clade IV)__AIT17344__GPCmut7 (opt5)
aggagagucccgcagucggcguccagcggcucugcuuguucgugugugugucguugcaggccuuauucaagcuuaccaugggccagaucgugaccuucuuucaagaggucccccacguuauugaagaggugaugaacaucgugcugauugcccucagcauccuggcuguccuuaaggggcuguacaauuucgccacaugcggacucgugggccugguuacguuucuucugcucugugggagauccugcaccacaucucuguauaaaggaguguacgaacugcagacccucgagcugaacauggaaacacuuaauaugaccaugccucugagcuguacaaagaacaauucccaucacuauauuauggucggcaacgagaccgggcucgagcugacgcuuaccaauacaucuaucaucaaccauaaauucugcaaucugagcgacgcgcacaagaaaaaccucuacaaucaugcucugauguccauuaucucuaccuuucaccugagcauuccgaacuucaaucaguaugaagccauguccugugauuuuaacggaggcaagaucagcgugcaguacaaucucucucacuccuaugccggcgacgcugccagccauugcgggacaguugcuaacggagugcugcaaaccuucaugcggauggccuggggcgggucuuacauugcgcuugauuccggauacggcaagugggacuguaucaugacgagcuaucaguaccugauuauccagaacacaaccugggaggaucacugccaguuuucucgccccuccccuaucggguaucucggacugcuuagccaaagaacacgggacauuuacaucucccgcagacugcucggcaccuucaccuggacacugucugauagcgaaggcaaagacacgcccgggggauauugucugacccgguggaugcucauugaggccgagcugaagugcuuuggcaauacagcugucgccaaauguaacgaaaagcaugaugaggaguucugcgacaugcuucgccuguuugauuucaauaaacaggcuauccagagacucaagaccccugcccagauguccauucaacugaucaacaaggcggugaaugcccuuaucaacgaccagcugauuaugaaaaaucaccuccgggauaucauggggauucccuacugcaacuauagcaaguacuguuaccugaaucacacaaccacgggaaaaacaucucugccuaagugcugucucguguccaacggcagcuaucugaaugaaacccauuucucugacgacaucgaacagcaagcugauaacaugauuaccgagaugcuucagaaagaguacauggaacgccaggggaagacaccgcugggacucgucgaccuguuuguuuucagcaccuccuuuuaucugaucucuaucuuccuucaccucgugaaaauucccacacauagacacaucgugggcaagagcugcccuaagccccaucggcugaaucacaugggcauuuguuccugcgggcuguacaaacagccuggaguccccgugcgcuggaagagaugaggacuaguaauaaggaaacuguaugaaugucugugggcaggaagugaagagauccuucuguaaagguuuuuggaauuaugucugcugaauaauaaacuuuuuugaaauaauaaaucugguagaaaaaugagaucuaaaaaaaaaaaaaaaaaaaaaaaaaaaaaaaaaaaaaaaaaaaaaaaaaaaaaaaaaaaaaaaaaaaaaaaaaaaaaaaaaaaaaaaaaaaaaaaaaaaa

SEQ ID NO: 32734 - RNA, 1788 nt, Artificial Sequence
  mRNA product Design b-4 (A100) comprising derived and/or modified sequence from LASV(G502-SLE-2009;Clade IV)__AIT17126__GPCmut7 (opt5)
aggagagucccgcagucggcguccagcggcucugcuuguucgugugugugucguugcaggccuuauucaagcuuaccaugggccagaucgugaccuucuuucaagaggucccccacguuauugaagaggugaugaacaucgugcugauugcccucagcauccuggcuguccuuaaggggcuguacaauuucgccacaugcggacucgugggccugcuuacguuucugcuccugugugggagauccugcaccacaggacuguauaaaggcguuuacgaacuccagacccuggagcuuaacauggaaacacugaauaugaccaugccucucucuuguacaaagaacaauagccaucacuauauuaugguggggaacgagaccggacuggagcuuacgcugaccaauacauccaucaucaaccauaaauucugcaaucucucugacgcgcacaagaaaaaccuguacgaucaugcucugaugagcauuaucuccaccuuucaccucucuauuccgaauuucaaccaguaugaagccaugagcugugacuuuaauggcggcaagaucuccguccaguacaaccugagccacucuuaugccggggaugcugccgaccauugcggaacaguggcuaauggcguucuucaaaccuucaugcggauggccuggggaggguccuacauugcgcuggauagcggccgcgggagaugggacuguaucaugacgucuuaccaguaucucauuauccagaacacaaccugggaggaucacugccaguuuucccggcccagcccuaucggauaccugggccuucugucucaacgcacaagagacauuuauaucucccggcgccuccugggcaccuucaccuggacacugagcgauuccgaagggaaggacacgcccggaggcuacugucucaccagauggaugcugauugaggccgagcuuaaaugcuuugggaacacagcuguggccaaguguaaugaaaaacaugaugaggaguucugcgacaugcugcggcucuuugauuucaacaagcaggcuauccagcgccugaaagccccugcgcagaugucuauucaacuuaucaauaaggccgucaacgcucugaucaaugaccagcucgugaugaagaaccaccugagagacauuaugggaauccccuauugcaauuacagccgguauuguuaccugaaccacaccacaaccggccgcacgucccucccuaaaugcugucuggugagcaaugggucuuaccuuaacgaaacacauuucuccgaugacauugaacagcaagccgauaauaugaucaccgagaugcugcagaaggaguauauggaaagacagggaaaaaccccgcucggccuggucgaccuguuuguuuucagcacaucuuuuuaccuuauuagcaucuuccuccaccuggugaagauccccacccaucggcacauugugggcaaauccugcccuaagccccaucgccugaaccacauggggaucuguucuugcggacucuauaaacagccuggcguccccgugaaguggaagagaugaggacuaguaauaaggaaacuguaugaaugucugugggcaggaagugaagagauccuucuguaaagguuuuuggaauuaugucugcugaauaauaaacuuuuuugaaauaauaaaucugguagaaaaaugagaucuaaaaaaaaaaaaaaaaaaaaaaaaaaaaaaaaaaaaaaaaaaaaaaaaaaaaaaaaaaaaaaaaaaaaaaaaaaaaaaaaaaaaaaaaaaaaaaaaaaaa

SEQ ID NO: 32735 - RNA, 1788 nt, Artificial Sequence
  mRNA product Design b-4 (A100) comprising derived and/or modified sequence from LASV(G733-SLE-2010;Clade IV)__AIT17154__GPCmut7 (opt5)
aggagagucccgcagucggcguccagcggcucugcuuguucgugugugugucguugcaggccuuauucaagcuuaccaugggccagaucgugaccuucuuucaagaggucccccacguuauugaagaggugaugaacaucgugcugauugcccucagcauccuggcuguccuuaaggggcuguacaauuucgccacaugcggaauugugggccucguuuccuuucugcuucugugugggagaucuugcacgaccagccucuauaaaggaguguacgaacugcagacacuggagcucaacauggaaacccugaauaugacaaugccucuuuccuguaccaagaacaauucucaucacuauaucauggucggcaacgagacagggcuggagcucacccugacgaauaccagcaucauuaaccauaaauucugcaaucuuuccgacgcgcacaagaaaaaccuguacgaucaugcucucaugucuaucauuagcacauuucaccuguccaucccgaauuucaaccaguaugaagccaugagcugugacuuuaauggaggcaagauuucugugcaguacaaccugucccacagcuaugccggcgaugcugccaaucauugcgggaccaucgcuaacggaguucuccaaacauucaugcggauggccuggggcgggucuuacauugcgcuggacuccggacgcgauagaugggacuguaucaugaccagcuaccaguaucuuaucauucagaacacgacaugggaggaucacugccaguuuucucggcccuccccuaucggcuaccuggggcuccugagccaacgcaccagagacauuuauaucucccggcgccuucugggaacauucaccuggacccucucugauagcgaaggcaaggacacacccggcggguacugucugacgagauggaugcugauugaggccgagcucaaaugcuuuggaaauaccgcuguggccaaguguaacgaaaaacaugaugaggaguucugcgacaugcugcggcuuuuugauuucaauaagcaggcuauccagcgccugaaagccccugcgcagauguccauccaacucauuaacaaggccgucaaugcucugaucaacgaccagcuuauuaugaagaaucaccugagagacaucaugggcauucccuauugcaacuacagcaaauauuguuaccucaaucacacaaccacagggaagaccucucugccuaaaugcugucugguguccaacggaagcuaccucaaugaaacgcauuucucugaugacaucgaacagcaagccgauaacaugaucacagagaugcugcagaaggaguauauggaacggcagggcaaaaccccgcuugggcugguggaccucuuugucuucagcaccuccuuuuaccugauuucuaucuuccugcaccuuguuaagauucccacacaucgccacguggugggaaaaagcugcccuaagccccauagacucaaucacaugggcaucuguuccugcggccuguaugggcagccuggaguccccgugaaguggaaacggugaggacuaguaauaaggaaacuguaugaaugucugugggcaggaagugaagagauccuucuguaaagguuuuuggaauuaugucugcugaauaauaaacuuuuuugaaauaauaaaucugguagaaaaaugagaucuaaaaaaaaaaaaaaaaaaaaaaaaaaaaaaaaaaaaaaaaaaaaaaaaaaaaaaaaaaaaaaaaaaaaaaaaaaaaaaaaaaaaaaaaaaaaaaaaaaaa

SEQ ID NO: 32736 - RNA, 1788 nt, Artificial Sequence
  mRNA product Design b-4 (A100) comprising derived and/or modified sequence from MOPV/LASV reassortant(IGS-1;Clade IV)__AFY05576__GPCmut7 (opt5)
aggagagucccgcagucggcguccagcggcucugcuuguucgugugugugucguugcaggccuuauucaagcuuaccaugggccagaucgugaccuucuuucaagaggucccccacguuauugaagaggugaugaacaucgugcugauugcccucagcguccuggcugugcuuaaggggcuguacaauuucgccacaugcggacucguuggccuggugacguuucuucugcucugugggagauccugcaccacaucucuguauaaaggagucuacgaacugcagacccucgagcugaacauggaaacacuuaauaugaccaugccucugagcuguacaaagaacaauucccaucacuauaucauggugggcaacgagaccgggcucgagcugacgcuuaccaauacaucuauuaucaaccauaaauucugcaaucugagcgacgcgcacaagaaaaaccucuacgaucaugcucugauguccaucauuucuaccuuucaccugagcaucccgaauuucaaccaguaugaagccauguccugugacuuuaauggaggcaagauuagcguucaguacaaccucucucacuccuaugccggcgaugcugccaaucauugcgggacaguggcuaacggaguccugcaaaccuucaugcggauggccuggggcgggagcuacaucgcgcuugacucuggacgcggcaacugggauuguauuaugacguccuaccaguaucugaucauucagaauacaaccugggaggaccacugccaguuuagcagacccucuccuaucggguaccucggacugcuuucccaacggacacgcgauaucuauauuagcagacggcugcucggcaccuucaccuggacacuguccgacucugaaggcgaggauacgcccgggggauacugucugacccgcuggaugcucaucgaggccgaacugaagugcuuuggcaacacagcuguggccaaauguaaugagaagcaugacgaagaguucugcgauaugcuuagacuguuugacuucaacaaacaggcuauucagcggcucaaggccccugcgcagaugagcauccaacugauuaauaaagccgugaacgcucuuaucaaugaucagcugaucaugaagaaccaccuccgcgacauuauggggauccccuauugcaauuacuccaaguauuguuaccugaaccacaccacaaccggaagaacgagccugccuaaaugcugucucgucucuaauggcuccuaccugaacgaaacacauuucagcgacgauauugagcagcaagccgacaauaugaucaccgagaugcuucagaaggaauauauggagcggcaggggaaaaccccgcugggacucguugaucuguuuguguucucuaccagcuuuuaccugauuuccaucuuccuucaccucgugaagauccccacacaucgccacauugucggcaaaucuugcccuaagccccauagacugaaccacaugggcaucuguagcugcgggcuguauaaacagccuggagugcccguuaaguggaagcggugaggacuaguaauaaggaaacuguaugaaugucugugggcaggaagugaagagauccuucuguaaagguuuuuggaauuaugucugcugaauaauaaacuuuuuugaaauaauaaaucugguagaaaaaugagaucuaaaaaaaaaaaaaaaaaaaaaaaaaaaaaaaaaaaaaaaaaaaaaaaaaaaaaaaaaaaaaaaaaaaaaaaaaaaaaaaaaaaaaaaaaaaaaaaaaaaa

SEQ ID NO: 32737 - RNA, 1788 nt, Artificial Sequence
  mRNA product Design b-4 (A100) comprising derived and/or modified sequence from LASV(LM765-SLE-2012;Clade IV)__AIT17814__GPCmut7 (opt5)
aggagagucccgcagucggcguccagcggcucugcuuguucgugugugugucguugcaggccuuauucaagcuuaccaugggccagaucgugaccuucuuucaagaggucccccacguuauugaagaggugaugaacaucgugcugauugcccucagcauccuggcuguccuuaaggggcuguacaauuucgccacaugcggacucgugggccugguuacguuucuucugcucugugggagauccugcaccacaucucuguauaaaggaguguacgaacugcagacccucgagcugaacauggaaacacuuaauaugaccaugccucugagcuguacaaagaacaauucccaucacuauauuauggucggcaacgagaccgggcucgagcugacgcuuaccaauacaucuaucaucgaccauaaauucugcaaccugagcgaugcgcaccggaagaaucucuacgaccaugcucugauguccauuaucucuaccuuucaccugagcauuccgaacuucaaucaguaugaagccauguccugugauuuuaacggaggcaaaaucagcgugcaguacaaucucucucacuccuaugccaaggacgcugccgaucauugcggcacaguugcuaacggggugcugcaaaccuucaugcgcauggccuggggaggcagcuacauugcgcuugacucugggagaggacggugggauuguaucaugacguccuaccaguaucugauuauccagaauacaaccugggaggaccacugccaguuuagccgccccucuccuaucggcuaccucgggcugcuuucccaaagaacacgggauauuuauaucagccgcagacugcucggaaccuucaccuggacacuguccgacucugaaggcaaggauacgcccggcggguacugucugacccgguggaugcucauugaggccgagcugaaaugcuuuggaaacacagcugucgccaaguguaacgaaaaacaugacgaggaguucugcgauaugcuucgccuguuugacuucaauaagcaggcuauccagagacucaaagccccugcgcagaugagcauucaacugaucaacaaggccgugaaugcucuuaucaacgaccagcugauuaugaagaaucaccuccgggauaucaugggcauucccuauugcaacuacuccaaauauuguuaccugaaucacaccacaaccgggaagacgagccugccuaaaugcugucucgugucuaacggauccuaccugaaugaaacacauuucagcgacgauaucgaacagcaagccgacaacaugauuaccgagaugcuucagaaggaguauauggaacgccagggcaaaaccccgcuggggcucgucgaucuguuuguuuucucuaccagcuuuuaccugaucuccaucuuccuucaccucgugaagauucccacacauagacacaucgugggaaaaccuugccccaagccucaucggcugaaucacaugggcauuuguucuugcggccuguauaagcagcccggggucccggugaaauggaagcgcugaggacuaguaauaaggaaacuguaugaaugucugugggcaggaagugaagagauccuucuguaaagguuuuuggaauuaugucugcugaauaauaaacuuuuuugaaauaauaaaucugguagaaaaaugagaucuaaaaaaaaaaaaaaaaaaaaaaaaaaaaaaaaaaaaaaaaaaaaaaaaaaaaaaaaaaaaaaaaaaaaaaaaaaaaaaaaaaaaaaaaaaaaaaaaaaaa

SEQ ID NO: 32738 - RNA, 1788 nt, Artificial Sequence
  mRNA product Design b-4 (A100) comprising derived and/or modified sequence from LASV(LM776-SLE-2012;Clade IV)__AIT17824__GPCmut7 (opt5)
aggagagucccgcagucggcguccagcggcucugcuuguucgugugugugucguugcaggccuuauucaagcuuaccaugggccagaucgugaccuucuuucaagaggucccccacguuauugaagaggugaugaacaucgugcugauugcccucagcauccuggcuguccuuaaggggcuguacaauuucgccacaugcggacucgugggccugguuacguuucuucugcucugugggagauccugcaccacaucuguguauaaaggagucuacgaacugcagacccuggagcucaacauggaaacacugaauaugaccaugccucuuagcuguacaaagaacaauucccaucacuauauuauggugggcaacgagaccgggcuggagcucacgcugaccaauacaucuaucaucaaccauaaauucugcaaucuuagcgacgcgcacaagaaaaaccuguacgaucaugcucucauguccauuaucucuaccuuucaccugagcauuccgaauuucaaccaguaugaagccauguccugugacuuuaauggaggcaagaucagcguucaguacaaccugucucacuccuaugccggcgaugcugccaaucauugcgggacaguggcuaacggaguccuccaaaccuucaugcggauggccuggggcgggagcuacauugcgcuggacucuggacacggcaagugggauuguaucaugacguccuaccaguaucuuauuauccagaacacaaccugggaggaccauugccaguuuagccgccccucuccuaucggguaccugggacuccugucccaaagaacacgggauauuuauaucagccgcagacuucugggcaccuucaccuggacacucuccgacucugaaggcaaagauacgcccgggggauacugucugacccgguggaugcugauugaggccgagcucaagugcuuuggcaauacagcuguggccaaauguaacgaaaagcacgacgaggaguucugcgauaugcugcgccuuuuugacuucaauaaacaggcuauccagagacugaaggccccugcgcagaugagcauucaacucaucaacaaggccgugaaugcucugaucaacgaucagcuuauuaugaaaaaucaucugcgggacaucauggggauucccuauugcaacuacuccaaguauuguuaccucaaucacaccacaaccggaaaaacgagccugccuaagugcugucuggucucuaacggcuccuaccucaaugaaacacacuucagcgacgauaucgaacagcaagccgacaacaugauuaccgagaugcugcagaaagaguauauggaacgccaggggaagaccccgcuuggacugguugaucucuuuguguucucuaccagcuuuuaccugaucuccaucuuccugcaucuugugaaaauucccacacacagacauaucgucggcaagucuugcccuaagccccaccggcucaaucacaugggcauuuguagcugcgggcuguauaaacagccuggagugcccguucgcuggaagagaugaggacuaguaauaaggaaacuguaugaaugucugugggcaggaagugaagagauccuucuguaaagguuuuuggaauuaugucugcugaauaauaaacuuuuuugaaauaauaaaucugguagaaaaaugagaucuaaaaaaaaaaaaaaaaaaaaaaaaaaaaaaaaaaaaaaaaaaaaaaaaaaaaaaaaaaaaaaaaaaaaaaaaaaaaaaaaaaaaaaaaaaaaaaaaaaaa

SEQ ID NO: 32739 - RNA, 1788 nt, Artificial Sequence
  mRNA product Design b-4 (A100) comprising derived and/or modified sequence from LASV(Mad39;Clade IV)__ANH09722__GPCmut7 (opt5)
aggagagucccgcagucggcguccagcggcucugcuuguucgugugugugucguugcaggccuuauucaagcuuaccaugggccagaucgugaccuucuuucaagaggucccccacguuauugaagaggugaugaacaucgugcugauugcccucagcauccuggcuguccuuaaggggcuguacaauguggccacaugcggacucauuggccugguuacguuccuucugcucugugggagauccugcaccacaacccuguauaaaggaguguacgaacugcaggcgcucgagcugaacauggaaacacuuaauaugaccaugccucugucuuguacaaagaacaauagccaucacuauauccgggucggcaacgagaccgggcucgagcugacgcuuaccaauacaucccugaucaaccauaaauuuugcaaucucucugacgcucacaagaaaaaccuguacgaucaugcccugaugagcauuaucuccaccuuccaccucucuauuccgaauuuuaaccaguaugaagccaugagcugugacuucaaugauggaaagaucuccgugcaguacaaccugagccacacauaugcuggcgacaccgccaaucauugcggcacgguugcuaacggggugcuucaaacauuuaugcgcauggccuggggaggcucuuacauugcgcuggauuccgggagaggaggcugggacuguaucaugaccagcuaccaguaucucauuauccagaacacaaccugggaggaucacugccaguucucucggcccuccccuaucggguaccugggacuucugagccaacgcaccagagacauuuauaucucucggcgccuccugggcacauuuacguggacccuguccgauagcgaaggcaaggacacacccgggggauacugucucaccagauggaugcugauugaggccgagcuuaaaugcuucggcaauacagcugucgccaaguguaacgaaaaacaugaugaggaauuuugcgacaugcugcgccucuucgauuuuaauaagcaggcuauccagcggcugaaagccccugcgcagauguccauucaacuuaucaacaaggccgugaaugcucugaucaacgaccagcucauuaugaagaaucaccugagagacaucauggggauucccuauugcaacuacucuaaauauuguuaccugaaucacaccgugacgggaaagacaagccucccuaaaugcugucuggucuccaacggcagcuaccuuaaugagacccauuucucugaugacaucgaacagcaagccgauaacaugauuaccgagaugcugcagaaggaguauauggaacggcaggggaaaacaccgcucggacugguugaccuguucguguuuuccaccagcuucuaccuuaucucuaucuuucuccaccuggugaagauucccacacaucgccacgucgugggcaaaccuugccccaagccucauagacugaaucacaugggcaucuguagcugcggguucuauaagcagcccggaguuccggugcgguggaaacgcugaggacuaguaauaaggaaacuguaugaaugucugugggcaggaagugaagagauccuucuguaaagguuuuuggaauuaugucugcugaauaauaaacuuuuuugaaauaauaaaucugguagaaaaaugagaucuaaaaaaaaaaaaaaaaaaaaaaaaaaaaaaaaaaaaaaaaaaaaaaaaaaaaaaaaaaaaaaaaaaaaaaaaaaaaaaaaaaaaaaaaaaaaaaaaaaaa

SEQ ID NO: 32740 - RNA, 1788 nt, Artificial Sequence
  mRNA product Design b-4 (A100) comprising derived and/or modified sequence from LASV(Z0947-SLE-2011;Clade IV)__AIT17840__GPCmut7 (opt5)
aggagagucccgcagucggcguccagcggcucugcuuguucgugugugugucguugcaggccuuauucaagcuuaccaugggccagaucgugaccuucuuucaagaggucccccacguuauugaagaggugaugaacaucgugcugauugcccucagcauccuggcuguccuuaaggggcuguacaauuucgccacaugcggacucgugggccugguuacguuucuucugcucugugggagauccugcaccauuucucuguauaaaggaguguacgaacugcagacacucgagcugaacauggaaacccuuaauaugacaaugccucugagcuguaccaagaacaauucccaucacuauaucauggucggcaacgagacagggcucgagcugacccuuacgaauaccucuaucauuaaccauaaauucugcaaucugagcgacgcgcacaagaaaaaccucuacgaucaugcucugauguccaucauuucuacauuucaccugagcaucccgaauuucaaccaguaugaagccauguccugugacuuuaauggaggcaagauuagcgugcaguacaaccucucucacuccuaugccggcgaugcugccaaucauugcgggaccguugcuaacggagugcugcaaacauucaugcggauggccuggggcgggagcuacaucgcgcuugacucuggacgcgauagaugggacuguauuaugaccuccuaccaguaucugaucauccagaacacgacaugggaggaucacugccaguuuagccggcccucuccuauuggcuaccucgggcugcuuucccaacgcaccagagacaucuauauuagccggcgccugcucggaacauucaccuggacccuguccgauucugaaggcaaggacacacccggcggguacugucugacgagauggaugcucaucgaggccgagcugaaaugcuuuggaaauaccgcugucgccaaguguaacgaaaaacaugaugaggaguucugcgacaugcuucggcuguuugauuucaauaagcaggcuauucagcgccucaaagccccugcgcagaugagcauccaacugaucaacaaggccgugaaugcucuuauuaacgaccagcugaucaugaagaaucaccucagagacauuaugggcauccccuauugcaacuacuccaaauauuguuaccugaaucacacaaccacagggaagaccagccugccuaaaugcugucucgugucuaacggauccuaccugaaugaaacgcauuucagcgaugacauugaacagcaagccgauaacaugaucacagagaugcuucagaaggaguauauggaacggcagggcaaaaccccgcuggggcucgucgaccuguuuguuuucucuaccagcuuuuaccugaucuccauuuuccuucaccucgugaagauccccacacaucgccacauugugggaaaaccuugccccaagccucauagacugaaucacaugggcaucuguucuugcggccuguauaagcagcccggggucccggugaaauggaagcggugaggacuaguaauaaggaaacuguaugaaugucugugggcaggaagugaagagauccuucuguaaagguuuuuggaauuaugucugcugaauaauaaacuuuuuugaaauaauaaaucugguagaaaaaugagaucuaaaaaaaaaaaaaaaaaaaaaaaaaaaaaaaaaaaaaaaaaaaaaaaaaaaaaaaaaaaaaaaaaaaaaaaaaaaaaaaaaaaaaaaaaaaaaaaaaaaa

SEQ ID NO: 32741 - RNA, 1658 nt, Artificial Sequence
  mRNA product Design i-3 (hSL-A64-N5) comprising derived and/or modified sequence from LASV(Josiah;Clade IV)__NP_694870__GPCmut7 (opt1)
aggagaaagcuuaccaugggccagaucgugaccuucuuccaggaggucccccacgugaucgaggaggugaugaacaucguccugaucgcccucagcgugcuggccgugcugaaggggcucuacaacuucgcgaccugcggccuggucgggcuggugacguuccuccugcugugcggccgcuccugcaccaccagccucuacaaggggguguacgagcugcagacccuggagcucaacauggagacgcugaacaugaccaugccgcuguccugcaccaagaacaacagccaccacuacaucauggucggcaacgagaccggccucgagcugacgcugaccaacaccuccaucaucaaccacaaguucugcaaccucagcgacgcccacaagaagaaccuguacgaccacgcccugauguccaucaucagcaccuuccaccucuccauccccaacuucaaccaguacgaggccaugagcugcgacuucaacgggggcaagaucuccgugcaguacaaccugagccacuccuacgccggggacgcggccaaccacugcggcacgguggccaacgggguccugcagaccuucaugcggauggccuggggcggcagcuacaucgcgcucgacuccgggcgcggcaacugggacugcaucaugaccagcuaccaguaccugaucauccagaacaccacgugggaggaccacugccaguucucccggcccagccccaucggguaccugggccuccugucccagcgcacccgggacaucuacaucagccgccggcugcucggcaccuucaccuggacgcugagcgacuccgaggggaaggacaccccgggcggguacugccugacccgcuggaugcucaucgaggccgagcugaagugcuucggcaacaccgccguggccaagugcaacgagaagcacgacgaggaguucugcgacaugcugcggcuguucgacuucaacaagcaggccauccagcgccugaaggcgcccgcccagaugagcauccagcugaucaacaaggccgugaacgcccucaucaacgaccagcugaucaugaagaaccaccuccgggacaucauggggauccccuacugcaacuacuccaaguacugcuaccucaaccacacgaccaccggccgcaccagccugcccaagugcugccuggucuccaacggcagcuaccucaacgagacgcacuucuccgacgacaucgagcagcaggccgacaacaugaucaccgagaugcugcagaaggaguacauggagcggcaggggaagacgccccugggccucguggaccuguucguguucagcaccuccuucuaccugaucagcaucuuccugcaccucgucaagaucccgacccaccgccacaucguggggaaguccugccccaagccccaccggcugaaccacaugggcaucugcagcugcgggcuguacaagcagcccggcgugccggucaaguggaagcgcugaggacuaguuauaagacugacuagcccgaugggccucccaacgggcccuccuccccuccuugcaccgagauuaaucaaaggcucuuuucagagccaccaaaaaaaaaaaaaaaaaaaaaaaaaaaaaaaaaaaaaaaaaaaaaaaaaaaaaaaaaaaaaaaaagaauu

SEQ ID NO: 32742 - RNA, 1655 nt, Artificial Sequence
  mRNA product Design i-3 (hSL-A64-N5) comprising derived and/or modified sequence from LASV(LP;Clade I)__AAF86701__GPCmut7 (opt1)
aggagaaagcuuaccaugggccagaucaucaccuucuuccaggaggugccccacgucaucgaggaggugaugaacaucgugcugaucgcccucagccugcuggccauccucaaggggcuguacaacaucgcgaccugcggcaucaucgggcuggucgccuuccucuuccugugcggcaaguccugcagccugacgcucaagggcggguacgagcugcagacccuggagcucaacauggagacccugaacaugaccaugccgcuguccugcacgaagaacagcucccaccacuacauccgcgugggcaacgagaccgggcucgagcugacccugaccaacacgagcaucaucaaccacaaguucugcaaccucuccgacgcccacaagaagaaccuguacgaccacgcccugaugagcaucaucuccaccuuccaccucagcauccccaacuucaaccaguacgaggccauguccugcgacuucaacggcgggaagaucagcgugcaguacaaccugucccacagcuacgcgggcgacgccgccgagcacugcgggaccgucgccaacggcgugcugcagaccuucaugcggauggcguggggcgggcgcuacaucgcccucgacuccggcaaggggaacugggacugcaucaugacgagcuaccaguaccugaucauccagaacaccaccugggaggaccacugccaguucucccggcccagccccaucggcuaccugggccuccugucccagcgcacccgggacaucuacaucagccgccggcugcucgggacguucaccuggacccugagcgacuccgagggcaacgagacccccgggggcuacugccugacgcgcuggaugcucaucgaggccgagcugaagugcuucgggaacaccgccguggccaagugcaacgagaagcacgacgaggaguucugcgacaugcugcggcuguucgacuucaacaagcaggcgauccgccggcugaaggcccccgcccagaugagcauccagcugaucaacaaggccgucaacgcccucaucaacgaccagcugaucaugaagaaccaccuccgcgacaucaugggcauccccuacugcaacuacuccaaguacugcuaccucaaccacaccagcuccggccggaccagccugcccaagugcugccugaucuccaacgggagcuaccucaacgagacgcaguucuccgacgacaucgagcagcaggcggacaacaugaucaccgagaugcugcagaaggaguacaucgagcgccagggcaagaccccgcuggggcucguggacaucuucaucuucagcaccuccuucuaccugaucagcaucuuccugcaccugaucaagaucccgacgcaccggcacaucgugggcaagcccugccccaagccccaccgccucaaccacaugggggucugcuccugcggccuguacaagcacccgggcgugcccaccaaguggaagcggugaggacuaguuauaagacugacuagcccgaugggccucccaacgggcccuccuccccuccuugcaccgagauuaaucaaaggcucuuuucagagccaccaaaaaaaaaaaaaaaaaaaaaaaaaaaaaaaaaaaaaaaaaaaaaaaaaaaaaaaaaaaaaaaaagaauu

SEQ ID NO: 32743 - RNA, 1655 nt, Artificial Sequence
  mRNA product Design i-3 (hSL-A64-N5) comprising derived and/or modified sequence from LASV(803213;Clade II)__AAF86703__GPCmut7 (opt1)
aggagaaagcuuaccaugggccagaucaucaccuucuuccaggaggugccccacgucaucgaggaggugaugaacaucgugcugaucgcccucagccugcuggccauccucaaggggaucuacaacgucgcgaccugcggccuguucgggcugaucuccuuccuccugcugugcggccgcagcugcuccgugacguacaaggggguguacgagcuccagacccuggagcugaacauggccaaccucaacaugaccaugccgcugagcugcaccaagaacaacucccaccacuacaucauggucggcaacgagacgggccuggagcucacccugaccaacaccagcaucaucaaccacaaguucugcaaccuguccgacgcccacaagaagaaccucuacgaccacgcccugaugagcaucaucuccacguuccaccugagcauccccaacuucaaccaguacgaggccauguccugcgacuucaacgggggcaagaucagcgugcaguacaaccucucccacagcuucgcgguggacgccgccaaccacugcgggaccaucgccaacggcguccugcagaccuucaugcggauggcguggggcggguccuacaucgcccuggacagcggcaaggggaacugggacugcaucaugaccuccuaccaguaccucaucauccagaacacgaccugggaggaccacugccaguucagccgccccucccccaucggcuaccuggggcugcucagccagcggacccgcgacaucuacaucagccggcgccugcugggcaccuucacguggacccucuccgacagcgagggcaacgaggcccccgggggcuacugccugacccgguggaugcugaucgaggccgagcucaagugcuucgggaacaccgccguggcgaagugcaacgagaagcacgacgaggaguucugcgacaugcugcgccuguucgacuucaacaagcaggccaucaagcggcucaagacgcccgcccagauguccauccagcugaucaacaaggccgugaacgcccugaucaacgaccagcucaucaugaagaaccaccuccgcgacaucaugggcauccccuacugcaacuacagccgguacugcuaccugaaccacaccgucaccgggaagaccucccugccccgcugcugccuggugagcaacggcuccuaccugaacgagacgcacuucagcgacgacaucgagcagcaggcggacaacaugaucaccgagaugcuccagaaggaguacauggaccggcagggcaagaccccgcuggggcugguggaccucuucgucuucuccaccagcuucuaccugaucuccaucuuccugcaccuggugaagaucccgacgcaccgccacaucgugggcaagcccugccccaagccccaccggcucaaccacauggggaucugcagcugcggccuguacaagcacccggggguccccgugaaguggaagcgcugaggacuaguuauaagacugacuagcccgaugggccucccaacgggcccuccuccccuccuugcaccgagauuaaucaaaggcucuuuucagagccaccaaaaaaaaaaaaaaaaaaaaaaaaaaaaaaaaaaaaaaaaaaaaaaaaaaaaaaaaaaaaaaaaagaauu

SEQ ID NO: 32744 - RNA, 1655 nt, Artificial Sequence
  mRNA product Design i-3 (hSL-A64-N5) comprising derived and/or modified sequence from LASV(GA391;Clade III)__CAA36645__GPCmut7 (opt1)
aggagaaagcuuaccaugggccagaucgugaccuucuuccaggaggucccccacgugaucgaggaggugaugaacaucguccugaucgcccucagcauccuggccauccugaaggggcucuacaacguggcgaccugcggccugaucgggcuggugacguuccuccugcuguccggccgcagcugcucccucaucuacaaggggaccuacgagcugcagacccuggagcucaacauggagacccugaacaugacgaugccgcugagcugcaccaagaacaacucccaccacuacauccgggucggcaacgagaccggccucgagcugacccugacgaacaccagcauccucaaccacaaguucugcaaccuguccgacgcccacaagcgcaaccuguacgaccacagccucauguccaucaucagcaccuuccaccuguccauccccaacuucaaccaguacgaggccaugagcugcgacuucaacgggggcaagaucaccgugcaguacaaccugucccacagcuucgccguggacgccgcggggcacugcggcacgcucgccaacgggguccugcagaccuucaugcggauggccuggggcggcuccuacaucgcccuggacagcgggcgcggcaacugggacugcaucaugaccuccuaccaguaccucaucauccagaacaccacgugggacgaccacugccaguucagccggcccucccccaucggguaccugggccugcucagccagcgcacccgggacaucuacaucagccgccggcugcugggcaccuucaccuggacgcucuccgacagcgaggggaacgagaccccgggcggguacugccugacccgcuggaugcugaucgaggcggagcucaagugcuucggcaacaccgccguggccaagugcaacgagaagcacgacgaggaguucugcgacaugcugcggcuguucgacuucaacaagcaggccauccgccggcucaagacgcccgcccagauguccauccagcugaucaacaaggcggugaacgcccugaucaacgaccagcucaucaugaagaaccaccuccgcgacaucauggggauccccuacugcaacuacagccgguacugcuaccugaaccacaccuccaccggcaagaccagccugccccgcugcugccugaucuccaacggcagcuaccugaacgagacgaaguucuccgacgacaucgagcagcaggccgacaacaugaucaccgagaugcuccagaaggaguacaucgaccggcaggggaagacgccccugggccuggucgaccuguucguguucagcaccuccuucuaccucaucagcaucuuccugcaccuggugaagaucccgacccaccgccacaucgucgggaagcccugccccaagccccaccggcucaaccacaugggcaucugcuccugcgggcuguacaagcagccgggcgugcccgugcgcuggaagcggugaggacuaguuauaagacugacuagcccgaugggccucccaacgggcccuccuccccuccuugcaccgagauuaaucaaaggcucuuuucagagccaccaaaaaaaaaaaaaaaaaaaaaaaaaaaaaaaaaaaaaaaaaaaaaaaaaaaaaaaaaaaaaaaaagaauu

SEQ ID NO: 32745 - RNA, 1658 nt, Artificial Sequence
  mRNA product Design i-3 (hSL-A64-N5) comprising derived and/or modified sequence from LASV(AV;Clade V)__CCA30314__GPCmut7 (opt1)
aggagaaagcuuaccaugggccagaucgugaccuucuuccaggaggucccccacgugaucgaggaggugaugaacaucguccugaucgcccucagcauccuggccgugcugaaggggcucuacaacaucgcgaccugcggccugaucgggcugaucacguuccuccugcugugcggccgcuccugcagcuccaaccucuacaaggggguguacgagcugcagagccuggaccucaacauggagacccugaacaugaccaugccgcuguccugcaccaagaacaacagccaccacuacauccgggucggcaacgacacgggccucgagcugacccugaccaacaccuccauccucaaccacaaguucugcaaccugagcgacgcccacaagaaggaccuguacgaccacgcccucauguccaucaucagcacguuccaccuguccauccccaacuucaaccaguacgaggccaugagcugcgacuucaacgggggcaagaucuccgugcaguacaaccugagccacuccuacgccaucgacgcggccaaccacugcgggaccguggccaacggcauccuccagaccuucaugcgcauggccuggggcgggagcuacaucgcgcuggacuccggccgggggaacugggacugcaucaugaccagcuaccaguaccugaucauccagaacacgaccugggagaaccacugccaguucucccgccccagccccaucggcuaccucgggcugcugagccagcggacccgcgacaucuacaucucccggcgccuccugggcaccuucacguggacccugagcgacuccgagggcaacgccacccccgggggcuacugccucacccgguggaugcugaucgaggccgagcugaagugcuucgggaacacggccgucgccaagugcaacgagaagcacgacgaggaguucugcgacaugcuccgccuguucgacuucaacaagcaggcgaucagccggcugaagucccccgcccagaugagcauccagcucaucaacaaggccgugaacgcccugaucaacgaccagcugaucaugaagaaccaccuccgcgacaucaugggcauccccuacugcaacuacuccaaguacugcuaccugaaccacaccaucaccgggaagaccagccugcccaagugcugccucguguccaacggcagcuaccugaacgagacgcacuucuccgacgacaucgagcagcaggccgacaacaugaucaccgagaugcugcagaaggaguacauggagcggcagggcaagaccccgcucgggcuggucgaccuguucguguucagcaccuccuucuaccugaucagcaucuuccuccgccuggugaagaucccgacgcaccggcacaucgucggcaagcccugccccaagccccaccgccugaaccacauggggaucugcuccugcggccucuacaagcagccgggggugcccgugcgguggaagcgcugaggacuaguuauaagacugacuagcccgaugggccucccaacgggcccuccuccccuccuugcaccgagauuaaucaaaggcucuuuucagagccaccaaaaaaaaaaaaaaaaaaaaaaaaaaaaaaaaaaaaaaaaaaaaaaaaaaaaaaaaaaaaaaaaagaauu

SEQ ID NO: 32746 - RNA, 1655 nt, Artificial Sequence
  mRNA product Design i-3 (hSL-A64-N5) comprising derived and/or modified sequence from LASV(Togo/2016/7082;Clade VI)__AMR44577__GPCmut7 (opt1)
aggagaaagcuuaccaugggccagaucaucaccuucuuccaggaggugccccacgucaucgaggaggugaugaacaucgugcugaucgcccucagccugcuggccauccucaagggggucuacaacguggcgaccugcggcaucaucgggcuggugacguuccuguuccucugcggccgcuccugcagccugaucuacaagggguccuacgagcugcagacccucgagcugaacauggagacccugaacaugaccaugccgcucagcugcacgaagaacuccagccaccacuacauccgggucggcaacgagaccggccuggagcugacccucaccaacacguccaucaucaaccacaaguucugcaaccugagcgacgcccacaagcgcaaccuguacgaccacgcccucauguccauccugagcaccuuccaccuguccauccccaacuucaaccaguacgaggccaugagcugcgacuucaacgggggcaagaucuccgugcaguacaaccucagccacgccuacgcgguggacgccgccgagcacugcgggaccgucgccaacggcgugcugcagaccuucaugcggauggcguggggcggguccuacaucgcccuggacagcggccgcgggaacugggacugcaucaugacguccuaccaguaccucaucauccagaacaccaccugggaggaccacugccaguucagccggcccucccccaucggcuaccuggggcugcucagccagcgcacccgggacaucuacaucagccgccggcugcugggcacguucaccuggacccucuccgacagcgagggcaacgagacccccgggggcuacugccugacgcgcuggaugcugaucgaggccgagcucaagugcuucgggaacaccgccguggccaagugcaacgagaagcacgacgaggaguucugcgacaugcugcggcuguucgacuucaacaagcaggcgauccagcgccucaagucccccgcccagaugagcauccagcugaucaacaaggccgucaacgcccugaucaacgaccagcucaucaugaagaaccaccuccgggacaugaugggcauccccuacugcaacuacuccaaguacugcuaccugaaccacaccagcuccgggcgcaccagccugcccaagugcugccugguguccaacggcagcuaccugaacgagacgcacuucuccgacgacaucgagcagcaggccgacaacaugaucaccgagaugcuccagaaggaguacaucgaccggcagggcaagaccccgcuggggcugguggaccucuucgucuucagcaccuccuucuaccugaucagcaucuuccugcaccugaucaagaucccgacgcaccgccacaucgugggcaagcccugccccaagccccaccggcucaaccacauggggaucugcuccugcggccuguacaagcagccgggggugcccacccgcuggaagcggugaggacuaguuauaagacugacuagcccgaugggccucccaacgggcccuccuccccuccuugcaccgagauuaaucaaaggcucuuuucagagccaccaaaaaaaaaaaaaaaaaaaaaaaaaaaaaaaaaaaaaaaaaaaaaaaaaaaaaaaaaaaaaaaaagaauu

SEQ ID NO: 32747 - RNA, 1655 nt, Artificial Sequence
  mRNA product Design i-3 (hSL-A64-N5) comprising derived and/or modified sequence from LASV(KAK-428;Clade n.d. (VII))__ANH09740__GPCmut7 (opt1)
aggagaaagcuuaccaugggccagaucgugaccuucuuccaggaggucccccacgugaucgaggaggugaugaacaucguccugaucgcccucagccugcuggccauccucaaggggcuguacaacuucgcgaccugcggcgugaucgggcugaucacguuccuccugcugugcggccgcuccugcagcgccaccuacaaggggcaguacgagcuccagacccuggagcugaacauggagucccucaacaugaccaugccgcugagcugcacgaagaacaacucccaccacuacauccgggccggcaacaacaccggccuggagcucacccugaccaacacgagcaucaucucccacaaguucugcaaccugagcgacgcccacaagaagaaccucuacgaccacacccugauguccaucaucaccaccuuccaccugagcauccccaacuucaaccaguacgaggccauguccugcgacuucaacgggggcaagaucagcauccaguacaaccucucccacagcuacgcgggggacgccgcccagcacugcggcacgguggccaacgggguccugcagaccuucaugcgcauggcguggggcggcuccuaccuggcccucgacagcgggcggcgcggcugggacugcaucaucuccagcuaccaguaccugaucauccagaacaccaccugggacgaccacugccaguucucccggcccagccccaucggguaccugggcuucgugagccagaagacgcgcgacaucuacaucucccggcgccuccugggcaccuucaccuggacccugagcgacuccgaggggcacgacaugccgggcggguacugccucacgcgguggaugcugaucgaggccgaccugaagugcuucggcaacaccgccguggccaagugcaacgagaagcacgacgaggaguucugcgacauguggcgccucuucgacuucaacaagcaggcgauccagcggcugaaggcccccgcccagaugaacauccagcugaucaacaaggccgucaacgcccucaucaacgaccagcugaugaugaagaaccaccuccgcgacaucauggggauccccuacugcaacuacagcaaguucugcuaccugaacaacaccaccacgggccggaccucccugccccgcugcugccugaucagcaacggcuccuaccucaacgagacccacuucagcgacgacaucgagcagcaggcggacaacaugaucaccgagaugcugcagaaggaguacauggaccggcaggggaagacgccccugggccucguggaccuguucguguucuccaccagcuucuaccugaucaccaucuuccuccaccuggucaagaucccgacccaccgccacaucguggggaagcccugccccaagccccaccggcugaaccacaugggcaucugcuccugcgggcuguacaagcagccgggcgugcccguccgcuggaagcggugaggacuaguuauaagacugacuagcccgaugggccucccaacgggcccuccuccccuccuugcaccgagauuaaucaaaggcucuuuucagagccaccaaaaaaaaaaaaaaaaaaaaaaaaaaaaaaaaaaaaaaaaaaaaaaaaaaaaaaaaaaaaaaaaagaauu

SEQ ID NO: 32748 - RNA, 1655 nt, Artificial Sequence; identical to SEQ ID NO: 32742
  mRNA product Design i-3 (hSL-A64-N5) comprising derived and/or modified sequence from LASV(Pinneo-NIG-1969;Clade I)__AIT17836__GPCmut7 (opt1)

SEQ ID NO: 32749 - RNA, 1655 nt, Artificial Sequence
  mRNA product Design i-3 (hSL-A64-N5) comprising derived and/or modified sequence from LASV(ISTH0009-NIG-2011;Clade II)__AIT17404__GPCmut7 (opt1)
aggagaaagcuuaccaugggccagaucaucaccuucuuccaggaggugccccacgucaucgaggaggugaugaacaucgugcugaucgcccucagccugcuggccauccucaaggggaucuacaacgucgcgaccugcggccuguucgggcugguguccuuccuccugcugugcggccgcagcugcuccacgaccuacaaggggguguacgagcuccagacccuggagcuggacauggccagccucaacaugaccaugccgcuguccugcacgaagaacaacagccaccacuacaucauggucggcaacgagaccggccuggagcucacccugaccaacacguccaucaucaaccacaaguucugcaaccugagcgacgcccacaagaagaaccucuacgaccacgcccugauguccaucaucagcaccuuccaccuguccauccccaacuucaaccaguacgaggccaugagcugcgacuucaacgggggcaagaucuccgugcaguacaaccucagccacgcguacgccguggacgccgccaaccacugcgggaccaucgcgaacggcguccugcagaccuucaugcggauggccuggggcggguccuacaucgcccuggacagcggcaagggguccugggacugcaucaugacgagcuaccaguaccucaucauccagaacaccaccugggaggaccacugccaguucucccgccccagccccaucggcuaccuggggcugcucagccagcggacccgcgacaucuacaucucccggcgccugcugggcacguucaccuggacccucagcgacuccgagggcaacgagacccccgggggcuacugccugacgcgguggaugcugaucgaggccgagcucaagugcuucgggaacaccgccguggcgaagugcaacgagaagcacgacgaggaguucugcgacaugcugcgccuguucgacuucaacaagcaggccauccggcgccucaagacccccgcccagaugagcauccagcugaucaacaaggccgugaacgcccugaucaacgaccagcucaucaugaagaaccaccuccgggacaucaugggcaucccguacugcaacuacuccaaguacugcuaccugaaccacaccgucacggggaagaccagccugccccgcugcugccugguguccaacggcagcuaccugaacgagacccacuucuccgacgacaucgagcagcaggcggacaacaugaucaccgagcuccugcagaaggaguacauggaccggcagggcaagacgccccuggggcucguggaccuguucgucuucagcaccuccuucuaccugaucagcaucuuccugcaccucaucaagaucccgacccaccgccacaucaccggcaagcccugccccaagccccaccggcugaaccacauggggaucugcuccugcggccuguacaagcacccgggggugcccgugaaguggaagcgcugaggacuaguuauaagacugacuagcccgaugggccucccaacgggcccuccuccccuccuugcaccgagauuaaucaaaggcucuuuucagagccaccaaaaaaaaaaaaaaaaaaaaaaaaaaaaaaaaaaaaaaaaaaaaaaaaaaaaaaaaaaaaaaaaagaauu

SEQ ID NO: 32750 - RNA, 1655 nt, Artificial Sequence
  mRNA product Design i-3 (hSL-A64-N5) comprising derived and/or modified sequence from LASV(ISTH2010-NIG-2012;Clade II)__AIT17482__GPCmut7 (opt1)
aggagaaagcuuaccaugggccagaucaucaccuucuuccaggaggugccccacgucaucgaggaggugaugaacaucgugcugaucgcccucagccugcuggccauccucaaggggaucuacaacgucgcgaccugcggccuguucgggcugguguccuuccuccugcugugcggccgcagcugcuccacgaccuacaaggggguguacgagcuccagacccuggagcuggacauggccagccucaacaugaccaugccgcuguccugcacgaagaacaacagccaccacuacaucauggucggcaacgagaccggccuggagcucacccugaccaacacguccaucaucaaccacaaguucugcaaccugagcgacgcccacaagaagaaccucuacgaccacgcccugauguccaucaucagcaccuuccaccuguccauccccaacuucaaccaguacgaggccaugagcugcgacuucaacgggggcaagaucuccgugcaguacaaccucagccacgcguacgccguggacgccgccaaccacugcgggaccaucgcgaacggcguccugcagaccuucaugcggauggccuggggcggguccuacaucgcccuggacagcggcaagggguccugggacugcaucaugacgagcuaccaguaccucaucauccagaacaucaccugggaggaccacugccaguucucccgccccagccccaucggcuaccuggggcugcucagccagcggacccgcgacaucuacaucucccggcgccugcugggcaccuucacguggacccucagcgacuccgagggcaacgagacccccgggggcuacugccugacccgguggaugcugaucgaggccgagcucaagugcuucgggaacacggccguggcgaagugcaacgagaagcacgacgaggaguucugcgacaugcugcgccuguucgacuucaacaagcaggccauccggcgccucaagacccccgcccagaugagcauccagcugaucaacaaggccgugaacgcccugaucaacgaccagcucaucaugaagaaccaccuccgggacaucaugggcauccccuacugcaacuacuccaaguacugcuaccugaaccacaccgucaccgggaagacgagccugccccgcugcugccugguguccaacggcagcuaccugaacgagacccacuucuccgacgacaucgagcagcaggcggacaacaugaucaccgagcuccugcagaaggaguacaucgaccggcagggcaagaccccgcuggggcucguggaccuguucgucuucagcacguccuucuaccugaucagcaucuuccugcaccucgugaagaucccgacccaccgccacguggucggcaagcccugccccaagccccaccggcugaaccacauggggaucugcuccugcggccuguacaagcacccgggggugcccgugaaguggaagcgcugaggacuaguuauaagacugacuagcccgaugggccucccaacgggcccuccuccccuccuugcaccgagauuaaucaaaggcucuuuucagagccaccaaaaaaaaaaaaaaaaaaaaaaaaaaaaaaaaaaaaaaaaaaaaaaaaaaaaaaaaaaaaaaaaagaauu

SEQ ID NO: 32751 - RNA, 1655 nt, Artificial Sequence
  mRNA product Design i-3 (hSL-A64-N5) comprising derived and/or modified sequence from LASV(Lassa virus/H.sapiens-wt/NGA/2015/ISTH_0543;Clade II)__AVO03639__GPCmut7 (opt1)
aggagaaagcuuaccaugggccagaucaucaccuucuuccaggaggugccccacgucaucgaggaggugaugaacaucgugcugaucgcccucagccugcuggccauccucaaggggaucuacaacgucgcgaccugcggccuguucgggcugguguccuuccuccugcugugcggccgcagcugcuccacgaccuacaaggggguguacgagcuccagacccuggagcuggacauggccaaccucaacaugaccaugccgcugagcugcacgaagaacaacucccaccacuacaucauggucggcaacgagaccggccuggagcucacccugaccaacacgagcaucaucaaccacaaguucugcaaccuguccgacgcccacaagaagaaccucuacgaccacgcccugaugagcaucaucuccaccuuccaccugagcauccccaacuucaaccaguacgaggccauguccugcgacuucaacgggggcaagaucagcgugcaguacaaccucucccacaccuacgcgguggacgccgccaaccacugcgggaccaucgccaacggcguccugcagacguucaugcggauggcguggggcgggagcuacaucgcccuggacuccggcaaggggagcugggacugcaucaugaccuccuaccaguaccucgugauccagaacaccaccugggaggaccacugccaguucagccgccccucccccaucggcuaccuggggcugcucagccagcggacgcgcgacaucuacaucagccggcgccugcugggcaccuucaccuggacccucuccgacagcgagggcaacgagacgcccgggggcuacugccugacccgguggaugcugaucgaggccgagcucaagugcuucgggaacaccgccguggccaagugcaacgagaagcacgacgaggaguucugcgacaugcugcgccuguucgacuucaacaagcaggcgauccggcgccucaagacccccgcccagauguccauccagcugaucaacaaggccgucaacgcccugaucaacgaccagcucaucaugaagaaccaccuccgggacaucaugggcauccccuacugcaacuacagcaaguacugcuaccugaaccacacggugaccgggaagaccucccugccccgcugcugccuggugagcaacggcuccuaccugaacgagacccacuucagcgacgacaucgagcagcaggccgacaacaugaucacggagcuccugcagaaggaguacaucgaccggcagggcaagaccccgcuggggcucgucgaccuguucguguucuccaccagcuucuaccugaucuccaucuuccugcaccucgugaagaucccgacccaccgccacaucacgggcaagcccugccccaagccccaccggcugaaccacauggggaucugcagcugcggccuguacaagcacccggggguccccgugaaguggaagcgcugaggacuaguuauaagacugacuagcccgaugggccucccaacgggcccuccuccccuccuugcaccgagauuaaucaaaggcucuuuucagagccaccaaaaaaaaaaaaaaaaaaaaaaaaaaaaaaaaaaaaaaaaaaaaaaaaaaaaaaaaaaaaaaaaagaauu

SEQ ID NO: 32752 - RNA, 1655 nt, Artificial Sequence
  mRNA product Design i-3 (hSL-A64-N5) comprising derived and/or modified sequence from LASV(Lassa virus/H.sapiens-wt/NGA/2016/ISTH_0009;Clade II)__AVO03571__GPCmut7 (opt1)
aggagaaagcuuaccaugggccagaucaucaccuucuuccaggaggugccccacgucaucgaggaggugaugaacaucgugcugaucgcccucagccugcuggccauccucaaggggaucuacaacgucgcgaccugcggccugcuggggcucguguccuuccugcugcucugcggccgcagcugcuccacgaccuacaaggggguguacgagcugcagacccuggagcucgacauggccagccugaacaugaccaugccgcuguccugcacgaagaacaacagccaccacuacaucauggucggcaacgagaccggccucgagcugacccugaccaacacguccaucaucaaccacaaguucugcaaccucagcgacgcccacaagaagaaccuguacgaccacgcccugauguccaucaucagcaccuuccaccucuccauccccaacuucaaccaguacgaggccaugagcugcgacuucaacgggggccggaucuccgugcaguacaaccugagccacuccuacgcgguggacgccgccaaccacugcgggaccaucgccaacggcguccugcagaccuucaugcgcauggcguggggcgggagcuacaucgcccucgacuccggcaaggggagcugggacugcaucaugacguccuaccaguaccugaucauccagaacaccaccugggaggaccacugccaguucagccggcccagccccaucggcuaccuggggcuccugucccagcgcacccgggacaucuacaucagccgccggcugcucggcacguucaccuggacccuguccgacagcgagggcaacgagacccccgggggcuacugccugacgcgcuggaugcucaucgaggccgagcugaagugcuucgggaacaccgccguggccaagugcaacgagaagcacgacgaggaguucugcgacaugcugcggcuguucgacuucaacaagcaggcgauccgccggcugaagacccccgcccagauguccauccagcugaucaacaaggccgugaacgcccucaucaacgaccagcugaucaugaagaaccaccuccgcgacaucaugggcaucccguacugcaacuacagcaaguacugcuaccucaaccacaccgucacggggaagaccucccugccccggugcugccuggugagcaacggcuccuaccucaacgagacccacuucagcgacgacaucgagcagcaggccgacaacaugaucaccgagcugcugcagaaggaguacaucgaccgccagggcaagacgccccucgggcugguggaccuguucgucuucuccaccagcuucuaccugaucuccaucuuccuccaccuggugaagaucccgacccaccggcacaucaccggcaagcccugccccaagccccaccgccugaaccacauggggaucugcagcugcggccucuacaaccacccgggggugcccgucaaguggaagcggugaggacuaguuauaagacugacuagcccgaugggccucccaacgggcccuccuccccuccuugcaccgagauuaaucaaaggcucuuuucagagccaccaaaaaaaaaaaaaaaaaaaaaaaaaaaaaaaaaaaaaaaaaaaaaaaaaaaaaaaaaaaaaaaaagaauu

SEQ ID NO: 32753 - RNA, 1655 nt, Artificial Sequence
  mRNA product Design i-3 (hSL-A64-N5) comprising derived and/or modified sequence from LASV(Lassa virus/H.sapiens-wt/NGA/2016/ISTH_0017;Clade II)__AVO03567__GPCmut7 (opt1)
aggagaaagcuuaccaugggccagaucaucaccuucuuccaggaggugccccacgucaucgaggaggugaugaacaucgugcugaucgcccucagccugcuggccauccucaaggggaucuacaacgucgcgaccugcggccuguucgggcugguguccuuccuccugcugugcggccgcagcugcuccacgaccuacaaggggguguacgagcuccagacccuggagcuggacauggccagccucaacaugaccaugccgcuguccugcacgaagaacaacagccaccacuacaucauggucggcaacgagaccggccuggagcucacccugaccaacacguccaucaucaaccacaaguucugcaaccugagcgacgcccacaagaagaaccucuacgaccacgcccugauguccaucaucagcaccuuccaccuguccauccccaacuucaaccaguacgaggccaugagcugcgacuucaacgggggcaagaucuccgugcaguacaaccucagccacaccuacgcgaucgacgccgccaaccacugcgggaccaucgccaacggcgugcugcagacguucaugcggauggcguggggcggguccuacaucgcccuggacagcggcaagggguccugggacugcaucaugaccagcuaccaguaccucaucauccagaacaccaccugggaggaccacugccaguucucccgccccagccccaucggcuaccuggggcugcucagccagcggacgcgcgacaucuacaucucccggcgccugcugggcaccuucaccuggacccucagcgacuccgagggcaacgagacgcccgggggcuacugccugacccgguggaugcugaucgaggccgagcucaagugcuucgggaacaccgccgucgccaagugcaacgagaagcacgacgaggaguucugcgacaugcugcgccuguucgacuucaacaagcaggcgauccggcgccucaagacccccgcccagaugagcauccagcugaucaacaaggccgugaacgcccugaucaacgaccagcucaucaugaagaaccaccuccgggacaucaugggcauccccuacugcaacuacuccaaguacugcuaccugaaccacacggugaccgggaagaccagccugccccgcugcugccuggucuccaacggcagcuaccugaacgagacccacuucuccgacgacaucgagcagcaggccgacaacaugaucacggagcuccugcagaaggaguacauggaccggcagggcaagaccccgcuggggcucguggaccuguucguguucagcaccuccuucuaccugaucagcaucuuccugcaccucguccgcaucccgacccaccggcacgugaucggcaagcccugccccaagccccaccgccugaaccacauggggaucugcuccugcggccuguacaagcacccgggggugcccgucaaguggaagcggugaggacuaguuauaagacugacuagcccgaugggccucccaacgggcccuccuccccuccuugcaccgagauuaaucaaaggcucuuuucagagccaccaaaaaaaaaaaaaaaaaaaaaaaaaaaaaaaaaaaaaaaaaaaaaaaaaaaaaaaaaaaaaaaaagaauu

SEQ ID NO: 32754 - RNA, 1655 nt, Artificial Sequence
  mRNA product Design i-3 (hSL-A64-N5) comprising derived and/or modified sequence from LASV(Lassa virus/H.sapiens-wt/NGA/2018/ISTH_0959;Clade II)__AVV65099__GPCmut7 (opt1)
aggagaaagcuuaccaugggccagaucaucaccuucuuccaggaggugccccacgucaucgaggaggugaugaacaucgugcugaucgcccucagccugcuggccauccucaaggggaucuacaacgucgugaccugcggccuguucgggcugguguccuuccuccugcugugcggccgcagcugcuccacgaccuacaagggggucuacgagcuccagacccuggagcuggacauggcgagccucaacaugaccaugccgcuguccugcacgaagaacaacagccaccacuacaucauggugggcaacgagaccggccuggagcucacccugaccaacacguccaucaucaaccacaaguucugcaaccugagcgacgcccacaagaagaaccucuacgaccacgcccugauguccaucaucagcaccuuccaccuguccauccccaacuucaaccaguacgaggccaugagcugcgacuucaacgggggcaagaucuccgugcaguacaaccucagccacgccuacgcgaucgacgccgccaaccacugcgggaccaucgccaacggcguccugcagaccuucaugcggauggcguggggcggguccuacaucgcccuggacagcggcaagggguccugggacugcaucaugacgagcuaccaguaccucaucauccagaacaccaccugggaggaccacugccaguucucccgccccagccccaucggcuaccuggggcugcucagccagcggacccgcgacaucuacaucucccggcgccugcugggcacguucaccuggacccucagcgacuccgagggcaacgagacccccgggggcuacugccugacgcgguggaugcugaucgaggccgagcucaagugcuucgggaacaccgccguggccaagugcaacgagaagcacgacgaggaguucugcgacaugcugcgccuguucgacuucaacaagcaggcgauccggcgccucaagacccccgcccagaugagcauccagcugaucaacaaggccgugaacgcccugaucaacgaccagcucaucaugaagaaccaccuccgggacaucaugggcaucccguacugcaacuacuccaaguacugcuaccugaaccacaccgucacggggaagaccagccugccccgcugcugccugguguccaacggcagcuaccugaacgagacccacuucuccgacgacaucgagcagcaggccgacaacaugaucaccgagcuccugcagaaggaguacaucgaccggcagggcaagacgccccuggggcucguggaccuguucgucuucagcaccuccuucuaccugaucagcaucuuccugcaccucgugaagaucccgacccaccgccacgugaucggcaagcccugccccaagccccaccggcugaaccacauggggaucugcuccugcggccuguacaagcacccggggguccccgugaaguggaagcgcugaggacuaguuauaagacugacuagcccgaugggccucccaacgggcccuccuccccuccuugcaccgagauuaaucaaaggcucuuuucagagccaccaaaaaaaaaaaaaaaaaaaaaaaaaaaaaaaaaaaaaaaaaaaaaaaaaaaaaaaaaaaaaaaaagaauu

SEQ ID NO: 32755 - RNA, 1655 nt, Artificial Sequence
  mRNA product Design i-3 (hSL-A64-N5) comprising derived and/or modified sequence from LASV(LASV003-NIG-2008;Clade II)__AIT17580__GPCmut7 (opt1)
aggagaaagcuuaccaugggccagaucaucaccuucuuccaggaggugccccacgucaucgaggaggugaugaacaucgugcugaucgcccucagccugcuggccauccucaaggggaucuacaacgucgcgaccugcggccuguucgggcugguguccuuccuccugcugugcggccgcagcugcuccacgaccuacaaggggguguacgagcuccagacccuggagcuggacauggccagccucaacaugaccaugccgcuguccugcacgaagaacaacagccaccacuacaucauggucggcaacgagaccggccuggagcucacccugaccaacacguccaucaucaaccacaaguucugcaaccugagcgacgcccacaagaagaaccucuacgaccacgcccugauguccaucaucagcaccuuccaccuguccauccccaacuucaaccaguacgaggccaugagcugcgacuucaacgggggcaagaucuccgugcaguacaaccucagccacaccuacgcgguggacgccgccaaccacugcgggaccaucgccaacggcguccugcagacguucaugcggauggcguggggcggguccuacaucgcccuggacagcggcaagggguccugggacugcaucaugaccagcuaccaguaccucaucauccagaacaccaccugggaggaccacugccaguucucccgccccagccccaucggcuaccuggggcugcucagccagcggacgcgcgacaucuacaucucccggcgccugcugggcaccuucaccuggacccucagcgacuccgagagcaacgagacgccgggcggguacugccugacccgguggaugcugaucgaggccgagcucaagugcuucggcaacaccgccguggccaagugcaacgagaagcacgacgaggaguucugcgacaugcugcgccuguucgacuucaacaagcaggcgauccggcgccucaaggcccccgcccagauguccauccagcugaucaacaaggccgugaacgcccugaucaacgaccagcucaucaugaagaaccaccuccgggacaucauggggauccccuacugcaacuacagcaaguacugcuaccugaaccacaccgucacgggccgcaccucccugccccggugcugccuggugagcaacggguccuaccugaacgagacccacuucagcgacgacaucgagcagcaggcggacaacaugaucaccgagcuccugcagaaggaguacauggaccgccagggcaagacgccccugggccucguggaccuguucgucuucuccaccagcuucuaccugaucuccaucuuccugcaccucgugaagaucccgacccaccggcacgugaucgggaagcccugccccaagccccaccgccugaaccacaugggcaucugcagcugcgggcuguacaagcacccgggcguccccgugaaguggaagcggugaggacuaguuauaagacugacuagcccgaugggccucccaacgggcccuccuccccuccuugcaccgagauuaaucaaaggcucuuuucagagccaccaaaaaaaaaaaaaaaaaaaaaaaaaaaaaaaaaaaaaaaaaaaaaaaaaaaaaaaaaaaaaaaaagaauu

SEQ ID NO: 32756 - RNA, 1655 nt, Artificial Sequence
  mRNA product Design i-3 (hSL-A64-N5) comprising derived and/or modified sequence from LASV(LASV035-NIG-2009;Clade II)__AIT17588__GPCmut7 (opt1)
aggagaaagcuuaccaugggccagaucaucaccuucuuccaggaggugccccacgucaucgaggaggugaugaacaucgugcugaucgcccucagccugcuggccauccucaaggggaucuacaacgucgcgaccugcggccuguucgggcugguguccuuccuccugcugugcggccgcagcugcuccacgaccuacaaggggguguacgagcuccagacccuggagcuggacauggccagccucaacaugaccaugccgcuguccugcacgaagaacaacagccaccacuacaucauggucggcaacgagaccggccuggagcucacccugaccaacacguccaucaucaaccacaaguucugcaaccugagcgacgcccacaagaagaaccucuacgaccacgcccugauguccaucaucagcaccuuccaccuguccauccccaacuucaaccaguacgaggccaugagcugcgacuucaacgggggcaagaucuccgugcaguacaaccucagccacgcguacgccguggacgccgccaaccacugcgggaccaucgcgaacggcguccugcagaccuucaugcggauggccuggggcggguccuacaucgcccuggacagcggcaagggguccugggacugcaucaugacgagcuaccaguaccucaucauccagaacaccaccugggaggaccacugccaguucucccgccccagccccaucggcuaccuggggcugcucagccagcggacccgcgacaucuacaucucccggcgccugcugggcacguucaccuggacccucagcgacuccgagggcaacgagacccccgggggcuacugccugacgcgguggaugcugaucgaggccgagcucaagugcuucgggaacaccgccguggcgaagugcaacgagaagcacgacgaggaguucugcgacaugcugcgccuguucgacuucaacaagcaggccauccggcgccucaaggcccccgcccagaugagcauccagcugaucaacaaggccgugaacgcgcugaucaacgaccagcucaucaugaagaaccaccuccgggacaucaugggcauccccuacugcaacuacuccaaguacugcuaccugaaccacaccgucaccgggaagacgagccugccccgcugcugccugguguccaacggcagcuaccugaacgagacccacuucuccgacgacaucgagcagcaggccgacaacaugaucaccgagcuccugcagaaggaguacaucgaccggcagggcaagaccccgcuggggcucguggaccuguucgucuucagcacguccuucuaccugaucagcaucuuccugcaccucgugaagaucccgacccaccgccacgugaucggcaagcccugccccaagccccaccggcugaaccacauggggaucugcuccugcggccuguacaagcacccggggguccccgugaaguggaagcgcugaggacuaguuauaagacugacuagcccgaugggccucccaacgggcccuccuccccuccuugcaccgagauuaaucaaaggcucuuuucagagccaccaaaaaaaaaaaaaaaaaaaaaaaaaaaaaaaaaaaaaaaaaaaaaaaaaaaaaaaaaaaaaaaaagaauu

SEQ ID NO: 32757 - RNA, 1655 nt, Artificial Sequence
  mRNA product Design i-3 (hSL-A64-N5) comprising derived and/or modified sequence from LASV(LASV1000-NIG-2009;Clade II)__AIT17782__GPCmut7 (opt1)
aggagaaagcuuaccaugggccagaucaucaccuucuuccaggaggugccccacgucaucgaggaggugaugaacaucgugcugaucgcccucagccugcuggccauccucaaggggaucuacaacgucgcgaccugcggccuguucgggcugguguccuuccuccugcugugcggccgcagcugcuccacgaccuacaaggggguguacgagcuccagacccuggagcuggacauggccagccucaacaugaccaugccgcuguccugcacgaagaacaacagccaccacuacaucauggucggcaacgagaccggccuggagcucacccugaccaacacguccaucaucaaccacaaguucugcaaccugagcgacgcccacaagaagaaccucuacgaccacgcccugauguccaucaucagcaccuuccaccuguccauccccaacuucaaccaguacgaggccaugagcugcgacuucaacgggggcaagaucuccgugcaguacaaccucagccacaccuacgcgguggacgccgccaaccacugcgggaccaucgccaacggcguccugcagacguucaugcggauggcguggggcggguccuacaucgcccuggacagcggcaagggguccugggacugcaucaugaccagcuaccaguaccucaucauccagaacaccaccugggaggaccacugccaguucucccgccccagccccaucggcuaccuggggcugcucagccagcggacgcgcgacaucuacaucucccggcgccugcugggcaccuucaccuggacccucagcgacuccgagggcaacgagacgcccgggggcuacugccugacccgguggaugcugaucgaggccgagcucaagugcuucgggaacaccgccguggccaagugcaacgagaagcacgacgaggaguucugcgacaugcugcgccuguucgacuucaacaagcaggcgaucaagcggcucaagacccccgcccagaugagcauccagcugaucaacaaggccgugaacgcccugaucaacgaccagcucaucaugaagaaccaccuccgcgacaucaugggcauccccuacugcaacuacuccaaguacugcuaccugaaccacacggucaccgggaagaccagccugccccggugcugccugguguccaacggcagcuaccugaacgagacccacuucuccgacgacaucgagcagcaggccgacaacaugaucacggagcuccugcagaaggaguacaucgaccgccagggcaagaccccgcuggggcucguggaccuguucgucuucagcaccuccuucuaccugaucagcaucuuccugcaccucgugaagaucccgacccaccggcacguggucggcaagcccugccccaagccccaccgccugaaccacauggggaucugcuccugcggccuguacaagcacccgggggugcccgugaaguggaagcggugaggacuaguuauaagacugacuagcccgaugggccucccaacgggcccuccuccccuccuugcaccgagauuaaucaaaggcucuuuucagagccaccaaaaaaaaaaaaaaaaaaaaaaaaaaaaaaaaaaaaaaaaaaaaaaaaaaaaaaaaaaaaaaaaagaauu

SEQ ID NO: 32758 - RNA, 1655 nt, Artificial Sequence
  mRNA product Design i-3 (hSL-A64-N5) comprising derived and/or modified sequence from LASV(LASV221-NIG-2010;Clade II)__AIT17624__GPCmut7 (opt1)
aggagaaagcuuaccaugggccagaucaucaccuucuuccaggaggugccccacgucaucgaggaggugaugaacaucgugcugaucgcccucagccugcuggccauccucaaggggaucuacaacgucgcgaccugcggccuguucgggcugguguccuuccuccugcugugcggccgcagcugcuccacgaccuacaaggggguguacgagcuccagacccuggagcuggacauggccagccucaacaugaccaugccgcuguccugcacgaagaacaacagccaccacuacaucauggucggcaacgagaccggccuggagcucacccugaccaacacguccaucaucaaccacaaguucugcaaccugagcgacgcccacaagaagaaccucuacgaccacgcccugauguccaucaucagcaccuuccaccuguccauccccaacuucaaccaguacgaggccaugagcugcgacuucaacgggggcaagaucuccgugcaguacaaccucagccacaccuacgcgaucgacgccgccaaccacugcgggaccaucgccaacggcgugcugcagacguucaugcggauggcguggggcggguccuacaucgcccuggacagcggcaagggguccugggacugcaucaugaccagcuaccaguaccucaucauccagaacaccaccugggaggaccacugccaguucucccgccccagccccaucggcuaccuggggcugcucagccagcggacgcgcgacaucuacaucucccggcgccugcugggcaccuucaccuggacccucagcgacuccgagggcaacgagacgcccgggggcuacugccugacccgguggaugcugaucgaggccgagcucaagugcuucgggaacaccgccgucgccaagugcaacgagaagcacgacgaggaguucugcgacaugcugcgccuguucgacuucaacaagcaggcgauccggcgccucaagacccccgcccagaugagcauccagcugaucaacaaggccgugaacgcccugaucaacgaccagcucaucaugaagaaccaccuccgggacaucaugggcauccccuacugcaacuacuccaaguacugcuaccugaaccacacggugaccgggaagaccagccugccccgcugcugccuggucuccaacggcagcuaccugaacgagacccacuucuccgacgacaucgagcagcaggccgacaacaugaucacggagaugcuccagaaggaguacauggaccggcagggcaagaccccgcuggggcugguggaccucuucguguucagcaccuccuucuaccugaucagcaucuuccugcaccuggucaagaucccgacccaccgccacgugaucggcaagcccugccccaagccccaccggcucaaccacauggggaucugcuccugcggccuguacaagcacccgggggugcccgucaaguggaagcgcugaggacuaguuauaagacugacuagcccgaugggccucccaacgggcccuccuccccuccuugcaccgagauuaaucaaaggcucuuuucagagccaccaaaaaaaaaaaaaaaaaaaaaaaaaaaaaaaaaaaaaaaaaaaaaaaaaaaaaaaaaaaaaaaaagaauu

SEQ ID NO: 32759 - RNA, 1655 nt, Artificial Sequence
  mRNA product Design i-3 (hSL-A64-N5) comprising derived and/or modified sequence from LASV(LASV237-NIG-2010;Clade II)__AIT17638__GPCmut7 (opt1)
aggagaaagcuuaccaugggccagaucaucaccuucuuccaggaggugccccacgucaucgaggaggugaugaacaucgugcugaucgcccucagccugcuggccauccucaaggggaucuacaacgucgcgaccugcggccuguucgggcugguguccuuccuccugcugugcggccgcagcugcuccacgaccuacaaggggguguacgagcuccagacccuggagcuggacauggccagccucaacaugaccaugccgcuguccugcacgaagaacaacagccaccacuacaucauggucggcaacgagaccggccuggagcucacccugaccaacacguccaucaucaaccacaaguucugcaaccugagcgacgcccacaagaaggaccucuacgaccacgcccugauguccaucaucagcaccuuccaccuguccauccccaacuucaaccaguacgaggccaugagcugcgacuucaacgggggcaagaucuccgugcaguacaaccucagccacaccuacgcgguggacgccgccaaccacugcgggaccaucgccaacggcguccugcagacguucaugcggauggcguggggcggguccuacaucgcccuggacagcggcaagggguccugggacugcaucaugaccagcuaccaguaccucaucauccagaacaccaccugggaggaccacugccaguucucccgccccagccccaucggcuaccuggggcugcucagccagcggacgcgcgacaucuacaucucccggcgccugcugggcaccuucaccuggacccucagcgacuccgagggcaacgagacgcccgggggcuacugccugacccgguggaugcugaucgaggccgagcucaagugcuucgggaacaccgccguggccaagugcaacgagaagcacgacgaggaguucugcgacaugcugcgccuguucgacuucaacaagcaggcgauccggcgccucaagacccccgcccagaugagcauccagcugaucaacaaggccgugaacgcccugaucaacgaccagcucaucaugaagaaccaccuccgggacaucaugggcauccccuacugcaacuacuccaaguacugcuaccugaaccacacggucaccgggaagaccagccugccccgcugcugccugguguccaacggcagcuaccugaacgagacccacuucuccgacgacaucgagcagcaggccgacaacaugaucacggagcuccugcagaaggaguacauggaccggcagggcaagaccccgcuggggcucguggaccuguucgucuucagcaccuccuucuaccugaucagcaucuuccugcaccucaucaagaucccgacccaccgccacaucacgggcaagcccugccccaagccccaccggcugaaccacauggggaucugcuccugcggccuguacaagcacccgggggugcccgugaaguggaagcgcugaggacuaguuauaagacugacuagcccgaugggccucccaacgggcccuccuccccuccuugcaccgagauuaaucaaaggcucuuuucagagccaccaaaaaaaaaaaaaaaaaaaaaaaaaaaaaaaaaaaaaaaaaaaaaaaaaaaaaaaaaaaaaaaaagaauu

SEQ ID NO: 32760 - RNA, 1655 nt, Artificial Sequence
  mRNA product Design i-3 (hSL-A64-N5) comprising derived and/or modified sequence from LASV(LASV253-NIG-2011;Clade II)__AIT17670__GPCmut7 (opt1)
aggagaaagcuuaccaugggccagaucaucaccuucuuccaggaggugccccacgucaucgaggaggugaugaacaucgugcugaucgcccucagccugcuggccauccucaaggggaucuacaacgucgcgaccugcggccuguucgggcugguguccuuccuccugcugugcggccgcagcugcuccacgaccuacaaggggguguacgagcuccagacccuggagcuggacauggccagccucaacaugaccaugccgcuguccugcacgaagaacaacagccaccacuacaucauggucggcaacgagaccggccuggagcucacccugaccaacacguccaucaucaaccacaaguucugcaaccugagcgacgcccacaagaagaaccucuacgaccacgcccugauguccaucaucagcaccuuccaccuguccauccccaacuucaaccaguacgaggccaugagcugcgacuucaacgggggcaagaucuccgugcaguacaaccucagccacaccuacgcgguggacgccgccaaccacugcgggaccaucgccaacggcguccugcagacguucaugcggauggcguggggcggguccuacaucgcccuggacagcggcaagggguccugggacugcaucaugaccagcuaccaguaccucaucauccagaacaccaccugggaggaccacugccaguucucccgccccagccccaucggcuaccuggggcugcucagccagcggacgcgcgacaucuacaucucccggcgccugcugggcaccuucaccuggacccucagcgacuccgagggcaacgagacgcccgggggcuacugccugacccgguggaugcugaucgaggccgagcucaagugcuucgggaacaccgccguggccaagugcaacgagaagcacgacgaggaguucugcgacaugcugcgccuguucgacuucaacaagcaggcgauccggcgccucaaggcccccgcccagaugagcauccagcugaucaacaaggccgugaacgcccugaucaacgaccagcucaucaugaagaaccaccuccgggacaucaugggcaucccguacugcaacuacuccaaguacugcuaccugaaccacaccgucacggggcgcaccagccugccccggugcugccugguguccaacggcagcuaccugaacgagacccacuucuccgacgacaucgagcagcaggcggacaacaugaucaccgagcuccugcagaaggaguacaucgaccgccagggcaagacgccccuggggcucguggaccuguucgucuucagcaccuccuucuaccugaucagcaucuuccugcaccucgugaagaucccgacccaccggcacaucaucggcaagcccugccccaagccccaccgccugaaccacauggggaucugcuccugcggccuguacaagcacccgggggugcccgucaaguggaagcggugaggacuaguuauaagacugacuagcccgaugggccucccaacgggcccuccuccccuccuugcaccgagauuaaucaaaggcucuuuucagagccaccaaaaaaaaaaaaaaaaaaaaaaaaaaaaaaaaaaaaaaaaaaaaaaaaaaaaaaaaaaaaaaaaagaauu

SEQ ID NO: 32761 - RNA, 1655 nt, Artificial Sequence
  mRNA product Design i-3 (hSL-A64-N5) comprising derived and/or modified sequence from LASV(LASV254-NIG-2011;Clade II)__AIT17674__GPCmut7 (opt1)
aggagaaagcuuaccaugggccagaucaucaccuucuuccaggaggugccccacgucaucgaggaggugaugaacaucgugcugaucgcccucagccugcuggccauccucaaggggaucuacaacgucgcgaccugcggccuguucgggcugguguccuuccuccugcugugcggccgcagcugcuccacgaccuacaaggggguguacgagcuccagacccuggagcuggacaugaccaaccucaacaugacgaugccgcugagcugcaccaagaacaacucccaccacuacaucauggucggcaacgagaccggccuggagcucacccugacgaacaccagcaucaucaaccacaaguucugcaaccuguccgacgcccacaagaagaaccucuacaaccacgcccugaugagcaucaucuccaccuuccaccugagcauccccaacuucaaccaguacgaggccauguccugcgacuucaacgggggcaagaucagcgugcaguacaaccucucccacagcuacgccguggacgcggccaaccacugcgggaccaucgccaacggcguccugcagacguucaugcggauggccuggggcggguccuacaucgcgcuggacagcggcaaggggaacugggacugcaucaugaccuccuaccaguaccucaucauccagaacaccaccugggaggaccacugccaguucagccgccccucccccaucggcuaccuggggcugcucagccagcggacgcgcgacaucuacaucagccggcgccugcugggcaccuucaccuggacccucuccgacagcgagggcaacgagacgcccgggggcuacugccugacccgguggaugcugaucgaggccgagcucaagugcuucgggaacaccgccguggccaagugcaacgagaagcacgacgaggaguucugcgacaugcugcgccuguucgacuucaacaagcaggccauccggcgccucaagacccccgcgcaggccaacauccagcugaucaacaaggccgugaacgcccugaucaacgaccagcucaucaugaagaaccaccuccgggacaucaugggcauccccuacugcaacuacuccaaguacugcuaccugaaccacacggucaccgggaagaccagccugccccgcugcugccugguguccaacggcagcuaccugaacgagacccacuucuccgacgacaucgagcagcaggccgacaacaugaucacggagcuccugcagaaggaguacauggaccggcagggcaagaccccgcuggggcucguggaccuguucgucuucagcaccuccuucuaccugaucagcaucuuccugcaccucgugaagaucccgacccaccgccacgugaucggcaagcccugccccaagccccaccggcugaaccacauggggaucugcuccugcggccuguacaagcacccggggguccccgugaaguggaagcgcugaggacuaguuauaagacugacuagcccgaugggccucccaacgggcccuccuccccuccuugcaccgagauuaaucaaaggcucuuuucagagccaccaaaaaaaaaaaaaaaaaaaaaaaaaaaaaaaaaaaaaaaaaaaaaaaaaaaaaaaaaaaaaaaaagaauu

SEQ ID NO: 32762 - RNA, 1655 nt, Artificial Sequence
  mRNA product Design i-3 (hSL-A64-N5) comprising derived and/or modified sequence from LASV(Nig08-A19;Clade III)__ADU56618__GPCmut7 (opt1)
aggagaaagcuuaccaugggccagaucgugaccuucuuccaggaggucccccacgugaucgaggaggugaugaacaucguccugaucgcccucagcauccuggccauccugaaggggcucuacaacaucgcgaccugcggccugaucgggcuggugacguuccuccugcuguccggccgcagcugcuccaugaccuacaaggggguguacgagcuccagacccuggagcugaacaugaacacccucaacaugacgaugccgcugagcugcaccaagaacaacucccaccacuacaucauggucggcaacgagaccggccuggagcucacccugacgaacaccagccugcuccaccacaaguucugcaaccuguccgacgcccacaagaagaaccuguacgaccacacccucaugagcaucaucuccaccuuccaccugagcauccccaacuucaaccaguacgaggccauguccugcgacuucaacgggggcaagaucacggugcaguacaaccugagccacuccuacgccaucgacgccgcgaaccacugcgggaccguggccaacggcguccuccagaccuucaugcggauggccuggggcgggagcuacaucgcccuggacuccggccgcgggaagugggacugcaucaugaccagcuaccaguaccugaucauccagaacacgaccugggaggaccacugccaguucucccggcccagccccaucggcuaccucgggcugcugucccagcgcacccgggacaucuacaucagccgccggcuccugggcaccuucacguggacccugagcgacuccgagggcaacgagacccccgggggcuacugccucacccgcuggaugcugaucgaggcggagcugaagugcuucgggaacacggccguggccaagugcaacgagaagcacgacgaggaguucugcgacaugcuccggcuguucgacuucaacaagcaggccauccgccggcugaaggcccccgcgcagaugagcauccagcucaucaacaaggccgugaacgcccugaucaacgaccagcugaucaugaagaaccaccuccgcgacaucaugggcauccccuacugcaacuacuccaaguacugcuaccugaaccacaccagcaccgggcggaccucccugccccgcugcugccucgucagcaacggcuccuaccugaacgagacgcacuucagcgacgacaucgagcagcaggccgacaacaugaucaccgagaugcugcagaaggaguaccucgaccggcagggcaagaccccgcuggggcugguggaccuguucguguucuccaccagcuucuaccucaucuccaucuuccugcaccuggucaagaucccgacgcaccgccacaucgugggcaagcccugccccaagccccaccggcucaaccacauggggaucugcagcugcggccuguacaagcagccgggggugcccguccgcuggaagcggugaggacuaguuauaagacugacuagcccgaugggccucccaacgggcccuccuccccuccuugcaccgagauuaaucaaaggcucuuuucagagccaccaaaaaaaaaaaaaaaaaaaaaaaaaaaaaaaaaaaaaaaaaaaaaaaaaaaaaaaaaaaaaaaaagaauu

SEQ ID NO: 32763 - RNA, 1658 nt, Artificial Sequence
  mRNA product Design i-3 (hSL-A64-N5) comprising derived and/or modified sequence from LASV(G1180-SLE-2010;Clade IV)__AIT17168__GPCmut7 (opt1)
aggagaaagcuuaccaugggccagaucgugaccuucuuccaggaggucccccacgugaucgaggaggugaugaacaucguccugaucgcccucagcauccuggccgugcugaaggggcucuacaacuucgcgaccugcggccugguggggcugcucaccuuccugcugcucugcggccgcuccugcaccgccagccgguacaagggggucuacgagcugcagacccuggagcucaacauggagacccugaacaugacgaugccgcuguccugcaccaagaacaacagccaccacuacaucauggugggcaacgagaccggccucgagcugacccugacgaacaccuccaucaucaaccacaaguucugcaaccucagcgacgcccacaagaagaaccuguacgaccacgcccugauguccaucaucagcaccuuccaccucuccauccccaacuucaaccaguacgaggccaugagcugcgacuucaacgggggcaagaucuccgugcaguacaaccugagccacuccuacgcgggggacgccgccaaccacugcggcaccgucgccaacggggugcugcagacguucaugcgcauggcguggggcggcagcuacaucgcccucgacuccgggcacggcagcugggacugcaucaugaccuccuaccaguaccugaucauccagaacaccaccugggaggaccacugccaguucagccggcccucccccaucggguaccugggccuccugagccagcgcacgcgggacaucuacaucagccgccggcugcucggcaccuucaccuggacccuguccgacagcgaggggaaggacacgccgggcggguacugccugacccgcuggaugcucaucgaggccgagcugaagugcuucggcaacaccgccguggccaagugcaacgagaagcacgacgaggaguucugcgacaugcugcggcuguucgacuucaacaagcaggcgauccagcgccugaaggcccccgcccagauguccauccagcugaucaacaaggccgucaacgcccucaucaacgaccagcugaucaugaagaaccaccuccgggacaucauggggauccccuacugcaacuacagcaaguacugcuaccucaaccacaccacgaccggcaagaccucccugcccaagugcugccuggugagcaacggcuccuaccucaacgagacccacuucagcgacgacaucgagcagcaggcggacaacaugaucacggagaugcugcagaaggaguacauggagcgccaggggaagacgccccugggccucguggaccuguucgucuucuccaccagcuucuaccugaucuccaucuuccugcaccucgugaagaucccgacccaccggcacaucgugggcaagagcugccccaagccccaccgccugaaccacauggggaucugcuccugcgggcuguacaagcagcccggcgucccggugaaguggaagcggugaggacuaguuauaagacugacuagcccgaugggccucccaacgggcccuccuccccuccuugcaccgagauuaaucaaaggcucuuuucagagccaccaaaaaaaaaaaaaaaaaaaaaaaaaaaaaaaaaaaaaaaaaaaaaaaaaaaaaaaaaaaaaaaaagaauu

SEQ ID NO: 32764 - RNA, 1658 nt, Artificial Sequence
  mRNA product Design i-3 (hSL-A64-N5) comprising derived and/or modified sequence from LASV(G1442-SLE-2011;Clade IV)__AIT17180__GPCmut7 (opt1)
aggagaaagcuuaccaugggccagaucgugaccuucuuccaggaggucccccacgugaucgaggaggugaugaacaucguccugaucgcccucagcauccuggccgugcugaaggggcucuacaacguggcgaccugcggccugaucgggcuggucacguuccuccugcugugcggccgcuccugcaccaccacccucuacaaggggguguacgagcugcagacgcuggagcucaacauggagacccugaacaugaccaugccgcugagcugcaccaagaacaacucccaccacuacauccgggugggcaacgagacgggccucgagcugacccugaccaacaccagcaucaucaaccacaaguucugcaaccucuccgacgcccacaagaagaaccuguacgaccacgcccugaugagcaucaucuccacguuccaccucagcauccccaacuucaaccaguacgaggccauguccugcgacuucaacgggggcaagaucagcguccaguacaaccugucccacagcuacgccggggacgcggccaaccacugcggcaccguggccaacggggugcugcagaccuucaugcgcauggccuggggcggcuccuacaucgcgcucgacagcgggcggggcaacugggacugcaucaugaccuccuaccaguaccugaucauccagaacacgaccugggacgaccacugccaguucagccgccccucccccaucggguaccugggccuccugagccagcggacccgcgacgucuacaucucccggcgccugcucggcaccuucacguggacccugagcgacagcgaggggaaggacaccccgggcggguacugccugacccgguggaugcucaucgaggccgagcugaagugcuucggcaacacggccguggccaagugcaacgagaagcacgacgaggaguucugcgacaugcugcgccucuucgacuucaacaagcaggccauccagcggcugaaggcgcccgcccagauguccauccagcugaucaacaaggccgugaacgcccucaucaacgaccagcugaucaugaagaaccaccuccgcgacaucauggggauccccuacugcaacuacagcaaguacugcuaccugaacaacaccgccaccggcaagaccucccugcccaagugcugccugaucagcaacggcuccuaccucaacgagacgcacuucagcgacgacaucgagcaggaggcggacaacaugaucaccgagaugcugcagaaggaguacauggagcggcaggggaagacgccccugggccucgucgaccuguucguguucuccaccagcuucuaccugaucuccaucuuccugcaccucgugaagaucccgacccaccgccacaucgucggcaagagcugccccaagccccaccggcugaaccacauggggaucugcuccugcgggcuguacaagcagcccggcgugccggugcgcuggaagcggugaggacuaguuauaagacugacuagcccgaugggccucccaacgggcccuccuccccuccuugcaccgagauuaaucaaaggcucuuuucagagccaccaaaaaaaaaaaaaaaaaaaaaaaaaaaaaaaaaaaaaaaaaaaaaaaaaaaaaaaaaaaaaaaaagaauu

SEQ ID NO: 32765 - RNA, 1658 nt, Artificial Sequence
  mRNA product Design i-3 (hSL-A64-N5) comprising derived and/or modified sequence from LASV(G3010-SLE-2013;Clade IV)__AIT17344__GPCmut7 (opt1)
aggagaaagcuuaccaugggccagaucgugaccuucuuccaggaggucccccacgugaucgaggaggugaugaacaucguccugaucgcccucagcauccuggccgugcugaaggggcucuacaacuucgcgaccugcggccugguggggcuggucacguuccuccugcugugcggccgcuccugcaccaccagccucuacaaggggguguacgagcugcagacccuggagcucaacauggagacgcugaacaugaccaugccgcuguccugcaccaagaacaacagccaccacuacaucauggugggcaacgagaccggccucgagcugacgcugaccaacaccuccaucaucaaccacaaguucugcaaccucagcgacgcccacaagaagaaccuguacaaccacgcccugauguccaucaucagcaccuuccaccucuccauccccaacuucaaccaguacgaggccaugagcugcgacuucaacgggggcaagaucuccguccaguacaaccugagccacuccuacgccggggacgcggccagccacugcggcacgguggccaacggggugcugcagaccuucaugcggauggccuggggcggcuccuacaucgcgcucgacagcggguacggcaagugggacugcaucaugaccuccuaccaguaccugaucauccagaacaccacgugggaggaccacugccaguucagccgccccucccccaucggguaccugggccuccugagccagcggacccgcgacaucuacaucagccggcgccugcucggcaccuucaccuggacgcuguccgacagcgaggggaaggacaccccgggcggguacugccugacccgguggaugcucaucgaggccgagcugaagugcuucggcaacaccgccgucgccaagugcaacgagaagcacgacgaggaguucugcgacaugcugcgccucuucgacuucaacaagcaggccauccagcggcugaagacgcccgcgcagauguccauccagcugaucaacaaggccgugaacgcccucaucaacgaccagcugaucaugaagaaccaccuccgcgacaucauggggauccccuacugcaacuacagcaaguacugcuaccugaaccacaccaccaccggcaagacgucccugcccaagugcugccuggugagcaacggcuccuaccucaacgagacccacuucagcgacgacaucgagcagcaggccgacaacaugaucaccgagaugcugcagaaggaguacauggagcggcaggggaagacgccccugggccucgucgaccuguucguguucuccaccagcuucuaccugaucuccaucuuccugcaccucgugaagaucccgacccaccgccacaucgucggcaagagcugccccaagccccaccggcugaaccacauggggaucugcuccugcgggcuguacaagcagcccggcgugccggugcgcuggaagcggugaggacuaguuauaagacugacuagcccgaugggccucccaacgggcccuccuccccuccuugcaccgagauuaaucaaaggcucuuuucagagccaccaaaaaaaaaaaaaaaaaaaaaaaaaaaaaaaaaaaaaaaaaaaaaaaaaaaaaaaaaaaaaaaaagaauu

SEQ ID NO: 32766 - RNA, 1658 nt, Artificial Sequence
  mRNA product Design i-3 (hSL-A64-N5) comprising derived and/or modified sequence from LASV(G502-SLE-2009;Clade IV)__AIT17126__GPCmut7 (opt1)
aggagaaagcuuaccaugggccagaucgugaccuucuuccaggaggucccccacgugaucgaggaggugaugaacaucguccugaucgcccucagcauccuggccgugcugaaggggcucuacaacuucgcgaccugcggccugguggggcugcucacguuccugcugcucugcggccgcuccugcaccaccgggcuguacaagggcgucuacgagcugcagacccucgagcugaacauggagacgcugaacaugaccaugccgcucagcugcaccaagaacaacucccaccacuacaucauggugggcaacgagaccgggcuggagcugacgcucaccaacaccagcaucaucaaccacaaguucugcaaccuguccgacgcccacaagaagaaccuguacgaccacgcccucaugagcaucaucuccaccuuccaccugagcauccccaacuucaaccaguacgaggccauguccugcgacuucaacggcgggaagaucagcgugcaguacaaccugucccacagcuacgccggcgacgcggccgaccacugcgggacggucgccaacggcgugcuccagaccuucaugcggauggccuggggcggguccuacaucgcgcuggacagcggccgcgggcggugggacugcaucaugaccuccuaccaguaccugaucauccagaacaccacgugggaggaccacugccaguucagccgccccucccccaucggcuaccucggccugcugagccagcggacccgcgacaucuacaucucccggcgccuccuggggaccuucaccuggacgcugagcgacagcgagggcaaggacacccccgggggcuacugccucacccgguggaugcugaucgaggccgagcugaagugcuucgggaacaccgccguggccaagugcaacgagaagcacgacgaggaguucugcgacaugcuccgccuguucgacuucaacaagcaggccauccagcggcugaaggcgcccgcccagauguccauccagcucaucaacaaggccgucaacgcccugaucaacgaccagcuggugaugaagaaccaccuccgcgacaucaugggcauccccuacugcaacuacagccgguacugcuaccugaaccacacgaccaccggccgcaccucccugcccaagugcugccucgugagcaacggguccuaccugaacgagacgcacuucagcgacgacaucgagcagcaggccgacaacaugaucaccgagaugcugcagaaggaguacauggagcggcagggcaagaccccgcucgggcuggucgaccuguucguguucuccaccagcuucuaccugaucuccaucuuccuccaccuggugaagaucccgacgcaccgccacaucgucggcaagagcugccccaagccccaccggcugaaccacauggggaucugcuccugcggccucuacaagcagcccggcgugccggugaaguggaagcgcugaggacuaguuauaagacugacuagcccgaugggccucccaacgggcccuccuccccuccuugcaccgagauuaaucaaaggcucuuuucagagccaccaaaaaaaaaaaaaaaaaaaaaaaaaaaaaaaaaaaaaaaaaaaaaaaaaaaaaaaaaaaaaaaaagaauu

SEQ ID NO: 32767 - RNA, 1658 nt, Artificial Sequence
  mRNA product Design i-3 (hSL-A64-N5) comprising derived and/or modified sequence from LASV(G733-SLE-2010;Clade IV)__AIT17154__GPCmut7 (opt1)
aggagaaagcuuaccaugggccagaucgugaccuucuuccaggaggucccccacgugaucgaggaggugaugaacaucguccugaucgcccucagcauccuggccgugcugaaggggcucuacaacuucgcgaccugcggcaucguggggcuggucuccuuccugcuccugugcggccgcagcugcacgaccucccuguacaaggggguguacgagcuccagacccuggagcugaacauggagacccucaacaugacgaugccgcugagcugcaccaagaacaacucccaccacuacaucauggugggcaacgagaccggccuggagcucacccugacgaacaccagcaucaucaaccacaaguucugcaaccuguccgacgcccacaagaagaaccucuacgaccacgcccugaugagcaucaucuccaccuuccaccugagcauccccaacuucaaccaguacgaggccauguccugcgacuucaacgggggcaagaucagcguccaguacaaccucucccacagcuacgccggggacgcggccaaccacugcggcaccaucgccaacggggugcugcagacguucaugcggauggccuggggcggcuccuacaucgcgcuggacagcgggcgcgaccggugggacugcaucaugaccuccuaccaguaccucaucauccagaacaccaccugggaggaccacugccaguucagccgccccucccccaucggcuaccuggggcugcucagccagcggacgcgcgacaucuacaucagccggcgccugcugggcaccuucaccuggacccucuccgacagcgagggcaaggacacgcccgggggcuacugccugacccgguggaugcugaucgaggccgagcucaagugcuucgggaacaccgccguggccaagugcaacgagaagcacgacgaggaguucugcgacaugcugcgccuguucgacuucaacaagcaggccauccagcggcucaaggcgcccgcccagauguccauccagcugaucaacaaggccgucaacgcccugaucaacgaccagcucaucaugaagaaccaccuccgcgacaucaugggcauccccuacugcaacuacagcaaguacugcuaccugaaccacaccacgaccgggaagaccucccugcccaagugcugccuggugagcaacggcuccuaccugaacgagacccacuucagcgacgacaucgagcagcaggccgacaacaugaucacggagaugcuccagaaggaguacauggagcggcagggcaagaccccgcuggggcugguggaccucuucgucuucuccaccagcuucuaccugaucuccaucuuccugcaccuggugaagaucccgacccaccgccacguggucggcaagagcugccccaagccccaccggcucaaccacauggggaucugcuccugcggccuguacgggcagcccggcgugccggugaaguggaagcgcugaggacuaguuauaagacugacuagcccgaugggccucccaacgggcccuccuccccuccuugcaccgagauuaaucaaaggcucuuuucagagccaccaaaaaaaaaaaaaaaaaaaaaaaaaaaaaaaaaaaaaaaaaaaaaaaaaaaaaaaaaaaaaaaaagaauu

SEQ ID NO: 32768 - RNA, 1658 nt, Artificial Sequence
  mRNA product Design i-3 (hSL-A64-N5) comprising derived and/or modified sequence from MOPV/LASV reassortant(IGS-1;Clade IV)__AFY05576__GPCmut7 (opt1)
aggagaaagcuuaccaugggccagaucgugaccuucuuccaggaggucccccacgugaucgaggaggugaugaacaucguccugaucgcccucagcgugcuggccgugcugaaggggcucuacaacuucgcgaccugcggccuggucgggcuggugacguuccuccugcugugcggccgcuccugcaccaccagccucuacaaggggguguacgagcugcagacccuggagcucaacauggagacgcugaacaugaccaugccgcuguccugcaccaagaacaacagccaccacuacaucauggucggcaacgagaccggccucgagcugacgcugaccaacaccuccaucaucaaccacaaguucugcaaccucagcgacgcccacaagaagaaccuguacgaccacgcccugauguccaucaucagcaccuuccaccucuccauccccaacuucaaccaguacgaggccaugagcugcgacuucaacgggggcaagaucuccgugcaguacaaccugagccacuccuacgccggggacgcggccaaccacugcggcacgguggccaacgggguccugcagaccuucaugcggauggccuggggcggcagcuacaucgcgcucgacuccgggcgcggcaacugggacugcaucaugaccagcuaccaguaccugaucauccagaacaccacgugggaggaccacugccaguucucccggcccagccccaucggguaccugggccuccugucccagcgcacccgggacaucuacaucagccgccggcugcucggcaccuucaccuggacgcugagcgacuccgagggggaggacaccccgggcggguacugccugacccgcuggaugcucaucgaggccgagcugaagugcuucggcaacaccgccguggccaagugcaacgagaagcacgacgaggaguucugcgacaugcugcggcuguucgacuucaacaagcaggccauccagcgccugaaggcgcccgcccagaugagcauccagcugaucaacaaggccgugaacgcccucaucaacgaccagcugaucaugaagaaccaccuccgggacaucauggggauccccuacugcaacuacuccaaguacugcuaccucaaccacacgaccaccggccgcaccagccugcccaagugcugccuggucuccaacggcagcuaccucaacgagacgcacuucuccgacgacaucgagcagcaggccgacaacaugaucaccgagaugcugcagaaggaguacauggagcggcaggggaagacgccccugggccucguggaccuguucguguucagcaccuccuucuaccugaucagcaucuuccugcaccucgucaagaucccgacccaccgccacaucguggggaaguccugccccaagccccaccggcugaaccacaugggcaucugcagcugcgggcuguacaagcagcccggcgugccggucaaguggaagcgcugaggacuaguuauaagacugacuagcccgaugggccucccaacgggcccuccuccccuccuugcaccgagauuaaucaaaggcucuuuucagagccaccaaaaaaaaaaaaaaaaaaaaaaaaaaaaaaaaaaaaaaaaaaaaaaaaaaaaaaaaaaaaaaaaagaauu

SEQ ID NO: 32769 - RNA, 1658 nt, Artificial Sequence
  mRNA product Design i-3 (hSL-A64-N5) comprising derived and/or modified sequence from LASV(LM765-SLE-2012;Clade IV)__AIT17814__GPCmut7 (opt1)
aggagaaagcuuaccaugggccagaucgugaccuucuuccaggaggucccccacgugaucgaggaggugaugaacaucguccugaucgcccucagcauccuggccgugcugaaggggcucuacaacuucgcgaccugcggccugguggggcuggucacguuccuccugcugugcggccgcuccugcaccaccagccucuacaaggggguguacgagcugcagacccuggagcucaacauggagacgcugaacaugaccaugccgcuguccugcaccaagaacaacagccaccacuacaucauggugggcaacgagaccggccucgagcugacgcugaccaacaccuccaucaucgaccacaaguucugcaaccucagcgacgcccaccggaagaaccuguacgaccacgcccugauguccaucaucagcaccuuccaccucuccauccccaacuucaaccaguacgaggccaugagcugcgacuucaacgggggcaagaucuccguccaguacaaccugagccacuccuacgccaaggacgcggccgaccacugcgggacgguggccaacggcgugcugcagaccuucaugcgcauggccuggggcgggagcuacaucgcgcucgacuccggccgggggcgcugggacugcaucaugaccagcuaccaguaccugaucauccagaacaccacgugggaggaccacugccaguucucccggcccagccccaucggcuaccuggggcuccugucccagcgcacccgggacaucuacaucagccgccggcugcucggcaccuucaccuggacgcugagcgacuccgagggcaaggacacccccgggggcuacugccugacccgcuggaugcucaucgaggccgagcugaagugcuucgggaacaccgccgucgccaagugcaacgagaagcacgacgaggaguucugcgacaugcugcggcuguucgacuucaacaagcaggccauccagcgccugaaggcgcccgcccagaugagcauccagcugaucaacaaggccgugaacgcccucaucaacgaccagcugaucaugaagaaccaccuccgggacaucaugggcauccccuacugcaacuacuccaaguacugcuaccucaaccacacgaccaccgggaagaccagccugcccaagugcugccugguguccaacggcagcuaccucaacgagacgcacuucuccgacgacaucgagcagcaggccgacaacaugaucaccgagaugcugcagaaggaguacauggagcgccagggcaagaccccgcuggggcucgucgaccuguucguguucagcaccuccuucuaccugaucagcaucuuccugcaccucgugaagaucccgacgcaccggcacaucgucggcaagcccugccccaagccccaccgccugaaccacauggggaucugcuccugcggccuguacaagcagccgggggugcccgugaaguggaagcggugaggacuaguuauaagacugacuagcccgaugggccucccaacgggcccuccuccccuccuugcaccgagauuaaucaaaggcucuuuucagagccaccaaaaaaaaaaaaaaaaaaaaaaaaaaaaaaaaaaaaaaaaaaaaaaaaaaaaaaaaaaaaaaaaagaauu

SEQ ID NO: 32770 - RNA, 1658 nt, Artificial Sequence
  mRNA product Design i-3 (hSL-A64-N5) comprising derived and/or modified sequence from LASV(LM776-SLE-2012;Clade IV)__AIT17824__GPCmut7 (opt1)
aggagaaagcuuaccaugggccagaucgugaccuucuuccaggaggucccccacgugaucgaggaggugaugaacaucguccugaucgcccucagcauccuggccgugcugaaggggcucuacaacuucgcgaccugcggccugguggggcuggucacguuccuccugcugugcggccgcuccugcaccaccagcguguacaaggggguguacgagcuccagacccuggagcugaacauggagacgcucaacaugaccaugccgcuguccugcaccaagaacaacagccaccacuacaucauggucggcaacgagaccggccuggagcucacgcugaccaacaccuccaucaucaaccacaaguucugcaaccugagcgacgcccacaagaagaaccucuacgaccacgcccugauguccaucaucagcaccuuccaccuguccauccccaacuucaaccaguacgaggccaugagcugcgacuucaacgggggcaagaucuccgugcaguacaaccucagccacuccuacgccggggacgcggccaaccacugcggcacgguggccaacgggguccugcagaccuucaugcggauggccuggggcggcagcuacaucgcgcuggacuccgggcacggcaagugggacugcaucaugaccagcuaccaguaccucaucauccagaacaccacgugggaggaccacugccaguucucccgccccagccccaucggguaccugggccugcucucccagcggacccgcgacaucuacaucagccggcgccugcugggcaccuucaccuggacgcucagcgacuccgaggggaaggacaccccgggcggguacugccugacccgguggaugcugaucgaggccgagcucaagugcuucggcaacaccgccguggccaagugcaacgagaagcacgacgaggaguucugcgacaugcugcgccuguucgacuucaacaagcaggccauccagcggcucaaggcgcccgcccagaugagcauccagcugaucaacaaggccgugaacgcccugaucaacgaccagcucaucaugaagaaccaccuccgcgacaucauggggauccccuacugcaacuacuccaaguacugcuaccugaaccacacgaccaccggcaagaccagccugcccaagugcugccuggucuccaacggcagcuaccugaacgagacgcacuucuccgacgacaucgagcagcaggccgacaacaugaucaccgagaugcuccagaaggaguacauggagcggcaggggaagacgccccugggccugguggaccucuucguguucagcaccuccuucuaccugaucagcaucuuccugcaccuggucaagaucccgacccaccgccacaucguggggaaguccugccccaagccccaccggcucaaccacaugggcaucugcagcugcgggcuguacaagcagcccggcgugccgguccgcuggaagcggugaggacuaguuauaagacugacuagcccgaugggccucccaacgggcccuccuccccuccuugcaccgagauuaaucaaaggcucuuuucagagccaccaaaaaaaaaaaaaaaaaaaaaaaaaaaaaaaaaaaaaaaaaaaaaaaaaaaaaaaaaaaaaaaaagaauu

SEQ ID NO: 32771 - RNA, 1658 nt, Artificial Sequence
  mRNA product Design i-3 (hSL-A64-N5) comprising derived and/or modified sequence from LASV(Mad39;Clade IV)__ANH09722__GPCmut7 (opt1)
aggagaaagcuuaccaugggccagaucgugaccuucuuccaggaggucccccacgugaucgaggaggugaugaacaucguccugaucgcccucagcauccuggccgugcugaaggggcucuacaacguggcgaccugcggccugaucgggcuggucacguuccuccugcugugcggccgcuccugcaccaccacccucuacaaggggguguacgagcugcaggcccuggagcucaacauggagacgcugaacaugaccaugccgcugagcugcaccaagaacaacucccaccacuacauccgggugggcaacgagaccggccucgagcugacgcugaccaacaccagccucaucaaccacaaguucugcaaccuguccgacgcccacaagaagaaccuguacgaccacgcccucaugagcaucaucuccaccuuccaccugagcauccccaacuucaaccaguacgaggccauguccugcgacuucaacgacgggaagaucagcguccaguacaaccugucccacacguacgcgggcgacaccgccaaccacugcgggaccguggccaacggcgugcuccagaccuucaugcgcauggccuggggcgggagcuacaucgcgcuggacuccggccgcgggggcugggacugcaucaugacgagcuaccaguaccugaucauccagaacaccaccugggaggaccacugccaguucucccggcccagccccaucggguaccucggccugcugucccagcggacccgcgacaucuacaucagccggcgccuccugggcacguucaccuggacccuguccgacagcgaggggaaggacaccccgggcggguacugccucacgcgguggaugcugaucgaggccgagcugaagugcuucggcaacaccgccgucgccaagugcaacgagaagcacgacgaggaguucugcgacaugcuccgccuguucgacuucaacaagcaggccauccagcggcugaaggcgcccgcccagaugagcauccagcucaucaacaaggccgugaacgcccugaucaacgaccagcugaucaugaagaaccaccuccgcgacaucauggggauccccuacugcaacuacuccaaguacugcuaccugaaccacaccgugaccggcaagacgagccugcccaagugcugccucgucuccaacggcagcuaccugaacgagacccacuucuccgacgacaucgagcagcaggccgacaacaugaucaccgagaugcugcagaaggaguacauggagcggcaggggaagacgccccucggccugguggaccuguucguguucagcaccuccuucuaccugaucagcaucuuccuccaccuggucaagaucccgacccaccgccacgugguggggaagcccugccccaagccccaccggcugaaccacaugggcaucugcuccugcggguucuacaagcagccgggcguccccgugcgcuggaagcggugaggacuaguuauaagacugacuagcccgaugggccucccaacgggcccuccuccccuccuugcaccgagauuaaucaaaggcucuuuucagagccaccaaaaaaaaaaaaaaaaaaaaaaaaaaaaaaaaaaaaaaaaaaaaaaaaaaaaaaaaaaaaaaaaagaauu

SEQ ID NO: 32772 - RNA, 1658 nt, Artificial Sequence
  mRNA product Design i-3 (hSL-A64-N5) comprising derived and/or modified sequence from LASV(Z0947-SLE-2011;Clade IV)__AIT17840__GPCmut7 (opt1)
aggagaaagcuuaccaugggccagaucgugaccuucuuccaggaggucccccacgugaucgaggaggugaugaacaucguccugaucgcccucagcauccuggccgugcugaaggggcucuacaacuucgcgaccugcggccugguggggcuggucacguuccuccugcugugcggccgcuccugcaccaucagccucuacaaggggguguacgagcugcagacccuggagcucaacauggagacccugaacaugacgaugccgcuguccugcaccaagaacaacagccaccacuacaucauggugggcaacgagaccggccucgagcugacccugacgaacaccuccaucaucaaccacaaguucugcaaccucagcgacgcccacaagaagaaccuguacgaccacgcccugauguccaucaucagcaccuuccaccucuccauccccaacuucaaccaguacgaggccaugagcugcgacuucaacgggggcaagaucuccguccaguacaaccugagccacuccuacgccggggacgcggccaaccacugcggcaccguggccaacggggugcugcagacguucaugcggauggccuggggcggcagcuacaucgcgcucgacuccgggcgcgaccggugggacugcaucaugaccagcuaccaguaccugaucauccagaacaccaccugggaggaccacugccaguucucccgccccagccccaucggcuaccuggggcuccugucccagcggacgcgcgacaucuacaucagccggcgccugcucggcaccuucaccuggacccugagcgacuccgagggcaaggacacgcccgggggcuacugccugacccgguggaugcucaucgaggccgagcugaagugcuucgggaacaccgccgucgccaagugcaacgagaagcacgacgaggaguucugcgacaugcugcgccucuucgacuucaacaagcaggccauccagcggcugaaggcgcccgcccagaugagcauccagcugaucaacaaggccgugaacgcccucaucaacgaccagcugaucaugaagaaccaccuccgcgacaucaugggcauccccuacugcaacuacuccaaguacugcuaccugaaccacaccacgaccgggaagaccagccugcccaagugcugccugguguccaacggcagcuaccucaacgagacccacuucuccgacgacaucgagcagcaggccgacaacaugaucacggagaugcugcagaaggaguacauggagcggcagggcaagaccccgcuggggcucgucgaccuguucguguucagcaccuccuucuaccugaucagcaucuuccugcaccucgugaagaucccgacccaccgccacaucgucggcaagcccugccccaagccccaccggcugaaccacauggggaucugcuccugcggccuguacaagcagccgggggugcccgugaaguggaagcgcugaggacuaguuauaagacugacuagcccgaugggccucccaacgggcccuccuccccuccuugcaccgagauuaaucaaaggcucuuuucagagccaccaaaaaaaaaaaaaaaaaaaaaaaaaaaaaaaaaaaaaaaaaaaaaaaaaaaaaaaaaaaaaaaaagaauu

SEQ ID NO: 32773 - RNA, 1658 nt, Artificial Sequence
  mRNA product Design i-3 (hSL-A64-N5) comprising derived and/or modified sequence from LASV(Josiah;Clade IV)__NP_694870__GPCmut7 (opt1)
aggagaaagcuuaccaugggccagaucgugaccuucuuccaggaggucccccacgugaucgaggaggugaugaacaucguccugaucgcccucagcgugcuggccgugcugaaggggcucuacaacuucgcgaccugcggccuggucgggcuggugacguuccuccugcugugcggccgcuccugcaccaccagccucuacaaggggguguacgagcugcagacccuggagcucaacauggagacgcugaacaugaccaugccgcuguccugcaccaagaacaacagccaccacuacaucauggucggcaacgagaccggccucgagcugacgcugaccaacaccuccaucaucaaccacaaguucugcaaccucagcgacgcccacaagaagaaccuguacgaccacgcccugauguccaucaucagcaccuuccaccucuccauccccaacuucaaccaguacgaggccaugagcugcgacuucaacgggggcaagaucuccgugcaguacaaccugagccacuccuacgccggggacgcggccaaccacugcggcacgguggccaacgggguccugcagaccuucaugcggauggccuggggcggcagcuacaucgcgcucgacuccgggcgcggcaacugggacugcaucaugaccagcuaccaguaccugaucauccagaacaccacgugggaggaccacugccaguucucccggcccagccccaucggguaccugggccuccugucccagcgcacccgggacaucuacaucagccgccggcugcucggcaccuucaccuggacgcugagcgacuccgaggggaaggacaccccgggcggguacugccugacccgcuggaugcucaucgaggccgagcugaagugcuucggcaacaccgccguggccaagugcaacgagaagcacgacgaggaguucugcgacaugcugcggcuguucgacuucaacaagcaggccauccagcgccugaaggcgcccgcccagaugagcauccagcugaucaacaaggccgugaacgcccucaucaacgaccagcugaucaugaagaaccaccuccgggacaucauggggauccccuacugcaacuacuccaaguacugcuaccucaaccacacgaccaccggccgcaccagccugcccaagugcugccuggucuccaacggcagcuaccucaacgagacgcacuucuccgacgacaucgagcagcaggccgacaacaugaucaccgagaugcugcagaaggaguacauggagcggcaggggaagaccccgcugggccugguggaccucuucguguucagcaccuccuucuaccugaucagcaucuuccugcaccucgucaagauccccacgcaccgccacaucguggggaaguccugccccaagccccaccggcugaaccacaugggcaucugcagcugcgggcuguacaagcagccgggcgugcccgucaaguggaagcgcugaggacuaguuauaagacugacuagcccgaugggccucccaacgggcccuccuccccuccuugcaccgagauuaaucaaaggcucuuuucagagccaccaaaaaaaaaaaaaaaaaaaaaaaaaaaaaaaaaaaaaaaaaaaaaaaaaaaaaaaaaaaaaaaaagaauu

SEQ ID NO: 32774 - RNA, 1655 nt, Artificial Sequence
  mRNA product Design i-3 (hSL-A64-N5) comprising derived and/or modified sequence from LASV(LP;Clade I)__AAF86701__GPCmut7 (opt1)
aggagaaagcuuaccaugggccagaucaucaccuucuuccaggaggugccccacgucaucgaggaggugaugaacaucgugcugaucgcccucagccugcuggccauccucaaggggcuguacaacaucgcgaccugcggcaucaucgggcuggucgccuuccucuuccugugcggcaaguccugcagccugacgcucaagggcggguacgagcugcagacccuggagcucaacauggagacccugaacaugaccaugccgcuguccugcacgaagaacagcucccaccacuacauccgcgugggcaacgagaccgggcucgagcugacccugaccaacacgagcaucaucaaccacaaguucugcaaccucuccgacgcccacaagaagaaccuguacgaccacgcccugaugagcaucaucuccaccuuccaccucagcauccccaacuucaaccaguacgaggccauguccugcgacuucaacggcgggaagaucagcgugcaguacaaccugucccacagcuacgcgggcgacgccgccgagcacugcgggaccgucgccaacggcgugcugcagaccuucaugcggauggcguggggcgggcgcuacaucgcccucgacuccggcaaggggaacugggacugcaucaugacgagcuaccaguaccugaucauccagaacaccaccugggaggaccacugccaguucucccggcccagccccaucggcuaccugggccuccugucccagcgcacccgggacaucuacaucagccgccggcugcucgggacguucaccuggacccugagcgacuccgagggcaacgagacccccgggggcuacugccugacgcgcuggaugcucaucgaggccgagcugaagugcuucgggaacaccgccguggccaagugcaacgagaagcacgacgaggaguucugcgacaugcugcggcuguucgacuucaacaagcaggcgauccgccggcugaaggccccggcccagaugagcauccagcugaucaacaaggccgucaacgcccucaucaacgaccagcugaucaugaagaaccaccuccgcgacaucaugggcauccccuacugcaacuacuccaaguacugcuaccucaaccacaccagcuccggccggaccagccugcccaagugcugccugaucuccaacgggagcuaccucaacgagacgcaguucuccgacgacaucgagcagcaggcggacaacaugaucaccgagaugcugcagaaggaguacaucgagcgccagggcaagaccccgcuggggcugguggacaucuucaucuucagcaccuccuucuaccucaucagcaucuuccugcaccugaucaagauccccacgcaccggcacaucgugggcaagcccugccccaagccgcaccgccucaaccacaugggggucugcuccugcggccuguacaagcaccccggcgugcccaccaaguggaagcggugaggacuaguuauaagacugacuagcccgaugggccucccaacgggcccuccuccccuccuugcaccgagauuaaucaaaggcucuuuucagagccaccaaaaaaaaaaaaaaaaaaaaaaaaaaaaaaaaaaaaaaaaaaaaaaaaaaaaaaaaaaaaaaaaagaauu

SEQ ID NO: 32775 - RNA, 1655 nt, Artificial Sequence
  mRNA product Design i-3 (hSL-A64-N5) comprising derived and/or modified sequence from LASV(803213;Clade II)__AAF86703__GPCmut7 (opt1)
aggagaaagcuuaccaugggccagaucaucaccuucuuccaggaggugccccacgucaucgaggaggugaugaacaucgugcugaucgcccucagccugcuggccauccucaaggggaucuacaacgucgcgaccugcggccuguucgggcugaucuccuuccuccugcugugcggccgcagcugcuccgugacguacaaggggguguacgagcuccagacccuggagcugaacauggccaaccucaacaugaccaugccgcugagcugcaccaagaacaacucccaccacuacaucauggucggcaacgagacgggccuggagcucacccugaccaacaccagcaucaucaaccacaaguucugcaaccuguccgacgcccacaagaagaaccucuacgaccacgcccugaugagcaucaucuccacguuccaccugagcauccccaacuucaaccaguacgaggccauguccugcgacuucaacgggggcaagaucagcgugcaguacaaccucucccacagcuucgcgguggacgccgccaaccacugcgggaccaucgccaacggcguccugcagaccuucaugcggauggcguggggcggguccuacaucgcccuggacagcggcaaggggaacugggacugcaucaugaccuccuaccaguaccucaucauccagaacacgaccugggaggaccacugccaguucagccgccccucccccaucggcuaccuggggcugcucagccagcggacccgcgacaucuacaucagccggcgccugcugggcaccuucacguggacccucuccgacagcgagggcaacgaggcccccgggggcuacugccugacccgguggaugcugaucgaggccgagcucaagugcuucgggaacaccgccguggcgaagugcaacgagaagcacgacgaggaguucugcgacaugcugcgccuguucgacuucaacaagcaggccaucaagcggcucaagacgccggcccagauguccauccagcugaucaacaaggccgugaacgcccugaucaacgaccagcucaucaugaagaaccaccuccgcgacaucaugggcauccccuacugcaacuacagccgguacugcuaccugaaccacaccgucaccgggaagaccucccugccccgcugcugccuggugagcaacggcuccuaccugaacgagacgcacuucagcgacgacaucgagcagcaggcggacaacaugaucaccgagaugcuccagaaggaguacauggaccggcagggcaagaccccgcuggggcugguggaccuguucgucuucuccaccagcuucuaccucaucuccaucuuccugcaccuggugaagauccccacgcaccgccacaucgugggcaagcccugccccaagccgcaccggcucaaccacauggggaucugcagcugcggccuguacaagcaccccgggguccccgugaaguggaagcgcugaggacuaguuauaagacugacuagcccgaugggccucccaacgggcccuccuccccuccuugcaccgagauuaaucaaaggcucuuuucagagccaccaaaaaaaaaaaaaaaaaaaaaaaaaaaaaaaaaaaaaaaaaaaaaaaaaaaaaaaaaaaaaaaaagaauu

SEQ ID NO: 32776 - RNA, 1655 nt, Artificial Sequence
  mRNA product Design i-3 (hSL-A64-N5) comprising derived and/or modified sequence from LASV(GA391;Clade III)__CAA36645__GPCmut7 (opt1)
aggagaaagcuuaccaugggccagaucgugaccuucuuccaggaggucccccacgugaucgaggaggugaugaacaucguccugaucgcccucagcauccuggccauccugaaggggcucuacaacguggcgaccugcggccugaucgggcuggugacguuccuccugcuguccggccgcagcugcucccucaucuacaaggggaccuacgagcugcagacccuggagcucaacauggagacccugaacaugacgaugccgcugagcugcaccaagaacaacucccaccacuacauccgggucggcaacgagaccggccucgagcugacccugacgaacaccagcauccucaaccacaaguucugcaaccuguccgacgcccacaagcgcaaccuguacgaccacagccucauguccaucaucagcaccuuccaccuguccauccccaacuucaaccaguacgaggccaugagcugcgacuucaacgggggcaagaucaccgugcaguacaaccugucccacagcuucgccguggacgccgcggggcacugcggcacgcucgccaacgggguccugcagaccuucaugcggauggccuggggcggcuccuacaucgcccuggacagcgggcgcggcaacugggacugcaucaugaccuccuaccaguaccucaucauccagaacaccacgugggacgaccacugccaguucagccggcccucccccaucggguaccugggccugcucagccagcgcacccgggacaucuacaucagccgccggcugcugggcaccuucaccuggacgcucuccgacagcgaggggaacgagaccccgggcggguacugccugacccgcuggaugcugaucgaggcggagcucaagugcuucggcaacaccgccguggccaagugcaacgagaagcacgacgaggaguucugcgacaugcugcggcuguucgacuucaacaagcaggccauccgccggcucaagacgcccgcccagauguccauccagcugaucaacaaggcggugaacgcccugaucaacgaccagcucaucaugaagaaccaccuccgcgacaucauggggauccccuacugcaacuacagccgguacugcuaccugaaccacaccuccaccggcaagaccagccugccccgcugcugccugaucuccaacggcagcuaccugaacgagacgaaguucuccgacgacaucgagcagcaggccgacaacaugaucaccgagaugcugcagaaggaguacaucgaccggcaggggaagaccccgcucggccuggucgaccuguucguguucagcaccuccuucuaccucaucagcaucuuccugcaccuggugaagauccccacgcaccgccacaucgucgggaagcccugccccaagccgcaccggcucaaccacaugggcaucugcuccugcgggcuguacaagcagcccggcgugcccgugcgcuggaagcggugaggacuaguuauaagacugacuagcccgaugggccucccaacgggcccuccuccccuccuugcaccgagauuaaucaaaggcucuuuucagagccaccaaaaaaaaaaaaaaaaaaaaaaaaaaaaaaaaaaaaaaaaaaaaaaaaaaaaaaaaaaaaaaaaagaauu

SEQ ID NO: 32777 - RNA, 1658 nt, Artificial Sequence
  mRNA product Design i-3 (hSL-A64-N5) comprising derived and/or modified sequence from LASV(AV;Clade V)__CCA30314__GPCmut7 (opt1)
aggagaaagcuuaccaugggccagaucgugaccuucuuccaggaggucccccacgugaucgaggaggugaugaacaucguccugaucgcccucagcauccuggccgugcugaaggggcucuacaacaucgcgaccugcggccugaucgggcugaucacguuccuccugcugugcggccgcuccugcagcuccaaccucuacaaggggguguacgagcugcagagccuggaccucaacauggagacccugaacaugaccaugccgcuguccugcaccaagaacaacagccaccacuacauccgggucggcaacgacacgggccucgagcugacccugaccaacaccuccauccucaaccacaaguucugcaaccugagcgacgcccacaagaaggaccuguacgaccacgcccucauguccaucaucagcacguuccaccuguccauccccaacuucaaccaguacgaggccaugagcugcgacuucaacgggggcaagaucuccgugcaguacaaccugagccacuccuacgccaucgacgcggccaaccacugcgggaccguggccaacggcauccuccagaccuucaugcgcauggccuggggcgggagcuacaucgcgcuggacuccggccgggggaacugggacugcaucaugaccagcuaccaguaccugaucauccagaacacgaccugggagaaccacugccaguucucccgccccagccccaucggcuaccucgggcugcugagccagcggacccgcgacaucuacaucucccggcgccuccugggcaccuucacguggacccugagcgacuccgagggcaacgccacccccgggggcuacugccucacccgguggaugcugaucgaggccgagcugaagugcuucgggaacacggccgucgccaagugcaacgagaagcacgacgaggaguucugcgacaugcuccgccuguucgacuucaacaagcaggcgaucagccggcugaaguccccggcccagaugagcauccagcucaucaacaaggccgugaacgcccugaucaacgaccagcugaucaugaagaaccaccuccgcgacaucaugggcauccccuacugcaacuacuccaaguacugcuaccugaaccacaccaucaccgggaagaccagccugcccaagugcugccucguguccaacggcagcuaccugaacgagacgcacuucuccgacgacaucgagcagcaggccgacaacaugaucaccgagaugcugcagaaggaguacauggagcggcagggcaagaccccgcuggggcucgucgaccuguucguguucagcaccuccuucuaccugaucagcaucuuccuccgccuggugaagauccccacgcaccggcacaucgucggcaagcccugccccaagccgcaccgccugaaccacauggggaucugcuccugcggccucuacaagcagcccggggugcccgugcgguggaagcgcugaggacuaguuauaagacugacuagcccgaugggccucccaacgggcccuccuccccuccuugcaccgagauuaaucaaaggcucuuuucagagccaccaaaaaaaaaaaaaaaaaaaaaaaaaaaaaaaaaaaaaaaaaaaaaaaaaaaaaaaaaaaaaaaaagaauu

SEQ ID NO: 32778 - RNA, 1655 nt, Artificial Sequence
  mRNA product Design i-3 (hSL-A64-N5) comprising derived and/or modified sequence from LASV(Togo/2016/7082;Clade VI)__AMR44577__GPCmut7 (opt1)
aggagaaagcuuaccaugggccagaucaucaccuucuuccaggaggugccccacgucaucgaggaggugaugaacaucgugcugaucgcccucagccugcuggccauccucaagggggucuacaacguggcgaccugcggcaucaucgggcuggugacguuccuguuccucugcggccgcuccugcagccugaucuacaagggguccuacgagcugcagacccucgagcugaacauggagacccugaacaugaccaugccgcucagcugcacgaagaacuccagccaccacuacauccgggucggcaacgagaccggccuggagcugacccucaccaacacguccaucaucaaccacaaguucugcaaccugagcgacgcccacaagcgcaaccuguacgaccacgcccucauguccauccugagcaccuuccaccuguccauccccaacuucaaccaguacgaggccaugagcugcgacuucaacgggggcaagaucuccgugcaguacaaccucagccacgccuacgcgguggacgccgccgagcacugcgggaccgucgccaacggcgugcugcagaccuucaugcggauggcguggggcggguccuacaucgcccuggacagcggccgcgggaacugggacugcaucaugacguccuaccaguaccucaucauccagaacaccaccugggaggaccacugccaguucagccggcccucccccaucggcuaccuggggcugcucagccagcgcacccgggacaucuacaucagccgccggcugcugggcacguucaccuggacccucuccgacagcgagggcaacgagacccccgggggcuacugccugacgcgcuggaugcugaucgaggccgagcucaagugcuucgggaacaccgccguggccaagugcaacgagaagcacgacgaggaguucugcgacaugcugcggcuguucgacuucaacaagcaggcgauccagcgccucaaguccccggcccagaugagcauccagcugaucaacaaggccgucaacgcccugaucaacgaccagcucaucaugaagaaccaccuccgggacaugaugggcauccccuacugcaacuacuccaaguacugcuaccugaaccacaccagcuccgggcgcaccagccugcccaagugcugccugguguccaacggcagcuaccugaacgagacgcacuucuccgacgacaucgagcagcaggccgacaacaugaucaccgagaugcuccagaaggaguacaucgaccggcagggcaagaccccgcuggggcugguggaccuguucgucuucagcaccuccuucuaccucaucagcaucuuccugcaccugaucaagauccccacgcaccgccacaucgugggcaagcccugccccaagccgcaccggcucaaccacauggggaucugcuccugcggccuguacaagcagcccggggugcccacccgcuggaagcggugaggacuaguuauaagacugacuagcccgaugggccucccaacgggcccuccuccccuccuugcaccgagauuaaucaaaggcucuuuucagagccaccaaaaaaaaaaaaaaaaaaaaaaaaaaaaaaaaaaaaaaaaaaaaaaaaaaaaaaaaaaaaaaaaagaauu

SEQ ID NO: 32779 - RNA, 1655 nt, Artificial Sequence
  mRNA product Design i-3 (hSL-A64-N5) comprising derived and/or modified sequence from LASV(KAK-428;Clade n.d. (VII))__ANH09740__GPCmut7 (opt1)
aggagaaagcuuaccaugggccagaucgugaccuucuuccaggaggucccccacgugaucgaggaggugaugaacaucguccugaucgcccucagccugcuggccauccucaaggggcuguacaacuucgcgaccugcggcgugaucgggcugaucacguuccuccugcugugcggccgcuccugcagcgccaccuacaaggggcaguacgagcuccagacccuggagcugaacauggagucccucaacaugaccaugccgcugagcugcacgaagaacaacucccaccacuacauccgggccggcaacaacaccggccuggagcucacccugaccaacacgagcaucaucucccacaaguucugcaaccugagcgacgcccacaagaagaaccucuacgaccacacccugauguccaucaucaccaccuuccaccugagcauccccaacuucaaccaguacgaggccauguccugcgacuucaacgggggcaagaucagcauccaguacaaccucucccacagcuacgcgggggacgccgcccagcacugcggcacgguggccaacgggguccugcagaccuucaugcgcauggcguggggcggcuccuaccuggcccucgacagcgggcggcgcggcugggacugcaucaucuccagcuaccaguaccugaucauccagaacaccaccugggacgaccacugccaguucucccggcccagccccaucggguaccugggcuucgugagccagaagacgcgcgacaucuacaucucccggcgccuccugggcaccuucaccuggacccugagcgacuccgaggggcacgacaugccgggcggguacugccucacgcgguggaugcugaucgaggccgaccugaagugcuucggcaacaccgccguggccaagugcaacgagaagcacgacgaggaguucugcgacauguggcgccucuucgacuucaacaagcaggcgauccagcggcugaaggcccccgcccagaugaacauccagcugaucaacaaggccgucaacgcccucaucaacgaccagcugaugaugaagaaccaccuccgcgacaucauggggauccccuacugcaacuacagcaaguucugcuaccugaacaacaccaccacgggccggaccucccugccccgcugcugccugaucagcaacggcuccuaccucaacgagacccacuucagcgacgacaucgagcagcaggcggacaacaugaucaccgagaugcugcagaaggaguacauggaccggcaggggaagacgccgcugggccucguggaccuguucguguucuccaccagcuucuaccugaucaccaucuuccugcaccucgucaagauccccacccaccgccacaucguggggaagcccugccccaagccgcaccggcugaaccacaugggcaucugcuccugcgggcuguacaagcagcccggcgugcccguccgcuggaagcggugaggacuaguuauaagacugacuagcccgaugggccucccaacgggcccuccuccccuccuugcaccgagauuaaucaaaggcucuuuucagagccaccaaaaaaaaaaaaaaaaaaaaaaaaaaaaaaaaaaaaaaaaaaaaaaaaaaaaaaaaaaaaaaaaagaauu

SEQ ID NO: 32780 - RNA, 1655 nt, Artificial Sequence; identical to SEQ ID NO: 32774
  mRNA product Design i-3 (hSL-A64-N5) comprising derived and/or modified sequence from LASV(Pinneo-NIG-1969;Clade I)__AIT17836__GPCmut7 (opt1)

SEQ ID NO: 32781 - RNA, 1655 nt, Artificial Sequence
  mRNA product Design i-3 (hSL-A64-N5) comprising derived and/or modified sequence from LASV(ISTH0009-NIG-2011;Clade II)__AIT17404__GPCmut7 (opt1)
aggagaaagcuuaccaugggccagaucaucaccuucuuccaggaggugccccacgucaucgaggaggugaugaacaucgugcugaucgcccucagccugcuggccauccucaaggggaucuacaacgucgcgaccugcggccuguucgggcugguguccuuccuccugcugugcggccgcagcugcuccacgaccuacaaggggguguacgagcuccagacccuggagcuggacauggccagccucaacaugaccaugccgcuguccugcacgaagaacaacagccaccacuacaucauggucggcaacgagaccggccuggagcucacccugaccaacacguccaucaucaaccacaaguucugcaaccugagcgacgcccacaagaagaaccucuacgaccacgcccugauguccaucaucagcaccuuccaccuguccauccccaacuucaaccaguacgaggccaugagcugcgacuucaacgggggcaagaucuccgugcaguacaaccucagccacgcguacgccguggacgccgccaaccacugcgggaccaucgcgaacggcguccugcagaccuucaugcggauggccuggggcggguccuacaucgcccuggacagcggcaagggguccugggacugcaucaugacgagcuaccaguaccucaucauccagaacaccaccugggaggaccacugccaguucucccgccccagccccaucggcuaccuggggcugcucagccagcggacccgcgacaucuacaucucccggcgccugcugggcacguucaccuggacccucagcgacuccgagggcaacgagacccccgggggcuacugccugacgcgguggaugcugaucgaggccgagcucaagugcuucgggaacaccgccguggcgaagugcaacgagaagcacgacgaggaguucugcgacaugcugcgccuguucgacuucaacaagcaggccauccggcgccucaagaccccggcccagaugagcauccagcugaucaacaaggccgugaacgcccugaucaacgaccagcucaucaugaagaaccaccuccgggacaucaugggcauccccuacugcaacuacuccaaguacugcuaccugaaccacaccgucacggggaagaccagccugccccgcugcugccugguguccaacggcagcuaccugaacgagacccacuucuccgacgacaucgagcagcaggcggacaacaugaucaccgagcuccugcagaaggaguacauggaccggcagggcaagacgccgcuggggcugguggaccucuucgucuucagcaccuccuucuaccugaucagcaucuuccugcaccucaucaagauccccacccaccgccacaucaccggcaagcccugccccaagccgcaccggcugaaccacauggggaucugcuccugcggccuguacaagcaccccggggugcccgugaaguggaagcgcugaggacuaguuauaagacugacuagcccgaugggccucccaacgggcccuccuccccuccuugcaccgagauuaaucaaaggcucuuuucagagccaccaaaaaaaaaaaaaaaaaaaaaaaaaaaaaaaaaaaaaaaaaaaaaaaaaaaaaaaaaaaaaaaaagaauu

SEQ ID NO: 32782 - RNA, 1655 nt, Artificial Sequence
  mRNA product Design i-3 (hSL-A64-N5) comprising derived and/or modified sequence from LASV(ISTH2010-NIG-2012;Clade II)__AIT17482__GPCmut7 (opt1)
aggagaaagcuuaccaugggccagaucaucaccuucuuccaggaggugccccacgucaucgaggaggugaugaacaucgugcugaucgcccucagccugcuggccauccucaaggggaucuacaacgucgcgaccugcggccuguucgggcugguguccuuccuccugcugugcggccgcagcugcuccacgaccuacaaggggguguacgagcuccagacccuggagcuggacauggccagccucaacaugaccaugccgcuguccugcacgaagaacaacagccaccacuacaucauggucggcaacgagaccggccuggagcucacccugaccaacacguccaucaucaaccacaaguucugcaaccugagcgacgcccacaagaagaaccucuacgaccacgcccugauguccaucaucagcaccuuccaccuguccauccccaacuucaaccaguacgaggccaugagcugcgacuucaacgggggcaagaucuccgugcaguacaaccucagccacgcguacgccguggacgccgccaaccacugcgggaccaucgcgaacggcguccugcagaccuucaugcggauggccuggggcggguccuacaucgcccuggacagcggcaagggguccugggacugcaucaugacgagcuaccaguaccucaucauccagaacaucaccugggaggaccacugccaguucucccgccccagccccaucggcuaccuggggcugcucagccagcggacccgcgacaucuacaucucccggcgccugcugggcaccuucacguggacccucagcgacuccgagggcaacgagacccccgggggcuacugccugacccgguggaugcugaucgaggccgagcucaagugcuucgggaacacggccguggcgaagugcaacgagaagcacgacgaggaguucugcgacaugcugcgccuguucgacuucaacaagcaggccauccggcgccucaagaccccggcccagaugagcauccagcugaucaacaaggccgugaacgcccugaucaacgaccagcucaucaugaagaaccaccuccgggacaucaugggcauccccuacugcaacuacuccaaguacugcuaccugaaccacaccgucaccgggaagacgagccugccccgcugcugccugguguccaacggcagcuaccugaacgagacccacuucuccgacgacaucgagcagcaggcggacaacaugaucaccgagcuccugcagaaggaguacaucgaccggcagggcaagaccccgcuggggcugguggaccucuucgucuucagcacguccuucuaccugaucagcaucuuccugcaccucgugaagauccccacccaccgccacguggucggcaagcccugccccaagccgcaccggcugaaccacauggggaucugcuccugcggccuguacaagcaccccggggugcccgugaaguggaagcgcugaggacuaguuauaagacugacuagcccgaugggccucccaacgggcccuccuccccuccuugcaccgagauuaaucaaaggcucuuuucagagccaccaaaaaaaaaaaaaaaaaaaaaaaaaaaaaaaaaaaaaaaaaaaaaaaaaaaaaaaaaaaaaaaaagaauu

SEQ ID NO: 32783 - RNA, 1655 nt, Artificial Sequence
  mRNA product Design i-3 (hSL-A64-N5) comprising derived and/or modified sequence from LASV(Lassa virus/H.sapiens-wt/NGA/2015/ISTH_0543;Clade II)__AVO03639__GPCmut7 (opt1)
aggagaaagcuuaccaugggccagaucaucaccuucuuccaggaggugccccacgucaucgaggaggugaugaacaucgugcugaucgcccucagccugcuggccauccucaaggggaucuacaacgucgcgaccugcggccuguucgggcugguguccuuccuccugcugugcggccgcagcugcuccacgaccuacaaggggguguacgagcuccagacccuggagcuggacauggccaaccucaacaugaccaugccgcugagcugcacgaagaacaacucccaccacuacaucauggucggcaacgagaccggccuggagcucacccugaccaacacgagcaucaucaaccacaaguucugcaaccuguccgacgcccacaagaagaaccucuacgaccacgcccugaugagcaucaucuccaccuuccaccugagcauccccaacuucaaccaguacgaggccauguccugcgacuucaacgggggcaagaucagcgugcaguacaaccucucccacaccuacgcgguggacgccgccaaccacugcgggaccaucgccaacggcguccugcagacguucaugcggauggcguggggcgggagcuacaucgcccuggacuccggcaaggggagcugggacugcaucaugaccuccuaccaguaccucgugauccagaacaccaccugggaggaccacugccaguucagccgccccucccccaucggcuaccuggggcugcucagccagcggacgcgcgacaucuacaucagccggcgccugcugggcaccuucaccuggacccucuccgacagcgagggcaacgagacgcccgggggcuacugccugacccgguggaugcugaucgaggccgagcucaagugcuucgggaacaccgccguggccaagugcaacgagaagcacgacgaggaguucugcgacaugcugcgccuguucgacuucaacaagcaggcgauccggcgccucaagaccccggcccagauguccauccagcugaucaacaaggccgucaacgcccugaucaacgaccagcucaucaugaagaaccaccuccgggacaucaugggcauccccuacugcaacuacagcaaguacugcuaccugaaccacacggugaccgggaagaccucccugccccgcugcugccuggugagcaacggcuccuaccugaacgagacccacuucagcgacgacaucgagcagcaggccgacaacaugaucacggagcuccugcagaaggaguacaucgaccggcagggcaagaccccgcuggggcuggucgaccucuucguguucuccaccagcuucuaccugaucuccaucuuccugcaccucgugaagauccccacccaccgccacaucacgggcaagcccugccccaagccgcaccggcugaaccacauggggaucugcagcugcggccuguacaagcaccccgggguccccgugaaguggaagcgcugaggacuaguuauaagacugacuagcccgaugggccucccaacgggcccuccuccccuccuugcaccgagauuaaucaaaggcucuuuucagagccaccaaaaaaaaaaaaaaaaaaaaaaaaaaaaaaaaaaaaaaaaaaaaaaaaaaaaaaaaaaaaaaaaagaauu

SEQ ID NO: 32784 - RNA, 1655 nt, Artificial Sequence
  mRNA product Design i-3 (hSL-A64-N5) comprising derived and/or modified sequence from LASV(Lassa virus/H.sapiens-wt/NGA/2016/ISTH_0009;Clade II)__AVO03571__GPCmut7 (opt1)
aggagaaagcuuaccaugggccagaucaucaccuucuuccaggaggugccccacgucaucgaggaggugaugaacaucgugcugaucgcccucagccugcuggccauccucaaggggaucuacaacgucgcgaccugcggccugcuggggcucguguccuuccugcugcucugcggccgcagcugcuccacgaccuacaaggggguguacgagcugcagacccuggagcucgacauggccagccugaacaugaccaugccgcuguccugcacgaagaacaacagccaccacuacaucauggucggcaacgagaccggccucgagcugacccugaccaacacguccaucaucaaccacaaguucugcaaccucagcgacgcccacaagaagaaccuguacgaccacgcccugauguccaucaucagcaccuuccaccucuccauccccaacuucaaccaguacgaggccaugagcugcgacuucaacgggggccggaucuccgugcaguacaaccugagccacuccuacgcgguggacgccgccaaccacugcgggaccaucgccaacggcguccugcagaccuucaugcgcauggcguggggcgggagcuacaucgcccucgacuccggcaaggggagcugggacugcaucaugacguccuaccaguaccugaucauccagaacaccaccugggaggaccacugccaguucagccggcccagccccaucggcuaccuggggcuccugucccagcgcacccgggacaucuacaucagccgccggcugcucggcacguucaccuggacccuguccgacagcgagggcaacgagacccccgggggcuacugccugacgcgcuggaugcucaucgaggccgagcugaagugcuucgggaacaccgccguggccaagugcaacgagaagcacgacgaggaguucugcgacaugcugcggcuguucgacuucaacaagcaggcgauccgccggcugaagaccccggcccagauguccauccagcugaucaacaaggccgugaacgcccucaucaacgaccagcugaucaugaagaaccaccuccgcgacaucaugggcauccccuacugcaacuacagcaaguacugcuaccucaaccacaccgucacggggaagaccucccugccccggugcugccuggugagcaacggcuccuaccucaacgagacccacuucagcgacgacaucgagcagcaggccgacaacaugaucaccgagcugcugcagaaggaguacaucgaccgccagggcaagacgccgcuggggcucguggaccuguucgucuucuccaccagcuucuaccugaucuccaucuuccuccaccuggugaagauccccacccaccggcacaucaccggcaagcccugccccaagccgcaccgccugaaccacauggggaucugcagcugcggccucuacaaccaccccggggugcccgucaaguggaagcggugaggacuaguuauaagacugacuagcccgaugggccucccaacgggcccuccuccccuccuugcaccgagauuaaucaaaggcucuuuucagagccaccaaaaaaaaaaaaaaaaaaaaaaaaaaaaaaaaaaaaaaaaaaaaaaaaaaaaaaaaaaaaaaaaagaauu

SEQ ID NO: 32785 - RNA, 1655 nt, Artificial Sequence
  mRNA product Design i-3 (hSL-A64-N5) comprising derived and/or modified sequence from LASV(Lassa virus/H.sapiens-wt/NGA/2016/ISTH_0017;Clade II)__AVO03567__GPCmut7 (opt1)
aggagaaagcuuaccaugggccagaucaucaccuucuuccaggaggugccccacgucaucgaggaggugaugaacaucgugcugaucgcccucagccugcuggccauccucaaggggaucuacaacgucgcgaccugcggccuguucgggcugguguccuuccuccugcugugcggccgcagcugcuccacgaccuacaaggggguguacgagcuccagacccuggagcuggacauggccagccucaacaugaccaugccgcuguccugcacgaagaacaacagccaccacuacaucauggucggcaacgagaccggccuggagcucacccugaccaacacguccaucaucaaccacaaguucugcaaccugagcgacgcccacaagaagaaccucuacgaccacgcccugauguccaucaucagcaccuuccaccuguccauccccaacuucaaccaguacgaggccaugagcugcgacuucaacgggggcaagaucuccgugcaguacaaccucagccacaccuacgcgaucgacgccgccaaccacugcgggaccaucgccaacggcgugcugcagacguucaugcggauggcguggggcggguccuacaucgcccuggacagcggcaagggguccugggacugcaucaugaccagcuaccaguaccucaucauccagaacaccaccugggaggaccacugccaguucucccgccccagccccaucggcuaccuggggcugcucagccagcggacgcgcgacaucuacaucucccggcgccugcugggcaccuucaccuggacccucagcgacuccgagggcaacgagacgcccgggggcuacugccugacccgguggaugcugaucgaggccgagcucaagugcuucgggaacaccgccgucgccaagugcaacgagaagcacgacgaggaguucugcgacaugcugcgccuguucgacuucaacaagcaggcgauccggcgccucaagaccccggcccagaugagcauccagcugaucaacaaggccgugaacgcccugaucaacgaccagcucaucaugaagaaccaccuccgggacaucaugggcauccccuacugcaacuacuccaaguacugcuaccugaaccacacggugaccgggaagaccagccugccccgcugcugccuggucuccaacggcagcuaccugaacgagacccacuucuccgacgacaucgagcagcaggccgacaacaugaucacggagcuccugcagaaggaguacauggaccggcagggcaagaccccgcuggggcugguggaccucuucguguucagcaccuccuucuaccugaucagcaucuuccugcaccucguccgcauccccacccaccggcacgugaucggcaagcccugccccaagccgcaccgccugaaccacauggggaucugcuccugcggccuguacaagcaccccggggugcccgucaaguggaagcggugaggacuaguuauaagacugacuagcccgaugggccucccaacgggcccuccuccccuccuugcaccgagauuaaucaaaggcucuuuucagagccaccaaaaaaaaaaaaaaaaaaaaaaaaaaaaaaaaaaaaaaaaaaaaaaaaaaaaaaaaaaaaaaaaagaauu

SEQ ID NO: 32786 - RNA, 1655 nt, Artificial Sequence
  mRNA product Design i-3 (hSL-A64-N5) comprising derived and/or modified sequence from LASV(Lassa virus/H.sapiens-wt/NGA/2018/ISTH_0959;Clade II)__AVV65099__GPCmut7 (opt1)
aggagaaagcuuaccaugggccagaucaucaccuucuuccaggaggugccccacgucaucgaggaggugaugaacaucgugcugaucgcccucagccugcuggccauccucaaggggaucuacaacgucgugaccugcggccuguucgggcugguguccuuccuccugcugugcggccgcagcugcuccacgaccuacaagggggucuacgagcuccagacccuggagcuggacauggcgagccucaacaugaccaugccgcuguccugcacgaagaacaacagccaccacuacaucauggugggcaacgagaccggccuggagcucacccugaccaacacguccaucaucaaccacaaguucugcaaccugagcgacgcccacaagaagaaccucuacgaccacgcccugauguccaucaucagcaccuuccaccuguccauccccaacuucaaccaguacgaggccaugagcugcgacuucaacgggggcaagaucuccgugcaguacaaccucagccacgccuacgcgaucgacgccgccaaccacugcgggaccaucgccaacggcguccugcagaccuucaugcggauggcguggggcggguccuacaucgcccuggacagcggcaagggguccugggacugcaucaugacgagcuaccaguaccucaucauccagaacaccaccugggaggaccacugccaguucucccgccccagccccaucggcuaccuggggcugcucagccagcggacccgcgacaucuacaucucccggcgccugcugggcacguucaccuggacccucagcgacuccgagggcaacgagacccccgggggcuacugccugacgcgguggaugcugaucgaggccgagcucaagugcuucgggaacaccgccguggccaagugcaacgagaagcacgacgaggaguucugcgacaugcugcgccuguucgacuucaacaagcaggcgauccggcgccucaagaccccggcccagaugagcauccagcugaucaacaaggccgugaacgcccugaucaacgaccagcucaucaugaagaaccaccuccgggacaucaugggcauccccuacugcaacuacuccaaguacugcuaccugaaccacaccgucacggggaagaccagccugccccgcugcugccugguguccaacggcagcuaccugaacgagacccacuucuccgacgacaucgagcagcaggccgacaacaugaucaccgagcuccugcagaaggaguacaucgaccggcagggcaagacgccgcuggggcugguggaccucuucgucuucagcaccuccuucuaccugaucagcaucuuccugcaccucgugaagauccccacccaccgccacgugaucggcaagcccugccccaagccgcaccggcugaaccacauggggaucugcuccugcggccuguacaagcaccccgggguccccgugaaguggaagcgcugaggacuaguuauaagacugacuagcccgaugggccucccaacgggcccuccuccccuccuugcaccgagauuaaucaaaggcucuuuucagagccaccaaaaaaaaaaaaaaaaaaaaaaaaaaaaaaaaaaaaaaaaaaaaaaaaaaaaaaaaaaaaaaaaagaauu

SEQ ID NO: 32787 - RNA, 1655 nt, Artificial Sequence
  mRNA product Design i-3 (hSL-A64-N5) comprising derived and/or modified sequence from LASV(LASV003-NIG-2008;Clade II)__AIT17580__GPCmut7 (opt1)
aggagaaagcuuaccaugggccagaucaucaccuucuuccaggaggugccccacgucaucgaggaggugaugaacaucgugcugaucgcccucagccugcuggccauccucaaggggaucuacaacgucgcgaccugcggccuguucgggcugguguccuuccuccugcugugcggccgcagcugcuccacgaccuacaaggggguguacgagcuccagacccuggagcuggacauggccagccucaacaugaccaugccgcuguccugcacgaagaacaacagccaccacuacaucauggucggcaacgagaccggccuggagcucacccugaccaacacguccaucaucaaccacaaguucugcaaccugagcgacgcccacaagaagaaccucuacgaccacgcccugauguccaucaucagcaccuuccaccuguccauccccaacuucaaccaguacgaggccaugagcugcgacuucaacgggggcaagaucuccgugcaguacaaccucagccacaccuacgcgguggacgccgccaaccacugcgggaccaucgccaacggcguccugcagacguucaugcggauggcguggggcggguccuacaucgcccuggacagcggcaagggguccugggacugcaucaugaccagcuaccaguaccucaucauccagaacaccaccugggaggaccacugccaguucucccgccccagccccaucggcuaccuggggcugcucagccagcggacgcgcgacaucuacaucucccggcgccugcugggcaccuucaccuggacccucagcgacuccgagagcaacgagacgccgggcggguacugccugacccgguggaugcugaucgaggccgagcucaagugcuucggcaacaccgccguggccaagugcaacgagaagcacgacgaggaguucugcgacaugcugcgccuguucgacuucaacaagcaggcgauccggcgccucaaggcccccgcccagauguccauccagcugaucaacaaggccgugaacgcccugaucaacgaccagcucaucaugaagaaccaccuccgggacaucauggggauccccuacugcaacuacagcaaguacugcuaccugaaccacaccgucacgggccgcaccucccugccccggugcugccuggugagcaacggguccuaccugaacgagacccacuucagcgacgacaucgagcagcaggcggacaacaugaucaccgagcuccugcagaaggaguacauggaccgccagggcaagacgccgcugggccugguggaccucuucgucuucuccaccagcuucuaccugaucuccaucuuccugcaccucgugaagauccccacccaccggcacgugaucgggaagcccugccccaagccgcaccgccugaaccacaugggcaucugcagcugcgggcuguacaagcaccccggcguccccgugaaguggaagcggugaggacuaguuauaagacugacuagcccgaugggccucccaacgggcccuccuccccuccuugcaccgagauuaaucaaaggcucuuuucagagccaccaaaaaaaaaaaaaaaaaaaaaaaaaaaaaaaaaaaaaaaaaaaaaaaaaaaaaaaaaaaaaaaaagaauu

SEQ ID NO: 32788 - RNA, 1655 nt, Artificial Sequence
  mRNA product Design i-3 (hSL-A64-N5) comprising derived and/or modified sequence from LASV(LASV035-NIG-2009;Clade II)__AIT17588__GPCmut7 (opt1)
aggagaaagcuuaccaugggccagaucaucaccuucuuccaggaggugccccacgucaucgaggaggugaugaacaucgugcugaucgcccucagccugcuggccauccucaaggggaucuacaacgucgcgaccugcggccuguucgggcugguguccuuccuccugcugugcggccgcagcugcuccacgaccuacaaggggguguacgagcuccagacccuggagcuggacauggccagccucaacaugaccaugccgcuguccugcacgaagaacaacagccaccacuacaucauggucggcaacgagaccggccuggagcucacccugaccaacacguccaucaucaaccacaaguucugcaaccugagcgacgcccacaagaagaaccucuacgaccacgcccugauguccaucaucagcaccuuccaccuguccauccccaacuucaaccaguacgaggccaugagcugcgacuucaacgggggcaagaucuccgugcaguacaaccucagccacgcguacgccguggacgccgccaaccacugcgggaccaucgcgaacggcguccugcagaccuucaugcggauggccuggggcggguccuacaucgcccuggacagcggcaagggguccugggacugcaucaugacgagcuaccaguaccucaucauccagaacaccaccugggaggaccacugccaguucucccgccccagccccaucggcuaccuggggcugcucagccagcggacccgcgacaucuacaucucccggcgccugcugggcacguucaccuggacccucagcgacuccgagggcaacgagacccccgggggcuacugccugacgcgguggaugcugaucgaggccgagcucaagugcuucgggaacaccgccguggcgaagugcaacgagaagcacgacgaggaguucugcgacaugcugcgccuguucgacuucaacaagcaggccauccggcgccucaaggccccggcccagaugagcauccagcugaucaacaaggccgugaacgcgcugaucaacgaccagcucaucaugaagaaccaccuccgggacaucaugggcauccccuacugcaacuacuccaaguacugcuaccugaaccacaccgucaccgggaagacgagccugccccgcugcugccugguguccaacggcagcuaccugaacgagacccacuucuccgacgacaucgagcagcaggccgacaacaugaucaccgagcuccugcagaaggaguacaucgaccggcagggcaagaccccgcuggggcugguggaccucuucgucuucagcacguccuucuaccugaucagcaucuuccugcaccucgugaagauccccacccaccgccacgugaucggcaagcccugccccaagccgcaccggcugaaccacauggggaucugcuccugcggccuguacaagcaccccgggguccccgugaaguggaagcgcugaggacuaguuauaagacugacuagcccgaugggccucccaacgggcccuccuccccuccuugcaccgagauuaaucaaaggcucuuuucagagccaccaaaaaaaaaaaaaaaaaaaaaaaaaaaaaaaaaaaaaaaaaaaaaaaaaaaaaaaaaaaaaaaaagaauu

SEQ ID NO: 32789 - RNA, 1655 nt, Artificial Sequence
  mRNA product Design i-3 (hSL-A64-N5) comprising derived and/or modified sequence from LASV(LASV1000-NIG-2009;Clade II)__AIT17782__GPCmut7 (opt1)
aggagaaagcuuaccaugggccagaucaucaccuucuuccaggaggugccccacgucaucgaggaggugaugaacaucgugcugaucgcccucagccugcuggccauccucaaggggaucuacaacgucgcgaccugcggccuguucgggcugguguccuuccuccugcugugcggccgcagcugcuccacgaccuacaaggggguguacgagcuccagacccuggagcuggacauggccagccucaacaugaccaugccgcuguccugcacgaagaacaacagccaccacuacaucauggucggcaacgagaccggccuggagcucacccugaccaacacguccaucaucaaccacaaguucugcaaccugagcgacgcccacaagaagaaccucuacgaccacgcccugauguccaucaucagcaccuuccaccuguccauccccaacuucaaccaguacgaggccaugagcugcgacuucaacgggggcaagaucuccgugcaguacaaccucagccacaccuacgcgguggacgccgccaaccacugcgggaccaucgccaacggcguccugcagacguucaugcggauggcguggggcggguccuacaucgcccuggacagcggcaagggguccugggacugcaucaugaccagcuaccaguaccucaucauccagaacaccaccugggaggaccacugccaguucucccgccccagccccaucggcuaccuggggcugcucagccagcggacgcgcgacaucuacaucucccggcgccugcugggcaccuucaccuggacccucagcgacuccgagggcaacgagacgcccgggggcuacugccugacccgguggaugcugaucgaggccgagcucaagugcuucgggaacaccgccguggccaagugcaacgagaagcacgacgaggaguucugcgacaugcugcgccuguucgacuucaacaagcaggcgaucaagcggcucaagaccccggcccagaugagcauccagcugaucaacaaggccgugaacgcccugaucaacgaccagcucaucaugaagaaccaccuccgcgacaucaugggcauccccuacugcaacuacuccaaguacugcuaccugaaccacacggucaccgggaagaccagccugccccggugcugccugguguccaacggcagcuaccugaacgagacccacuucuccgacgacaucgagcagcaggccgacaacaugaucacggagcuccugcagaaggaguacaucgaccgccagggcaagaccccgcuggggcugguggaccucuucgucuucagcaccuccuucuaccugaucagcaucuuccugcaccucgugaagauccccacccaccggcacguggucggcaagcccugccccaagccgcaccgccugaaccacauggggaucugcuccugcggccuguacaagcaccccggggugcccgugaaguggaagcggugaggacuaguuauaagacugacuagcccgaugggccucccaacgggcccuccuccccuccuugcaccgagauuaaucaaaggcucuuuucagagccaccaaaaaaaaaaaaaaaaaaaaaaaaaaaaaaaaaaaaaaaaaaaaaaaaaaaaaaaaaaaaaaaaagaauu

SEQ ID NO: 32790 - RNA, 1655 nt, Artificial Sequence
  mRNA product Design i-3 (hSL-A64-N5) comprising derived and/or modified sequence from LASV(LASV221-NIG-2010;Clade II)__AIT17624__GPCmut7 (opt1)
aggagaaagcuuaccaugggccagaucaucaccuucuuccaggaggugccccacgucaucgaggaggugaugaacaucgugcugaucgcccucagccugcuggccauccucaaggggaucuacaacgucgcgaccugcggccuguucgggcugguguccuuccuccugcugugcggccgcagcugcuccacgaccuacaaggggguguacgagcuccagacccuggagcuggacauggccagccucaacaugaccaugccgcuguccugcacgaagaacaacagccaccacuacaucauggucggcaacgagaccggccuggagcucacccugaccaacacguccaucaucaaccacaaguucugcaaccugagcgacgcccacaagaagaaccucuacgaccacgcccugauguccaucaucagcaccuuccaccuguccauccccaacuucaaccaguacgaggccaugagcugcgacuucaacgggggcaagaucuccgugcaguacaaccucagccacaccuacgcgaucgacgccgccaaccacugcgggaccaucgccaacggcgugcugcagacguucaugcggauggcguggggcggguccuacaucgcccuggacagcggcaagggguccugggacugcaucaugaccagcuaccaguaccucaucauccagaacaccaccugggaggaccacugccaguucucccgccccagccccaucggcuaccuggggcugcucagccagcggacgcgcgacaucuacaucucccggcgccugcugggcaccuucaccuggacccucagcgacuccgagggcaacgagacgcccgggggcuacugccugacccgguggaugcugaucgaggccgagcucaagugcuucgggaacaccgccgucgccaagugcaacgagaagcacgacgaggaguucugcgacaugcugcgccuguucgacuucaacaagcaggcgauccggcgccucaagaccccggcccagaugagcauccagcugaucaacaaggccgugaacgcccugaucaacgaccagcucaucaugaagaaccaccuccgggacaucaugggcauccccuacugcaacuacuccaaguacugcuaccugaaccacacggugaccgggaagaccagccugccccgcugcugccuggucuccaacggcagcuaccugaacgagacccacuucuccgacgacaucgagcagcaggccgacaacaugaucacggagaugcuccagaaggaguacauggaccggcagggcaagaccccgcuggggcugguggaccuguucguguucagcaccuccuucuaccucaucagcaucuuccugcaccuggucaagauccccacccaccgccacgugaucggcaagcccugccccaagccgcaccggcucaaccacauggggaucugcuccugcggccuguacaagcaccccggggugcccgucaaguggaagcgcugaggacuaguuauaagacugacuagcccgaugggccucccaacgggcccuccuccccuccuugcaccgagauuaaucaaaggcucuuuucagagccaccaaaaaaaaaaaaaaaaaaaaaaaaaaaaaaaaaaaaaaaaaaaaaaaaaaaaaaaaaaaaaaaaagaauu

SEQ ID NO: 32791 - RNA, 1655 nt, Artificial Sequence
  mRNA product Design i-3 (hSL-A64-N5) comprising derived and/or modified sequence from LASV(LASV237-NIG-2010;Clade II)__AIT17638__GPCmut7 (opt1)
aggagaaagcuuaccaugggccagaucaucaccuucuuccaggaggugccccacgucaucgaggaggugaugaacaucgugcugaucgcccucagccugcuggccauccucaaggggaucuacaacgucgcgaccugcggccuguucgggcugguguccuuccuccugcugugcggccgcagcugcuccacgaccuacaaggggguguacgagcuccagacccuggagcuggacauggccagccucaacaugaccaugccgcuguccugcacgaagaacaacagccaccacuacaucauggucggcaacgagaccggccuggagcucacccugaccaacacguccaucaucaaccacaaguucugcaaccugagcgacgcccacaagaaggaccucuacgaccacgcccugauguccaucaucagcaccuuccaccuguccauccccaacuucaaccaguacgaggccaugagcugcgacuucaacgggggcaagaucuccgugcaguacaaccucagccacaccuacgcgguggacgccgccaaccacugcgggaccaucgccaacggcguccugcagacguucaugcggauggcguggggcggguccuacaucgcccuggacagcggcaagggguccugggacugcaucaugaccagcuaccaguaccucaucauccagaacaccaccugggaggaccacugccaguucucccgccccagccccaucggcuaccuggggcugcucagccagcggacgcgcgacaucuacaucucccggcgccugcugggcaccuucaccuggacccucagcgacuccgagggcaacgagacgcccgggggcuacugccugacccgguggaugcugaucgaggccgagcucaagugcuucgggaacaccgccguggccaagugcaacgagaagcacgacgaggaguucugcgacaugcugcgccuguucgacuucaacaagcaggcgauccggcgccucaagaccccggcccagaugagcauccagcugaucaacaaggccgugaacgcccugaucaacgaccagcucaucaugaagaaccaccuccgggacaucaugggcauccccuacugcaacuacuccaaguacugcuaccugaaccacacggucaccgggaagaccagccugccccgcugcugccugguguccaacggcagcuaccugaacgagacccacuucuccgacgacaucgagcagcaggccgacaacaugaucacggagcuccugcagaaggaguacauggaccggcagggcaagaccccgcuggggcugguggaccucuucgucuucagcaccuccuucuaccugaucagcaucuuccugcaccucaucaagauccccacccaccgccacaucacgggcaagcccugccccaagccgcaccggcugaaccacauggggaucugcuccugcggccuguacaagcaccccggggugcccgugaaguggaagcgcugaggacuaguuauaagacugacuagcccgaugggccucccaacgggcccuccuccccuccuugcaccgagauuaaucaaaggcucuuuucagagccaccaaaaaaaaaaaaaaaaaaaaaaaaaaaaaaaaaaaaaaaaaaaaaaaaaaaaaaaaaaaaaaaaagaauu

SEQ ID NO: 32792 - RNA, 1655 nt, Artificial Sequence
  mRNA product Design i-3 (hSL-A64-N5) comprising derived and/or modified sequence from LASV(LASV253-NIG-2011;Clade II)__AIT17670__GPCmut7 (opt1)
aggagaaagcuuaccaugggccagaucaucaccuucuuccaggaggugccccacgucaucgaggaggugaugaacaucgugcugaucgcccucagccugcuggccauccucaaggggaucuacaacgucgcgaccugcggccuguucgggcugguguccuuccuccugcugugcggccgcagcugcuccacgaccuacaaggggguguacgagcuccagacccuggagcuggacauggccagccucaacaugaccaugccgcuguccugcacgaagaacaacagccaccacuacaucauggucggcaacgagaccggccuggagcucacccugaccaacacguccaucaucaaccacaaguucugcaaccugagcgacgcccacaagaagaaccucuacgaccacgcccugauguccaucaucagcaccuuccaccuguccauccccaacuucaaccaguacgaggccaugagcugcgacuucaacgggggcaagaucuccgugcaguacaaccucagccacaccuacgcgguggacgccgccaaccacugcgggaccaucgccaacggcguccugcagacguucaugcggauggcguggggcggguccuacaucgcccuggacagcggcaagggguccugggacugcaucaugaccagcuaccaguaccucaucauccagaacaccaccugggaggaccacugccaguucucccgccccagccccaucggcuaccuggggcugcucagccagcggacgcgcgacaucuacaucucccggcgccugcugggcaccuucaccuggacccucagcgacuccgagggcaacgagacgcccgggggcuacugccugacccgguggaugcugaucgaggccgagcucaagugcuucgggaacaccgccguggccaagugcaacgagaagcacgacgaggaguucugcgacaugcugcgccuguucgacuucaacaagcaggcgauccggcgccucaaggccccggcccagaugagcauccagcugaucaacaaggccgugaacgcccugaucaacgaccagcucaucaugaagaaccaccuccgggacaucaugggcauccccuacugcaacuacuccaaguacugcuaccugaaccacaccgucacggggcgcaccagccugccccggugcugccugguguccaacggcagcuaccugaacgagacccacuucuccgacgacaucgagcagcaggcggacaacaugaucaccgagcuccugcagaaggaguacaucgaccgccagggcaagacgccgcuggggcugguggaccucuucgucuucagcaccuccuucuaccugaucagcaucuuccugcaccucgugaagauccccacccaccggcacaucaucggcaagcccugccccaagccgcaccgccugaaccacauggggaucugcuccugcggccuguacaagcaccccggggugcccgucaaguggaagcggugaggacuaguuauaagacugacuagcccgaugggccucccaacgggcccuccuccccuccuugcaccgagauuaaucaaaggcucuuuucagagccaccaaaaaaaaaaaaaaaaaaaaaaaaaaaaaaaaaaaaaaaaaaaaaaaaaaaaaaaaaaaaaaaaagaauu

SEQ ID NO: 32793 - RNA, 1655 nt, Artificial Sequence
  mRNA product Design i-3 (hSL-A64-N5) comprising derived and/or modified sequence from LASV(LASV254-NIG-2011;Clade II)__AIT17674__GPCmut7 (opt1)
aggagaaagcuuaccaugggccagaucaucaccuucuuccaggaggugccccacgucaucgaggaggugaugaacaucgugcugaucgcccucagccugcuggccauccucaaggggaucuacaacgucgcgaccugcggccuguucgggcugguguccuuccuccugcugugcggccgcagcugcuccacgaccuacaaggggguguacgagcuccagacccuggagcuggacaugaccaaccucaacaugacgaugccgcugagcugcaccaagaacaacucccaccacuacaucauggucggcaacgagaccggccuggagcucacccugacgaacaccagcaucaucaaccacaaguucugcaaccuguccgacgcccacaagaagaaccucuacaaccacgcccugaugagcaucaucuccaccuuccaccugagcauccccaacuucaaccaguacgaggccauguccugcgacuucaacgggggcaagaucagcgugcaguacaaccucucccacagcuacgccguggacgcggccaaccacugcgggaccaucgccaacggcguccugcagacguucaugcggauggccuggggcggguccuacaucgcgcuggacagcggcaaggggaacugggacugcaucaugaccuccuaccaguaccucaucauccagaacaccaccugggaggaccacugccaguucagccgccccucccccaucggcuaccuggggcugcucagccagcggacgcgcgacaucuacaucagccggcgccugcugggcaccuucaccuggacccucuccgacagcgagggcaacgagacgcccgggggcuacugccugacccgguggaugcugaucgaggccgagcucaagugcuucgggaacaccgccguggccaagugcaacgagaagcacgacgaggaguucugcgacaugcugcgccuguucgacuucaacaagcaggccauccggcgccucaagaccccggcgcaggccaacauccagcugaucaacaaggccgugaacgcccugaucaacgaccagcucaucaugaagaaccaccuccgggacaucaugggcauccccuacugcaacuacuccaaguacugcuaccugaaccacacggucaccgggaagaccagccugccccgcugcugccugguguccaacggcagcuaccugaacgagacccacuucuccgacgacaucgagcagcaggccgacaacaugaucacggagcuccugcagaaggaguacauggaccggcagggcaagaccccgcuggggcugguggaccucuucgucuucagcaccuccuucuaccugaucagcaucuuccugcaccucgugaagauccccacccaccgccacgugaucggcaagcccugccccaagccgcaccggcugaaccacauggggaucugcuccugcggccuguacaagcaccccgggguccccgugaaguggaagcgcugaggacuaguuauaagacugacuagcccgaugggccucccaacgggcccuccuccccuccuugcaccgagauuaaucaaaggcucuuuucagagccaccaaaaaaaaaaaaaaaaaaaaaaaaaaaaaaaaaaaaaaaaaaaaaaaaaaaaaaaaaaaaaaaaagaauu

SEQ ID NO: 32794 - RNA, 1655 nt, Artificial Sequence
  mRNA product Design i-3 (hSL-A64-N5) comprising derived and/or modified sequence from LASV(Nig08-A19;Clade III)__ADU56618__GPCmut7 (opt1)
aggagaaagcuuaccaugggccagaucgugaccuucuuccaggaggucccccacgugaucgaggaggugaugaacaucguccugaucgcccucagcauccuggccauccugaaggggcucuacaacaucgcgaccugcggccugaucgggcuggugacguuccuccugcuguccggccgcagcugcuccaugaccuacaaggggguguacgagcuccagacccuggagcugaacaugaacacccucaacaugacgaugccgcugagcugcaccaagaacaacucccaccacuacaucauggucggcaacgagaccggccuggagcucacccugacgaacaccagccugcuccaccacaaguucugcaaccuguccgacgcccacaagaagaaccuguacgaccacacccucaugagcaucaucuccaccuuccaccugagcauccccaacuucaaccaguacgaggccauguccugcgacuucaacgggggcaagaucacggugcaguacaaccugagccacuccuacgccaucgacgccgcgaaccacugcgggaccguggccaacggcguccuccagaccuucaugcggauggccuggggcgggagcuacaucgcccuggacuccggccgcgggaagugggacugcaucaugaccagcuaccaguaccugaucauccagaacacgaccugggaggaccacugccaguucucccggcccagccccaucggcuaccucgggcugcugucccagcgcacccgggacaucuacaucagccgccggcuccugggcaccuucacguggacccugagcgacuccgagggcaacgagacccccgggggcuacugccucacccgcuggaugcugaucgaggcggagcugaagugcuucgggaacacggccguggccaagugcaacgagaagcacgacgaggaguucugcgacaugcuccggcuguucgacuucaacaagcaggccauccgccggcugaaggccccggcgcagaugagcauccagcucaucaacaaggccgugaacgcccugaucaacgaccagcugaucaugaagaaccaccuccgcgacaucaugggcauccccuacugcaacuacuccaaguacugcuaccugaaccacaccagcaccgggcggaccucccugccccgcugcugccucgucagcaacggcuccuaccugaacgagacgcacuucagcgacgacaucgagcagcaggccgacaacaugaucaccgagaugcugcagaaggaguaccuggaccggcagggcaagaccccgcucgggcugguggaccuguucguguucuccaccagcuucuaccucaucuccaucuuccugcaccuggucaagauccccacgcaccgccacaucgugggcaagcccugccccaagccgcaccggcucaaccacauggggaucugcagcugcggccuguacaagcagcccggggugcccguccgcuggaagcggugaggacuaguuauaagacugacuagcccgaugggccucccaacgggcccuccuccccuccuugcaccgagauuaaucaaaggcucuuuucagagccaccaaaaaaaaaaaaaaaaaaaaaaaaaaaaaaaaaaaaaaaaaaaaaaaaaaaaaaaaaaaaaaaaagaauu

SEQ ID NO: 32795 - RNA, 1658 nt, Artificial Sequence
  mRNA product Design i-3 (hSL-A64-N5) comprising derived and/or modified sequence from LASV(G1180-SLE-2010;Clade IV)__AIT17168__GPCmut7 (opt1)
aggagaaagcuuaccaugggccagaucgugaccuucuuccaggaggucccccacgugaucgaggaggugaugaacaucguccugaucgcccucagcauccuggccgugcugaaggggcucuacaacuucgcgaccugcggccugguggggcugcucacguuccugcugcucugcggccgcuccugcaccgccagccgguacaagggggucuacgagcugcagacccuggagcucaacauggagacccugaacaugacgaugccgcuguccugcaccaagaacaacagccaccacuacaucauggugggcaacgagaccggccucgagcugacccugacgaacaccuccaucaucaaccacaaguucugcaaccucagcgacgcccacaagaagaaccuguacgaccacgcccugauguccaucaucagcaccuuccaccucuccauccccaacuucaaccaguacgaggccaugagcugcgacuucaacgggggcaagaucuccgugcaguacaaccugagccacuccuacgcgggggacgccgccaaccacugcggcaccgucgccaacggggugcugcagacguucaugcgcauggcguggggcggcagcuacaucgcccucgacuccgggcacggcagcugggacugcaucaugaccuccuaccaguaccugaucauccagaacaccaccugggaggaccacugccaguucagccggcccucccccaucggguaccugggccuccugagccagcgcacgcgggacaucuacaucagccgccggcugcucggcaccuucaccuggacccuguccgacagcgaggggaaggacacgccgggcggguacugccugacccgcuggaugcucaucgaggccgagcugaagugcuucggcaacaccgccguggccaagugcaacgagaagcacgacgaggaguucugcgacaugcugcggcuguucgacuucaacaagcaggcgauccagcgccugaaggcccccgcccagauguccauccagcugaucaacaaggccgucaacgcccucaucaacgaccagcugaucaugaagaaccaccuccgggacaucauggggauccccuacugcaacuacagcaaguacugcuaccucaaccacaccacgaccggcaagaccucccugcccaagugcugccuggugagcaacggcuccuaccucaacgagacccacuucagcgacgacaucgagcagcaggcggacaacaugaucacggagaugcugcagaaggaguacauggagcgccaggggaagaccccgcugggccugguggaccucuucgucuucuccaccagcuucuaccugaucuccaucuuccugcaccucgugaagauccccacccaccggcacaucgugggcaagagcugccccaagccccaccgccugaaccacauggggaucugcuccugcgggcuguacaagcagccgggcguccccgugaaguggaagcggugaggacuaguuauaagacugacuagcccgaugggccucccaacgggcccuccuccccuccuugcaccgagauuaaucaaaggcucuuuucagagccaccaaaaaaaaaaaaaaaaaaaaaaaaaaaaaaaaaaaaaaaaaaaaaaaaaaaaaaaaaaaaaaaaagaauu

SEQ ID NO: 32796 - RNA, 1658 nt, Artificial Sequence
  mRNA product Design i-3 (hSL-A64-N5) comprising derived and/or modified sequence from LASV(G1442-SLE-2011;Clade IV)__AIT17180__GPCmut7 (opt1)
aggagaaagcuuaccaugggccagaucgugaccuucuuccaggaggucccccacgugaucgaggaggugaugaacaucguccugaucgcccucagcauccuggccgugcugaaggggcucuacaacguggcgaccugcggccugaucgggcuggucacguuccuccugcugugcggccgcuccugcaccaccacccucuacaaggggguguacgagcugcagacgcuggagcucaacauggagacccugaacaugaccaugccgcugagcugcaccaagaacaacucccaccacuacauccgggugggcaacgagacgggccucgagcugacccugaccaacaccagcaucaucaaccacaaguucugcaaccucuccgacgcccacaagaagaaccuguacgaccacgcccugaugagcaucaucuccacguuccaccucagcauccccaacuucaaccaguacgaggccauguccugcgacuucaacgggggcaagaucagcguccaguacaaccugucccacagcuacgccggggacgcggccaaccacugcggcaccguggccaacggggugcugcagaccuucaugcgcauggccuggggcggcuccuacaucgcgcucgacagcgggcggggcaacugggacugcaucaugaccuccuaccaguaccugaucauccagaacacgaccugggacgaccacugccaguucagccgccccucccccaucggguaccugggccuccugagccagcggacccgcgacgucuacaucucccggcgccugcucggcaccuucacguggacccugagcgacagcgaggggaaggacaccccgggcggguacugccugacccgguggaugcucaucgaggccgagcugaagugcuucggcaacacggccguggccaagugcaacgagaagcacgacgaggaguucugcgacaugcugcgccucuucgacuucaacaagcaggccauccagcggcugaaggcgcccgcccagauguccauccagcugaucaacaaggccgugaacgcccucaucaacgaccagcugaucaugaagaaccaccuccgcgacaucauggggauccccuacugcaacuacagcaaguacugcuaccugaacaacaccgccaccggcaagaccucccugcccaagugcugccugaucagcaacggcuccuaccucaacgagacgcacuucagcgacgacaucgagcaggaggcggacaacaugaucaccgagaugcugcagaaggaguacauggagcggcaggggaagaccccgcugggccuggucgaccucuucguguucuccaccagcuucuaccugaucuccaucuuccugcaccucgugaagauccccacgcaccgccacaucgucggcaagagcugccccaagccccaccggcugaaccacauggggaucugcuccugcgggcuguacaagcagccgggcgugcccgugcgcuggaagcggugaggacuaguuauaagacugacuagcccgaugggccucccaacgggcccuccuccccuccuugcaccgagauuaaucaaaggcucuuuucagagccaccaaaaaaaaaaaaaaaaaaaaaaaaaaaaaaaaaaaaaaaaaaaaaaaaaaaaaaaaaaaaaaaaagaauu

SEQ ID NO: 32797 - RNA, 1658 nt, Artificial Sequence
  mRNA product Design i-3 (hSL-A64-N5) comprising derived and/or modified sequence from LASV(G3010-SLE-2013;Clade IV)__AIT17344__GPCmut7 (opt1)
aggagaaagcuuaccaugggccagaucgugaccuucuuccaggaggucccccacgugaucgaggaggugaugaacaucguccugaucgcccucagcauccuggccgugcugaaggggcucuacaacuucgcgaccugcggccugguggggcuggucacguuccuccugcugugcggccgcuccugcaccaccagccucuacaaggggguguacgagcugcagacccuggagcucaacauggagacgcugaacaugaccaugccgcuguccugcaccaagaacaacagccaccacuacaucauggugggcaacgagaccggccucgagcugacgcugaccaacaccuccaucaucaaccacaaguucugcaaccucagcgacgcccacaagaagaaccuguacaaccacgcccugauguccaucaucagcaccuuccaccucuccauccccaacuucaaccaguacgaggccaugagcugcgacuucaacgggggcaagaucuccguccaguacaaccugagccacuccuacgccggggacgcggccagccacugcggcacgguggccaacggggugcugcagaccuucaugcggauggccuggggcggcuccuacaucgcgcucgacagcggguacggcaagugggacugcaucaugaccuccuaccaguaccugaucauccagaacaccacgugggaggaccacugccaguucagccgccccucccccaucggguaccugggccuccugagccagcggacccgcgacaucuacaucagccggcgccugcucggcaccuucaccuggacgcuguccgacagcgaggggaaggacaccccgggcggguacugccugacccgguggaugcucaucgaggccgagcugaagugcuucggcaacaccgccgucgccaagugcaacgagaagcacgacgaggaguucugcgacaugcugcgccucuucgacuucaacaagcaggccauccagcggcugaagacgcccgcgcagauguccauccagcugaucaacaaggccgugaacgcccucaucaacgaccagcugaucaugaagaaccaccuccgcgacaucauggggauccccuacugcaacuacagcaaguacugcuaccugaaccacaccaccaccggcaagacgucccugcccaagugcugccuggugagcaacggcuccuaccucaacgagacccacuucagcgacgacaucgagcagcaggccgacaacaugaucaccgagaugcugcagaaggaguacauggagcggcaggggaagaccccgcugggccuggucgaccucuucguguucuccacgagcuucuaccugaucuccaucuuccugcaccucgugaagauccccacccaccgccacaucgucggcaagagcugccccaagccccaccggcugaaccacauggggaucugcuccugcgggcuguacaagcagccgggcgugcccgugcgcuggaagcggugaggacuaguuauaagacugacuagcccgaugggccucccaacgggcccuccuccccuccuugcaccgagauuaaucaaaggcucuuuucagagccaccaaaaaaaaaaaaaaaaaaaaaaaaaaaaaaaaaaaaaaaaaaaaaaaaaaaaaaaaaaaaaaaaagaauu

SEQ ID NO: 32798 - RNA, 1658 nt, Artificial Sequence
  mRNA product Design i-3 (hSL-A64-N5) comprising derived and/or modified sequence from LASV(G502-SLE-2009;Clade IV)__AIT17126__GPCmut7 (opt1)
aggagaaagcuuaccaugggccagaucgugaccuucuuccaggaggucccccacgugaucgaggaggugaugaacaucguccugaucgcccucagcauccuggccgugcugaaggggcucuacaacuucgcgaccugcggccugguggggcugcucacguuccugcugcucugcggccgcuccugcaccaccgggcuguacaagggcgucuacgagcugcagacccucgagcugaacauggagacgcugaacaugaccaugccgcucagcugcaccaagaacaacucccaccacuacaucauggugggcaacgagaccgggcuggagcugacgcucaccaacaccagcaucaucaaccacaaguucugcaaccuguccgacgcccacaagaagaaccuguacgaccacgcccucaugagcaucaucuccaccuuccaccugagcauccccaacuucaaccaguacgaggccauguccugcgacuucaacggcgggaagaucagcgugcaguacaaccugucccacagcuacgccggcgacgcggccgaccacugcgggacggucgccaacggcgugcuccagaccuucaugcggauggccuggggcggguccuacaucgcgcuggacagcggccgcgggcggugggacugcaucaugaccuccuaccaguaccugaucauccagaacaccacgugggaggaccacugccaguucagccgccccucccccaucggcuaccucggccugcugagccagcggacccgcgacaucuacaucucccggcgccuccuggggaccuucaccuggacgcugagcgacagcgagggcaaggacacccccgggggcuacugccucacccgguggaugcugaucgaggccgagcugaagugcuucgggaacaccgccguggccaagugcaacgagaagcacgacgaggaguucugcgacaugcuccgccuguucgacuucaacaagcaggccauccagcggcugaaggcgccggcccagauguccauccagcucaucaacaaggccgucaacgcccugaucaacgaccagcuggugaugaagaaccaccuccgcgacaucaugggcauccccuacugcaacuacagccgguacugcuaccugaaccacacgaccaccggccgcaccucccugcccaagugcugccucgugagcaacggguccuaccugaacgagacgcacuucagcgacgacaucgagcagcaggccgacaacaugaucaccgagaugcugcagaaggaguacauggagcggcagggcaagaccccgcuggggcucgucgaccuguucguguucuccaccagcuucuaccugaucuccaucuuccuccaccuggugaagauccccacgcaccgccacaucgucggcaagagcugccccaagccccaccggcugaaccacauggggaucugcuccugcggccucuacaagcagccgggcgugcccgugaaguggaagcgcugaggacuaguuauaagacugacuagcccgaugggccucccaacgggcccuccuccccuccuugcaccgagauuaaucaaaggcucuuuucagagccaccaaaaaaaaaaaaaaaaaaaaaaaaaaaaaaaaaaaaaaaaaaaaaaaaaaaaaaaaaaaaaaaaagaauu

SEQ ID NO: 32799 - RNA, 1658 nt, Artificial Sequence
  mRNA product Design i-3 (hSL-A64-N5) comprising derived and/or modified sequence from LASV(G733-SLE-2010;Clade IV)__AIT17154__GPCmut7 (opt1)
aggagaaagcuuaccaugggccagaucgugaccuucuuccaggaggucccccacgugaucgaggaggugaugaacaucguccugaucgcccucagcauccuggccgugcugaaggggcucuacaacuucgcgaccugcggcaucguggggcuggucuccuuccugcuccugugcggccgcagcugcacgaccucccuguacaaggggguguacgagcuccagacccuggagcugaacauggagacccucaacaugacgaugccgcugagcugcaccaagaacaacucccaccacuacaucauggugggcaacgagaccggccuggagcucacccugacgaacaccagcaucaucaaccacaaguucugcaaccuguccgacgcccacaagaagaaccucuacgaccacgcccugaugagcaucaucuccaccuuccaccugagcauccccaacuucaaccaguacgaggccauguccugcgacuucaacgggggcaagaucagcguccaguacaaccucucccacagcuacgccggggacgcggccaaccacugcggcaccaucgccaacggggugcugcagacguucaugcggauggccuggggcggcuccuacaucgcgcuggacagcgggcgcgaccggugggacugcaucaugaccuccuaccaguaccucaucauccagaacaccaccugggaggaccacugccaguucagccgccccucccccaucggcuaccuggggcugcucagccagcggacgcgcgacaucuacaucagccggcgccugcugggcaccuucaccuggacccucuccgacagcgagggcaaggacacgcccgggggcuacugccugacccgguggaugcugaucgaggccgagcucaagugcuucgggaacaccgccguggccaagugcaacgagaagcacgacgaggaguucugcgacaugcugcgccuguucgacuucaacaagcaggccauccagcggcucaaggcgccggcccagauguccauccagcugaucaacaaggccgucaacgcccugaucaacgaccagcucaucaugaagaaccaccuccgcgacaucaugggcauccccuacugcaacuacagcaaguacugcuaccugaaccacaccacgaccgggaagaccucccugcccaagugcugccuggugagcaacggcuccuaccugaacgagacccacuucagcgacgacaucgagcagcaggccgacaacaugaucacggagaugcuccagaaggaguacauggagcggcagggcaagaccccgcuggggcugguggaccuguucgucuucuccaccagcuucuaccucaucuccaucuuccugcaccuggugaagauccccacccaccgccacguggucggcaagagcugccccaagccccaccggcucaaccacauggggaucugcuccugcggccuguacgggcagccgggcgugcccgugaaguggaagcgcugaggacuaguuauaagacugacuagcccgaugggccucccaacgggcccuccuccccuccuugcaccgagauuaaucaaaggcucuuuucagagccaccaaaaaaaaaaaaaaaaaaaaaaaaaaaaaaaaaaaaaaaaaaaaaaaaaaaaaaaaaaaaaaaaagaauu

SEQ ID NO: 32800 - RNA, 1658 nt, Artificial Sequence
  mRNA product Design i-3 (hSL-A64-N5) comprising derived and/or modified sequence from MOPV/LASV reassortant(IGS-1;Clade IV)__AFY05576__GPCmut7 (opt1)
aggagaaagcuuaccaugggccagaucgugaccuucuuccaggaggucccccacgugaucgaggaggugaugaacaucguccugaucgcccucagcgugcuggccgugcugaaggggcucuacaacuucgcgaccugcggccuggucgggcuggugacguuccuccugcugugcggccgcuccugcaccaccagccucuacaaggggguguacgagcugcagacccuggagcucaacauggagacgcugaacaugaccaugccgcuguccugcaccaagaacaacagccaccacuacaucauggucggcaacgagaccggccucgagcugacgcugaccaacaccuccaucaucaaccacaaguucugcaaccucagcgacgcccacaagaagaaccuguacgaccacgcccugauguccaucaucagcaccuuccaccucuccauccccaacuucaaccaguacgaggccaugagcugcgacuucaacgggggcaagaucuccgugcaguacaaccugagccacuccuacgccggggacgcggccaaccacugcggcacgguggccaacgggguccugcagaccuucaugcggauggccuggggcggcagcuacaucgcgcucgacuccgggcgcggcaacugggacugcaucaugaccagcuaccaguaccugaucauccagaacaccacgugggaggaccacugccaguucucccggcccagccccaucggguaccugggccuccugucccagcgcacccgggacaucuacaucagccgccggcugcucggcaccuucaccuggacgcugagcgacuccgagggggaggacaccccgggcggguacugccugacccgcuggaugcucaucgaggccgagcugaagugcuucggcaacaccgccguggccaagugcaacgagaagcacgacgaggaguucugcgacaugcugcggcuguucgacuucaacaagcaggccauccagcgccugaaggcgcccgcccagaugagcauccagcugaucaacaaggccgugaacgcccucaucaacgaccagcugaucaugaagaaccaccuccgggacaucauggggauccccuacugcaacuacuccaaguacugcuaccucaaccacacgaccaccggccgcaccagccugcccaagugcugccuggucuccaacggcagcuaccucaacgagacgcacuucuccgacgacaucgagcagcaggccgacaacaugaucaccgagaugcugcagaaggaguacauggagcggcaggggaagaccccgcugggccugguggaccucuucguguucagcaccuccuucuaccugaucagcaucuuccugcaccucgucaagauccccacgcaccgccacaucguggggaaguccugccccaagccccaccggcugaaccacaugggcaucugcagcugcgggcuguacaagcagccgggcgugcccgucaaguggaagcgcugaggacuaguuauaagacugacuagcccgaugggccucccaacgggcccuccuccccuccuugcaccgagauuaaucaaaggcucuuuucagagccaccaaaaaaaaaaaaaaaaaaaaaaaaaaaaaaaaaaaaaaaaaaaaaaaaaaaaaaaaaaaaaaaaagaauu

SEQ ID NO: 32801 - RNA, 1658 nt, Artificial Sequence
  mRNA product Design i-3 (hSL-A64-N5) comprising derived and/or modified sequence from LASV(LM765-SLE-2012;Clade IV)__AIT17814__GPCmut7 (opt1)
aggagaaagcuuaccaugggccagaucgugaccuucuuccaggaggucccccacgugaucgaggaggugaugaacaucguccugaucgcccucagcauccuggccgugcugaaggggcucuacaacuucgcgaccugcggccugguggggcuggucacguuccuccugcugugcggccgcuccugcaccaccagccucuacaaggggguguacgagcugcagacccuggagcucaacauggagacgcugaacaugaccaugccgcuguccugcaccaagaacaacagccaccacuacaucauggugggcaacgagaccggccucgagcugacgcugaccaacaccuccaucaucgaccacaaguucugcaaccucagcgacgcccaccggaagaaccuguacgaccacgcccugauguccaucaucagcaccuuccaccucuccauccccaacuucaaccaguacgaggccaugagcugcgacuucaacgggggcaagaucuccguccaguacaaccugagccacuccuacgccaaggacgcggccgaccacugcgggacgguggccaacggcgugcugcagaccuucaugcgcauggccuggggcgggagcuacaucgcgcucgacuccggccgggggcgcugggacugcaucaugaccagcuaccaguaccugaucauccagaacaccacgugggaggaccacugccaguucucccggcccagccccaucggcuaccuggggcuccugucccagcgcacccgggacaucuacaucagccgccggcugcucggcaccuucaccuggacgcugagcgacuccgagggcaaggacacccccgggggcuacugccugacccgcuggaugcucaucgaggccgagcugaagugcuucgggaacaccgccgucgccaagugcaacgagaagcacgacgaggaguucugcgacaugcugcggcuguucgacuucaacaagcaggccauccagcgccugaaggcgccggcccagaugagcauccagcugaucaacaaggccgugaacgcccucaucaacgaccagcugaucaugaagaaccaccuccgggacaucaugggcauccccuacugcaacuacuccaaguacugcuaccucaaccacacgaccaccgggaagaccagccugcccaagugcugccugguguccaacggcagcuaccucaacgagacgcacuucuccgacgacaucgagcagcaggccgacaacaugaucaccgagaugcugcagaaggaguacauggagcgccagggcaagaccccgcuggggcuggucgaccucuucguguucagcaccuccuucuaccugaucagcaucuuccugcaccucgugaagauccccacgcaccggcacaucgucggcaagcccugccccaagccgcaccgccugaaccacauggggaucugcuccugcggccuguacaagcagcccggggugcccgugaaguggaagcggugaggacuaguuauaagacugacuagcccgaugggccucccaacgggcccuccuccccuccuugcaccgagauuaaucaaaggcucuuuucagagccaccaaaaaaaaaaaaaaaaaaaaaaaaaaaaaaaaaaaaaaaaaaaaaaaaaaaaaaaaaaaaaaaaagaauu

SEQ ID NO: 32802 - RNA, 1658 nt, Artificial Sequence
  mRNA product Design i-3 (hSL-A64-N5) comprising derived and/or modified sequence from LASV(LM776-SLE-2012;Clade IV)__AIT17824__GPCmut7 (opt1)
aggagaaagcuuaccaugggccagaucgugaccuucuuccaggaggucccccacgugaucgaggaggugaugaacaucguccugaucgcccucagcauccuggccgugcugaaggggcucuacaacuucgcgaccugcggccugguggggcuggucacguuccuccugcugugcggccgcuccugcaccaccagcguguacaaggggguguacgagcuccagacccuggagcugaacauggagacgcucaacaugaccaugccgcuguccugcaccaagaacaacagccaccacuacaucauggucggcaacgagaccggccuggagcucacgcugaccaacaccuccaucaucaaccacaaguucugcaaccugagcgacgcccacaagaagaaccucuacgaccacgcccugauguccaucaucagcaccuuccaccuguccauccccaacuucaaccaguacgaggccaugagcugcgacuucaacgggggcaagaucuccgugcaguacaaccucagccacuccuacgccggggacgcggccaaccacugcggcacgguggccaacgggguccugcagaccuucaugcggauggccuggggcggcagcuacaucgcgcuggacuccgggcacggcaagugggacugcaucaugaccagcuaccaguaccucaucauccagaacaccacgugggaggaccacugccaguucucccgccccagccccaucggguaccugggccugcucucccagcggacccgcgacaucuacaucagccggcgccugcugggcaccuucaccuggacgcucagcgacuccgaggggaaggacaccccgggcggguacugccugacccgguggaugcugaucgaggccgagcucaagugcuucggcaacaccgccguggccaagugcaacgagaagcacgacgaggaguucugcgacaugcugcgccuguucgacuucaacaagcaggccauccagcggcucaaggcgcccgcccagaugagcauccagcugaucaacaaggccgugaacgcccugaucaacgaccagcucaucaugaagaaccaccuccgcgacaucauggggauccccuacugcaacuacuccaaguacugcuaccugaaccacacgaccaccggcaagaccagccugcccaagugcugccuggucuccaacggcagcuaccugaacgagacgcacuucuccgacgacaucgagcagcaggccgacaacaugaucaccgagaugcuccagaaggaguacauggagcggcaggggaagaccccgcugggccugguggaccuguucguguucagcaccuccuucuaccucaucagcaucuuccugcaccuggucaagauccccacgcaccgccacaucguggggaaguccugccccaagccccaccggcucaaccacaugggcaucugcagcugcgggcuguacaagcagccgggcgugcccguccgcuggaagcggugaggacuaguuauaagacugacuagcccgaugggccucccaacgggcccuccuccccuccuugcaccgagauuaaucaaaggcucuuuucagagccaccaaaaaaaaaaaaaaaaaaaaaaaaaaaaaaaaaaaaaaaaaaaaaaaaaaaaaaaaaaaaaaaaagaauu

SEQ ID NO: 32803 - RNA, 1658 nt, Artificial Sequence
  mRNA product Design i-3 (hSL-A64-N5) comprising derived and/or modified sequence from LASV(Mad39;Clade IV)__ANH09722__GPCmut7 (opt1)
aggagaaagcuuaccaugggccagaucgugaccuucuuccaggaggucccccacgugaucgaggaggugaugaacaucguccugaucgcccucagcauccuggccgugcugaaggggcucuacaacguggcgaccugcggccugaucgggcuggucacguuccuccugcugugcggccgcuccugcaccaccacccucuacaaggggguguacgagcugcaggcccuggagcucaacauggagacgcugaacaugaccaugccgcugagcugcaccaagaacaacucccaccacuacauccgggugggcaacgagaccggccucgagcugacgcugaccaacaccagccucaucaaccacaaguucugcaaccuguccgacgcccacaagaagaaccuguacgaccacgcccucaugagcaucaucuccaccuuccaccugagcauccccaacuucaaccaguacgaggccauguccugcgacuucaacgacgggaagaucagcguccaguacaaccugucccacacguacgcgggcgacaccgccaaccacugcgggaccguggccaacggcgugcuccagaccuucaugcgcauggccuggggcgggagcuacaucgcgcuggacuccggccgcgggggcugggacugcaucaugacgagcuaccaguaccugaucauccagaacaccaccugggaggaccacugccaguucucccggcccagccccaucggguaccucggccugcugucccagcggacccgcgacaucuacaucagccggcgccuccugggcacguucaccuggacccuguccgacagcgaggggaaggacaccccgggcggguacugccucacgcgguggaugcugaucgaggccgagcugaagugcuucggcaacaccgccgucgccaagugcaacgagaagcacgacgaggaguucugcgacaugcuccgccuguucgacuucaacaagcaggccauccagcggcugaaggcgcccgcccagaugagcauccagcucaucaacaaggccgugaacgcccugaucaacgaccagcugaucaugaagaaccaccuccgcgacaucauggggauccccuacugcaacuacuccaaguacugcuaccugaaccacaccgugaccggcaagacgagccugcccaagugcugccucgucuccaacggcagcuaccugaacgagacccacuucuccgacgacaucgagcagcaggccgacaacaugaucaccgagaugcugcagaaggaguacauggagcggcaggggaagaccccgcugggccucguggaccuguucguguucagcacguccuucuaccugaucagcaucuuccuccaccuggucaagauccccacccaccgccacgugguggggaagcccugccccaagccgcaccggcugaaccacaugggcaucugcuccugcggguucuacaagcagcccggcguccccgugcgcuggaagcggugaggacuaguuauaagacugacuagcccgaugggccucccaacgggcccuccuccccuccuugcaccgagauuaaucaaaggcucuuuucagagccaccaaaaaaaaaaaaaaaaaaaaaaaaaaaaaaaaaaaaaaaaaaaaaaaaaaaaaaaaaaaaaaaaagaauu

SEQ ID NO: 32804 - RNA, 1658 nt, Artificial Sequence
  mRNA product Design i-3 (hSL-A64-N5) comprising derived and/or modified sequence from LASV(Z0947-SLE-2011;Clade IV)__AIT17840__GPCmut7 (opt1)
aggagaaagcuuaccaugggccagaucgugaccuucuuccaggaggucccccacgugaucgaggaggugaugaacaucguccugaucgcccucagcauccuggccgugcugaaggggcucuacaacuucgcgaccugcggccugguggggcuggucacguuccuccugcugugcggccgcuccugcaccaucagccucuacaaggggguguacgagcugcagacccuggagcucaacauggagacccugaacaugacgaugccgcuguccugcaccaagaacaacagccaccacuacaucauggugggcaacgagaccggccucgagcugacccugacgaacaccuccaucaucaaccacaaguucugcaaccucagcgacgcccacaagaagaaccuguacgaccacgcccugauguccaucaucagcaccuuccaccucuccauccccaacuucaaccaguacgaggccaugagcugcgacuucaacgggggcaagaucuccguccaguacaaccugagccacuccuacgccggggacgcggccaaccacugcggcaccguggccaacggggugcugcagacguucaugcggauggccuggggcggcagcuacaucgcgcucgacuccgggcgcgaccggugggacugcaucaugaccagcuaccaguaccugaucauccagaacaccaccugggaggaccacugccaguucucccgccccagccccaucggcuaccuggggcuccugucccagcggacgcgcgacaucuacaucagccggcgccugcucggcaccuucaccuggacccugagcgacuccgagggcaaggacacgcccgggggcuacugccugacccgguggaugcucaucgaggccgagcugaagugcuucgggaacaccgccgucgccaagugcaacgagaagcacgacgaggaguucugcgacaugcugcgccucuucgacuucaacaagcaggccauccagcggcugaaggcgccggcccagaugagcauccagcugaucaacaaggccgugaacgcccucaucaacgaccagcugaucaugaagaaccaccuccgcgacaucaugggcauccccuacugcaacuacuccaaguacugcuaccugaaccacaccacgaccgggaagaccagccugcccaagugcugccugguguccaacggcagcuaccucaacgagacccacuucuccgacgacaucgagcagcaggccgacaacaugaucacggagaugcugcagaaggaguacauggagcggcagggcaagaccccgcuggggcuggucgaccucuucguguucagcaccuccuucuaccugaucagcaucuuccugcaccucgugaagauccccacccaccgccacaucgucggcaagcccugccccaagccgcaccggcugaaccacauggggaucugcuccugcggccuguacaagcagcccggggugcccgugaaguggaagcgcugaggacuaguuauaagacugacuagcccgaugggccucccaacgggcccuccuccccuccuugcaccgagauuaaucaaaggcucuuuucagagccaccaaaaaaaaaaaaaaaaaaaaaaaaaaaaaaaaaaaaaaaaaaaaaaaaaaaaaaaaaaaaaaaaagaauu

SEQ ID NO: 32805 - RNA, 1658 nt, Artificial Sequence
  mRNA product Design i-3 (hSL-A64-N5) comprising derived and/or modified sequence from LASV(Josiah;Clade IV)__NP_694870__GPCmut7 (opt4)
aggagaaagcuuaccaugggccagaucgugaccuucuuccaggaggugccccacgugaucgaggaggugaugaacaucgugcugaucgcccugagcgugcuggccgugcugaagggccuguacaacuucgccaccugcggccuggugggccuggugaccuuccugcugcugugcggcagaagcugcaccaccagccuguacaagggcguguacgagcugcagacccuggagcugaacauggagacccugaacaugaccaugccccugagcugcaccaagaacaacagccaccacuacaucauggugggcaacgagaccggccuggagcugacccugaccaacaccagcaucaucaaccacaaguucugcaaccugagcgacgcccacaagaagaaccuguacgaccacgcccugaugagcaucaucagcaccuuccaccugagcauccccaacuucaaccaguacgaggccaugagcugcgacuucaacggcggcaagaucagcgugcaguacaaccugagccacagcuacgccggcgacgccgccaaccacugcggcaccguggccaacggcgugcugcagaccuucaugagaauggccuggggcggcagcuacaucgcccuggacagcggcagaggcaacugggacugcaucaugaccagcuaccaguaccugaucauccagaacaccaccugggaggaccacugccaguucagcagacccagccccaucggcuaccugggccugcugagccagagaaccagagacaucuacaucagcagaagacugcugggcaccuucaccuggacccugagcgacagcgagggcaaggacacccccggcggcuacugccugaccagauggaugcugaucgaggccgagcugaagugcuucggcaacaccgccguggccaagugcaacgagaagcacgacgaggaguucugcgacaugcugagacuguucgacuucaacaagcaggccauccagagacugaaggcccccgcccagaugagcauccagcugaucaacaaggccgugaacgcccugaucaacgaccagcugaucaugaagaaccaccugagagacaucaugggcauccccuacugcaacuacagcaaguacugcuaccugaaccacaccaccaccggcagaaccagccugcccaagugcugccuggugagcaacggcagcuaccugaacgagacccacuucagcgacgacaucgagcagcaggccgacaacaugaucaccgagaugcugcagaaggaguacauggagagacagggcaagaccccccugggccugguggaccuguucguguucagcaccagcuucuaccugaucagcaucuuccugcaccuggugaagauccccacccacagacacaucgugggcaagagcugccccaagccccacagacugaaccacaugggcaucugcagcugcggccuguacaagcagcccggcgugcccgugaaguggaagagaugaggacuaguuauaagacugacuagcccgaugggccucccaacgggcccuccuccccuccuugcaccgagauuaaucaaaggcucuuuucagagccaccaaaaaaaaaaaaaaaaaaaaaaaaaaaaaaaaaaaaaaaaaaaaaaaaaaaaaaaaaaaaaaaaagaauu

SEQ ID NO: 32806 - RNA, 1655 nt, Artificial Sequence
  mRNA product Design i-3 (hSL-A64-N5) comprising derived and/or modified sequence from LASV(LP;Clade I)__AAF86701__GPCmut7 (opt4)
aggagaaagcuuaccaugggccagaucaucaccuucuuccaggaggugccccacgugaucgaggaggugaugaacaucgugcugaucgcccugagccugcuggccauccugaagggccuguacaacaucgccaccugcggcaucaucggccugguggccuuccuguuccugugcggcaagagcugcagccugacccugaagggcggcuacgagcugcagacccuggagcugaacauggagacccugaacaugaccaugccccugagcugcaccaagaacagcagccaccacuacaucagagugggcaacgagaccggccuggagcugacccugaccaacaccagcaucaucaaccacaaguucugcaaccugagcgacgcccacaagaagaaccuguacgaccacgcccugaugagcaucaucagcaccuuccaccugagcauccccaacuucaaccaguacgaggccaugagcugcgacuucaacggcggcaagaucagcgugcaguacaaccugagccacagcuacgccggcgacgccgccgagcacugcggcaccguggccaacggcgugcugcagaccuucaugagaauggccuggggcggcagauacaucgcccuggacagcggcaagggcaacugggacugcaucaugaccagcuaccaguaccugaucauccagaacaccaccugggaggaccacugccaguucagcagacccagccccaucggcuaccugggccugcugagccagagaaccagagacaucuacaucagcagaagacugcugggcaccuucaccuggacccugagcgacagcgagggcaacgagacccccggcggcuacugccugaccagauggaugcugaucgaggccgagcugaagugcuucggcaacaccgccguggccaagugcaacgagaagcacgacgaggaguucugcgacaugcugagacuguucgacuucaacaagcaggccaucagaagacugaaggcccccgcccagaugagcauccagcugaucaacaaggccgugaacgcccugaucaacgaccagcugaucaugaagaaccaccugagagacaucaugggcauccccuacugcaacuacagcaaguacugcuaccugaaccacaccagcagcggcagaaccagccugcccaagugcugccugaucagcaacggcagcuaccugaacgagacccaguucagcgacgacaucgagcagcaggccgacaacaugaucaccgagaugcugcagaaggaguacaucgagagacagggcaagaccccccugggccugguggacaucuucaucuucagcaccagcuucuaccugaucagcaucuuccugcaccugaucaagauccccacccacagacacaucgugggcaagcccugccccaagccccacagacugaaccacaugggcgugugcagcugcggccuguacaagcaccccggcgugcccaccaaguggaagagaugaggacuaguuauaagacugacuagcccgaugggccucccaacgggcccuccuccccuccuugcaccgagauuaaucaaaggcucuuuucagagccaccaaaaaaaaaaaaaaaaaaaaaaaaaaaaaaaaaaaaaaaaaaaaaaaaaaaaaaaaaaaaaaaaagaauu

SEQ ID NO: 32807 - RNA, 1655 nt, Artificial Sequence
  mRNA product Design i-3 (hSL-A64-N5) comprising derived and/or modified sequence from LASV(803213;Clade II)__AAF86703__GPCmut7 (opt4)
aggagaaagcuuaccaugggccagaucaucaccuucuuccaggaggugccccacgugaucgaggaggugaugaacaucgugcugaucgcccugagccugcuggccauccugaagggcaucuacaacguggccaccugcggccuguucggccugaucagcuuccugcugcugugcggcagaagcugcagcgugaccuacaagggcguguacgagcugcagacccuggagcugaacauggccaaccugaacaugaccaugccccugagcugcaccaagaacaacagccaccacuacaucauggugggcaacgagaccggccuggagcugacccugaccaacaccagcaucaucaaccacaaguucugcaaccugagcgacgcccacaagaagaaccuguacgaccacgcccugaugagcaucaucagcaccuuccaccugagcauccccaacuucaaccaguacgaggccaugagcugcgacuucaacggcggcaagaucagcgugcaguacaaccugagccacagcuucgccguggacgccgccaaccacugcggcaccaucgccaacggcgugcugcagaccuucaugagaauggccuggggcggcagcuacaucgcccuggacagcggcaagggcaacugggacugcaucaugaccagcuaccaguaccugaucauccagaacaccaccugggaggaccacugccaguucagcagacccagccccaucggcuaccugggccugcugagccagagaaccagagacaucuacaucagcagaagacugcugggcaccuucaccuggacccugagcgacagcgagggcaacgaggcccccggcggcuacugccugaccagauggaugcugaucgaggccgagcugaagugcuucggcaacaccgccguggccaagugcaacgagaagcacgacgaggaguucugcgacaugcugagacuguucgacuucaacaagcaggccaucaagagacugaagacccccgcccagaugagcauccagcugaucaacaaggccgugaacgcccugaucaacgaccagcugaucaugaagaaccaccugagagacaucaugggcauccccuacugcaacuacagcagauacugcuaccugaaccacaccgugaccggcaagaccagccugcccagaugcugccuggugagcaacggcagcuaccugaacgagacccacuucagcgacgacaucgagcagcaggccgacaacaugaucaccgagaugcugcagaaggaguacauggacagacagggcaagaccccccugggccugguggaccuguucguguucagcaccagcuucuaccugaucagcaucuuccugcaccuggugaagauccccacccacagacacaucgugggcaagcccugccccaagccccacagacugaaccacaugggcaucugcagcugcggccuguacaagcaccccggcgugcccgugaaguggaagagaugaggacuaguuauaagacugacuagcccgaugggccucccaacgggcccuccuccccuccuugcaccgagauuaaucaaaggcucuuuucagagccaccaaaaaaaaaaaaaaaaaaaaaaaaaaaaaaaaaaaaaaaaaaaaaaaaaaaaaaaaaaaaaaaaagaauu

SEQ ID NO: 32808 - RNA, 1655 nt, Artificial Sequence
  mRNA product Design i-3 (hSL-A64-N5) comprising derived and/or modified sequence from LASV(GA391;Clade III)__CAA36645__GPCmut7 (opt4)
aggagaaagcuuaccaugggccagaucgugaccuucuuccaggaggugccccacgugaucgaggaggugaugaacaucgugcugaucgcccugagcauccuggccauccugaagggccuguacaacguggccaccugcggccugaucggccuggugaccuuccugcugcugagcggcagaagcugcagccugaucuacaagggcaccuacgagcugcagacccuggagcugaacauggagacccugaacaugaccaugccccugagcugcaccaagaacaacagccaccacuacaucagagugggcaacgagaccggccuggagcugacccugaccaacaccagcauccugaaccacaaguucugcaaccugagcgacgcccacaagagaaaccuguacgaccacagccugaugagcaucaucagcaccuuccaccugagcauccccaacuucaaccaguacgaggccaugagcugcgacuucaacggcggcaagaucaccgugcaguacaaccugagccacagcuucgccguggacgccgccggccacugcggcacccuggccaacggcgugcugcagaccuucaugagaauggccuggggcggcagcuacaucgcccuggacagcggcagaggcaacugggacugcaucaugaccagcuaccaguaccugaucauccagaacaccaccugggacgaccacugccaguucagcagacccagccccaucggcuaccugggccugcugagccagagaaccagagacaucuacaucagcagaagacugcugggcaccuucaccuggacccugagcgacagcgagggcaacgagacccccggcggcuacugccugaccagauggaugcugaucgaggccgagcugaagugcuucggcaacaccgccguggccaagugcaacgagaagcacgacgaggaguucugcgacaugcugagacuguucgacuucaacaagcaggccaucagaagacugaagacccccgcccagaugagcauccagcugaucaacaaggccgugaacgcccugaucaacgaccagcugaucaugaagaaccaccugagagacaucaugggcauccccuacugcaacuacagcagauacugcuaccugaaccacaccagcaccggcaagaccagccugcccagaugcugccugaucagcaacggcagcuaccugaacgagaccaaguucagcgacgacaucgagcagcaggccgacaacaugaucaccgagaugcugcagaaggaguacaucgacagacagggcaagaccccccugggccugguggaccuguucguguucagcaccagcuucuaccugaucagcaucuuccugcaccuggugaagauccccacccacagacacaucgugggcaagcccugccccaagccccacagacugaaccacaugggcaucugcagcugcggccuguacaagcagcccggcgugcccgugagauggaagagaugaggacuaguuauaagacugacuagcccgaugggccucccaacgggcccuccuccccuccuugcaccgagauuaaucaaaggcucuuuucagagccaccaaaaaaaaaaaaaaaaaaaaaaaaaaaaaaaaaaaaaaaaaaaaaaaaaaaaaaaaaaaaaaaaagaauu

SEQ ID NO: 32809 - RNA, 1658 nt, Artificial Sequence
  mRNA product Design i-3 (hSL-A64-N5) comprising derived and/or modified sequence from LASV(AV;Clade V)__CCA30314__GPCmut7 (opt4)
aggagaaagcuuaccaugggccagaucgugaccuucuuccaggaggugccccacgugaucgaggaggugaugaacaucgugcugaucgcccugagcauccuggccgugcugaagggccuguacaacaucgccaccugcggccugaucggccugaucaccuuccugcugcugugcggcagaagcugcagcagcaaccuguacaagggcguguacgagcugcagagccuggaccugaacauggagacccugaacaugaccaugccccugagcugcaccaagaacaacagccaccacuacaucagagugggcaacgacaccggccuggagcugacccugaccaacaccagcauccugaaccacaaguucugcaaccugagcgacgcccacaagaaggaccuguacgaccacgcccugaugagcaucaucagcaccuuccaccugagcauccccaacuucaaccaguacgaggccaugagcugcgacuucaacggcggcaagaucagcgugcaguacaaccugagccacagcuacgccaucgacgccgccaaccacugcggcaccguggccaacggcauccugcagaccuucaugagaauggccuggggcggcagcuacaucgcccuggacagcggcagaggcaacugggacugcaucaugaccagcuaccaguaccugaucauccagaacaccaccugggagaaccacugccaguucagcagacccagccccaucggcuaccugggccugcugagccagagaaccagagacaucuacaucagcagaagacugcugggcaccuucaccuggacccugagcgacagcgagggcaacgccacccccggcggcuacugccugaccagauggaugcugaucgaggccgagcugaagugcuucggcaacaccgccguggccaagugcaacgagaagcacgacgaggaguucugcgacaugcugagacuguucgacuucaacaagcaggccaucagcagacugaagagccccgcccagaugagcauccagcugaucaacaaggccgugaacgcccugaucaacgaccagcugaucaugaagaaccaccugagagacaucaugggcauccccuacugcaacuacagcaaguacugcuaccugaaccacaccaucaccggcaagaccagccugcccaagugcugccuggugagcaacggcagcuaccugaacgagacccacuucagcgacgacaucgagcagcaggccgacaacaugaucaccgagaugcugcagaaggaguacauggagagacagggcaagaccccccugggccugguggaccuguucguguucagcaccagcuucuaccugaucagcaucuuccugagacuggugaagauccccacccacagacacaucgugggcaagcccugccccaagccccacagacugaaccacaugggcaucugcagcugcggccuguacaagcagcccggcgugcccgugagauggaagagaugaggacuaguuauaagacugacuagcccgaugggccucccaacgggcccuccuccccuccuugcaccgagauuaaucaaaggcucuuuucagagccaccaaaaaaaaaaaaaaaaaaaaaaaaaaaaaaaaaaaaaaaaaaaaaaaaaaaaaaaaaaaaaaaaagaauu

SEQ ID NO: 32810 - RNA, 1655 nt, Artificial Sequence
  mRNA product Design i-3 (hSL-A64-N5) comprising derived and/or modified sequence from LASV(Togo/2016/7082;Clade VI)__AMR44577__GPCmut7 (opt4)
aggagaaagcuuaccaugggccagaucaucaccuucuuccaggaggugccccacgugaucgaggaggugaugaacaucgugcugaucgcccugagccugcuggccauccugaagggcguguacaacguggccaccugcggcaucaucggccuggugaccuuccuguuccugugcggcagaagcugcagccugaucuacaagggcagcuacgagcugcagacccuggagcugaacauggagacccugaacaugaccaugccccugagcugcaccaagaacagcagccaccacuacaucagagugggcaacgagaccggccuggagcugacccugaccaacaccagcaucaucaaccacaaguucugcaaccugagcgacgcccacaagagaaaccuguacgaccacgcccugaugagcauccugagcaccuuccaccugagcauccccaacuucaaccaguacgaggccaugagcugcgacuucaacggcggcaagaucagcgugcaguacaaccugagccacgccuacgccguggacgccgccgagcacugcggcaccguggccaacggcgugcugcagaccuucaugagaauggccuggggcggcagcuacaucgcccuggacagcggcagaggcaacugggacugcaucaugaccagcuaccaguaccugaucauccagaacaccaccugggaggaccacugccaguucagcagacccagccccaucggcuaccugggccugcugagccagagaaccagagacaucuacaucagcagaagacugcugggcaccuucaccuggacccugagcgacagcgagggcaacgagacccccggcggcuacugccugaccagauggaugcugaucgaggccgagcugaagugcuucggcaacaccgccguggccaagugcaacgagaagcacgacgaggaguucugcgacaugcugagacuguucgacuucaacaagcaggccauccagagacugaagagccccgcccagaugagcauccagcugaucaacaaggccgugaacgcccugaucaacgaccagcugaucaugaagaaccaccugagagacaugaugggcauccccuacugcaacuacagcaaguacugcuaccugaaccacaccagcagcggcagaaccagccugcccaagugcugccuggugagcaacggcagcuaccugaacgagacccacuucagcgacgacaucgagcagcaggccgacaacaugaucaccgagaugcugcagaaggaguacaucgacagacagggcaagaccccccugggccugguggaccuguucguguucagcaccagcuucuaccugaucagcaucuuccugcaccugaucaagauccccacccacagacacaucgugggcaagcccugccccaagccccacagacugaaccacaugggcaucugcagcugcggccuguacaagcagcccggcgugcccaccagauggaagagaugaggacuaguuauaagacugacuagcccgaugggccucccaacgggcccuccuccccuccuugcaccgagauuaaucaaaggcucuuuucagagccaccaaaaaaaaaaaaaaaaaaaaaaaaaaaaaaaaaaaaaaaaaaaaaaaaaaaaaaaaaaaaaaaaagaauu

SEQ ID NO: 32811 - RNA, 1655 nt, Artificial Sequence
  mRNA product Design i-3 (hSL-A64-N5) comprising derived and/or modified sequence from LASV(KAK-428;Clade n.d. (VII))__ANH09740__GPCmut7 (opt4)
aggagaaagcuuaccaugggccagaucgugaccuucuuccaggaggugccccacgugaucgaggaggugaugaacaucgugcugaucgcccugagccugcuggccauccugaagggccuguacaacuucgccaccugcggcgugaucggccugaucaccuuccugcugcugugcggcagaagcugcagcgccaccuacaagggccaguacgagcugcagacccuggagcugaacauggagagccugaacaugaccaugccccugagcugcaccaagaacaacagccaccacuacaucagagccggcaacaacaccggccuggagcugacccugaccaacaccagcaucaucagccacaaguucugcaaccugagcgacgcccacaagaagaaccuguacgaccacacccugaugagcaucaucaccaccuuccaccugagcauccccaacuucaaccaguacgaggccaugagcugcgacuucaacggcggcaagaucagcauccaguacaaccugagccacagcuacgccggcgacgccgcccagcacugcggcaccguggccaacggcgugcugcagaccuucaugagaauggccuggggcggcagcuaccuggcccuggacagcggcagaagaggcugggacugcaucaucagcagcuaccaguaccugaucauccagaacaccaccugggacgaccacugccaguucagcagacccagccccaucggcuaccugggcuucgugagccagaagaccagagacaucuacaucagcagaagacugcugggcaccuucaccuggacccugagcgacagcgagggccacgacaugcccggcggcuacugccugaccagauggaugcugaucgaggccgaccugaagugcuucggcaacaccgccguggccaagugcaacgagaagcacgacgaggaguucugcgacauguggagacuguucgacuucaacaagcaggccauccagagacugaaggcccccgcccagaugaacauccagcugaucaacaaggccgugaacgcccugaucaacgaccagcugaugaugaagaaccaccugagagacaucaugggcauccccuacugcaacuacagcaaguucugcuaccugaacaacaccaccaccggcagaaccagccugcccagaugcugccugaucagcaacggcagcuaccugaacgagacccacuucagcgacgacaucgagcagcaggccgacaacaugaucaccgagaugcugcagaaggaguacauggacagacagggcaagaccccccugggccugguggaccuguucguguucagcaccagcuucuaccugaucaccaucuuccugcaccuggugaagauccccacccacagacacaucgugggcaagcccugccccaagccccacagacugaaccacaugggcaucugcagcugcggccuguacaagcagcccggcgugcccgugagauggaagagaugaggacuaguuauaagacugacuagcccgaugggccucccaacgggcccuccuccccuccuugcaccgagauuaaucaaaggcucuuuucagagccaccaaaaaaaaaaaaaaaaaaaaaaaaaaaaaaaaaaaaaaaaaaaaaaaaaaaaaaaaaaaaaaaaagaauu

SEQ ID NO: 32812 - RNA, 1655 nt, Artificial Sequence; identical to SEQ ID NO: 32806
  mRNA product Design i-3 (hSL-A64-N5) comprising derived and/or modified sequence from LASV(Pinneo-NIG-1969;Clade I)__AIT17836__GPCmut7 (opt4)

SEQ ID NO: 32813 - RNA, 1655 nt, Artificial Sequence
  mRNA product Design i-3 (hSL-A64-N5) comprising derived and/or modified sequence from LASV(ISTH0009-NIG-2011;Clade II)__AIT17404__GPCmut7 (opt4)
aggagaaagcuuaccaugggccagaucaucaccuucuuccaggaggugccccacgugaucgaggaggugaugaacaucgugcugaucgcccugagccugcuggccauccugaagggcaucuacaacguggccaccugcggccuguucggccuggugagcuuccugcugcugugcggcagaagcugcagcaccaccuacaagggcguguacgagcugcagacccuggagcuggacauggccagccugaacaugaccaugccccugagcugcaccaagaacaacagccaccacuacaucauggugggcaacgagaccggccuggagcugacccugaccaacaccagcaucaucaaccacaaguucugcaaccugagcgacgcccacaagaagaaccuguacgaccacgcccugaugagcaucaucagcaccuuccaccugagcauccccaacuucaaccaguacgaggccaugagcugcgacuucaacggcggcaagaucagcgugcaguacaaccugagccacgccuacgccguggacgccgccaaccacugcggcaccaucgccaacggcgugcugcagaccuucaugagaauggccuggggcggcagcuacaucgcccuggacagcggcaagggcagcugggacugcaucaugaccagcuaccaguaccugaucauccagaacaccaccugggaggaccacugccaguucagcagacccagccccaucggcuaccugggccugcugagccagagaaccagagacaucuacaucagcagaagacugcugggcaccuucaccuggacccugagcgacagcgagggcaacgagacccccggcggcuacugccugaccagauggaugcugaucgaggccgagcugaagugcuucggcaacaccgccguggccaagugcaacgagaagcacgacgaggaguucugcgacaugcugagacuguucgacuucaacaagcaggccaucagaagacugaagacccccgcccagaugagcauccagcugaucaacaaggccgugaacgcccugaucaacgaccagcugaucaugaagaaccaccugagagacaucaugggcauccccuacugcaacuacagcaaguacugcuaccugaaccacaccgugaccggcaagaccagccugcccagaugcugccuggugagcaacggcagcuaccugaacgagacccacuucagcgacgacaucgagcagcaggccgacaacaugaucaccgagcugcugcagaaggaguacauggacagacagggcaagaccccccugggccugguggaccuguucguguucagcaccagcuucuaccugaucagcaucuuccugcaccugaucaagauccccacccacagacacaucaccggcaagcccugccccaagccccacagacugaaccacaugggcaucugcagcugcggccuguacaagcaccccggcgugcccgugaaguggaagagaugaggacuaguuauaagacugacuagcccgaugggccucccaacgggcccuccuccccuccuugcaccgagauuaaucaaaggcucuuuucagagccaccaaaaaaaaaaaaaaaaaaaaaaaaaaaaaaaaaaaaaaaaaaaaaaaaaaaaaaaaaaaaaaaaagaauu

SEQ ID NO: 32814 - RNA, 1655 nt, Artificial Sequence
  mRNA product Design i-3 (hSL-A64-N5) comprising derived and/or modified sequence from LASV(ISTH2010-NIG-2012;Clade II)__AIT17482__GPCmut7 (opt4)
aggagaaagcuuaccaugggccagaucaucaccuucuuccaggaggugccccacgugaucgaggaggugaugaacaucgugcugaucgcccugagccugcuggccauccugaagggcaucuacaacguggccaccugcggccuguucggccuggugagcuuccugcugcugugcggcagaagcugcagcaccaccuacaagggcguguacgagcugcagacccuggagcuggacauggccagccugaacaugaccaugccccugagcugcaccaagaacaacagccaccacuacaucauggugggcaacgagaccggccuggagcugacccugaccaacaccagcaucaucaaccacaaguucugcaaccugagcgacgcccacaagaagaaccuguacgaccacgcccugaugagcaucaucagcaccuuccaccugagcauccccaacuucaaccaguacgaggccaugagcugcgacuucaacggcggcaagaucagcgugcaguacaaccugagccacgccuacgccguggacgccgccaaccacugcggcaccaucgccaacggcgugcugcagaccuucaugagaauggccuggggcggcagcuacaucgcccuggacagcggcaagggcagcugggacugcaucaugaccagcuaccaguaccugaucauccagaacaucaccugggaggaccacugccaguucagcagacccagccccaucggcuaccugggccugcugagccagagaaccagagacaucuacaucagcagaagacugcugggcaccuucaccuggacccugagcgacagcgagggcaacgagacccccggcggcuacugccugaccagauggaugcugaucgaggccgagcugaagugcuucggcaacaccgccguggccaagugcaacgagaagcacgacgaggaguucugcgacaugcugagacuguucgacuucaacaagcaggccaucagaagacugaagacccccgcccagaugagcauccagcugaucaacaaggccgugaacgcccugaucaacgaccagcugaucaugaagaaccaccugagagacaucaugggcauccccuacugcaacuacagcaaguacugcuaccugaaccacaccgugaccggcaagaccagccugcccagaugcugccuggugagcaacggcagcuaccugaacgagacccacuucagcgacgacaucgagcagcaggccgacaacaugaucaccgagcugcugcagaaggaguacaucgacagacagggcaagaccccccugggccugguggaccuguucguguucagcaccagcuucuaccugaucagcaucuuccugcaccuggugaagauccccacccacagacacguggugggcaagcccugccccaagccccacagacugaaccacaugggcaucugcagcugcggccuguacaagcaccccggcgugcccgugaaguggaagagaugaggacuaguuauaagacugacuagcccgaugggccucccaacgggcccuccuccccuccuugcaccgagauuaaucaaaggcucuuuucagagccaccaaaaaaaaaaaaaaaaaaaaaaaaaaaaaaaaaaaaaaaaaaaaaaaaaaaaaaaaaaaaaaaaagaauu

SEQ ID NO: 32815 - RNA, 1655 nt, Artificial Sequence
  mRNA product Design i-3 (hSL-A64-N5) comprising derived and/or modified sequence from LASV(Lassa virus/H.sapiens-wt/NGA/2015/ISTH_0543;Clade II)__AVO03639__GPCmut7 (opt4)
aggagaaagcuuaccaugggccagaucaucaccuucuuccaggaggugccccacgugaucgaggaggugaugaacaucgugcugaucgcccugagccugcuggccauccugaagggcaucuacaacguggccaccugcggccuguucggccuggugagcuuccugcugcugugcggcagaagcugcagcaccaccuacaagggcguguacgagcugcagacccuggagcuggacauggccaaccugaacaugaccaugccccugagcugcaccaagaacaacagccaccacuacaucauggugggcaacgagaccggccuggagcugacccugaccaacaccagcaucaucaaccacaaguucugcaaccugagcgacgcccacaagaagaaccuguacgaccacgcccugaugagcaucaucagcaccuuccaccugagcauccccaacuucaaccaguacgaggccaugagcugcgacuucaacggcggcaagaucagcgugcaguacaaccugagccacaccuacgccguggacgccgccaaccacugcggcaccaucgccaacggcgugcugcagaccuucaugagaauggccuggggcggcagcuacaucgcccuggacagcggcaagggcagcugggacugcaucaugaccagcuaccaguaccuggugauccagaacaccaccugggaggaccacugccaguucagcagacccagccccaucggcuaccugggccugcugagccagagaaccagagacaucuacaucagcagaagacugcugggcaccuucaccuggacccugagcgacagcgagggcaacgagacccccggcggcuacugccugaccagauggaugcugaucgaggccgagcugaagugcuucggcaacaccgccguggccaagugcaacgagaagcacgacgaggaguucugcgacaugcugagacuguucgacuucaacaagcaggccaucagaagacugaagacccccgcccagaugagcauccagcugaucaacaaggccgugaacgcccugaucaacgaccagcugaucaugaagaaccaccugagagacaucaugggcauccccuacugcaacuacagcaaguacugcuaccugaaccacaccgugaccggcaagaccagccugcccagaugcugccuggugagcaacggcagcuaccugaacgagacccacuucagcgacgacaucgagcagcaggccgacaacaugaucaccgagcugcugcagaaggaguacaucgacagacagggcaagaccccccugggccugguggaccuguucguguucagcaccagcuucuaccugaucagcaucuuccugcaccuggugaagauccccacccacagacacaucaccggcaagcccugccccaagccccacagacugaaccacaugggcaucugcagcugcggccuguacaagcaccccggcgugcccgugaaguggaagagaugaggacuaguuauaagacugacuagcccgaugggccucccaacgggcccuccuccccuccuugcaccgagauuaaucaaaggcucuuuucagagccaccaaaaaaaaaaaaaaaaaaaaaaaaaaaaaaaaaaaaaaaaaaaaaaaaaaaaaaaaaaaaaaaaagaauu

SEQ ID NO: 32816 - RNA, 1655 nt, Artificial Sequence
  mRNA product Design i-3 (hSL-A64-N5) comprising derived and/or modified sequence from LASV(Lassa virus/H.sapiens-wt/NGA/2016/ISTH_0009;Clade II)__AVO03571__GPCmut7 (opt4)
aggagaaagcuuaccaugggccagaucaucaccuucuuccaggaggugccccacgugaucgaggaggugaugaacaucgugcugaucgcccugagccugcuggccauccugaagggcaucuacaacguggccaccugcggccugcugggccuggugagcuuccugcugcugugcggcagaagcugcagcaccaccuacaagggcguguacgagcugcagacccuggagcuggacauggccagccugaacaugaccaugccccugagcugcaccaagaacaacagccaccacuacaucauggugggcaacgagaccggccuggagcugacccugaccaacaccagcaucaucaaccacaaguucugcaaccugagcgacgcccacaagaagaaccuguacgaccacgcccugaugagcaucaucagcaccuuccaccugagcauccccaacuucaaccaguacgaggccaugagcugcgacuucaacggcggcagaaucagcgugcaguacaaccugagccacagcuacgccguggacgccgccaaccacugcggcaccaucgccaacggcgugcugcagaccuucaugagaauggccuggggcggcagcuacaucgcccuggacagcggcaagggcagcugggacugcaucaugaccagcuaccaguaccugaucauccagaacaccaccugggaggaccacugccaguucagcagacccagccccaucggcuaccugggccugcugagccagagaaccagagacaucuacaucagcagaagacugcugggcaccuucaccuggacccugagcgacagcgagggcaacgagacccccggcggcuacugccugaccagauggaugcugaucgaggccgagcugaagugcuucggcaacaccgccguggccaagugcaacgagaagcacgacgaggaguucugcgacaugcugagacuguucgacuucaacaagcaggccaucagaagacugaagacccccgcccagaugagcauccagcugaucaacaaggccgugaacgcccugaucaacgaccagcugaucaugaagaaccaccugagagacaucaugggcauccccuacugcaacuacagcaaguacugcuaccugaaccacaccgugaccggcaagaccagccugcccagaugcugccuggugagcaacggcagcuaccugaacgagacccacuucagcgacgacaucgagcagcaggccgacaacaugaucaccgagcugcugcagaaggaguacaucgacagacagggcaagaccccccugggccugguggaccuguucguguucagcaccagcuucuaccugaucagcaucuuccugcaccuggugaagauccccacccacagacacaucaccggcaagcccugccccaagccccacagacugaaccacaugggcaucugcagcugcggccuguacaaccaccccggcgugcccgugaaguggaagagaugaggacuaguuauaagacugacuagcccgaugggccucccaacgggcccuccuccccuccuugcaccgagauuaaucaaaggcucuuuucagagccaccaaaaaaaaaaaaaaaaaaaaaaaaaaaaaaaaaaaaaaaaaaaaaaaaaaaaaaaaaaaaaaaaagaauu

SEQ ID NO: 32817 - RNA, 1655 nt, Artificial Sequence
  mRNA product Design i-3 (hSL-A64-N5) comprising derived and/or modified sequence from LASV(Lassa virus/H.sapiens-wt/NGA/2016/ISTH_0017;Clade II)__AVO03567__GPCmut7 (opt4)
aggagaaagcuuaccaugggccagaucaucaccuucuuccaggaggugccccacgugaucgaggaggugaugaacaucgugcugaucgcccugagccugcuggccauccugaagggcaucuacaacguggccaccugcggccuguucggccuggugagcuuccugcugcugugcggcagaagcugcagcaccaccuacaagggcguguacgagcugcagacccuggagcuggacauggccagccugaacaugaccaugccccugagcugcaccaagaacaacagccaccacuacaucauggugggcaacgagaccggccuggagcugacccugaccaacaccagcaucaucaaccacaaguucugcaaccugagcgacgcccacaagaagaaccuguacgaccacgcccugaugagcaucaucagcaccuuccaccugagcauccccaacuucaaccaguacgaggccaugagcugcgacuucaacggcggcaagaucagcgugcaguacaaccugagccacaccuacgccaucgacgccgccaaccacugcggcaccaucgccaacggcgugcugcagaccuucaugagaauggccuggggcggcagcuacaucgcccuggacagcggcaagggcagcugggacugcaucaugaccagcuaccaguaccugaucauccagaacaccaccugggaggaccacugccaguucagcagacccagccccaucggcuaccugggccugcugagccagagaaccagagacaucuacaucagcagaagacugcugggcaccuucaccuggacccugagcgacagcgagggcaacgagacccccggcggcuacugccugaccagauggaugcugaucgaggccgagcugaagugcuucggcaacaccgccguggccaagugcaacgagaagcacgacgaggaguucugcgacaugcugagacuguucgacuucaacaagcaggccaucagaagacugaagacccccgcccagaugagcauccagcugaucaacaaggccgugaacgcccugaucaacgaccagcugaucaugaagaaccaccugagagacaucaugggcauccccuacugcaacuacagcaaguacugcuaccugaaccacaccgugaccggcaagaccagccugcccagaugcugccuggugagcaacggcagcuaccugaacgagacccacuucagcgacgacaucgagcagcaggccgacaacaugaucaccgagcugcugcagaaggaguacauggacagacagggcaagaccccccugggccugguggaccuguucguguucagcaccagcuucuaccugaucagcaucuuccugcaccuggugagaauccccacccacagacacgugaucggcaagcccugccccaagccccacagacugaaccacaugggcaucugcagcugcggccuguacaagcaccccggcgugcccgugaaguggaagagaugaggacuaguuauaagacugacuagcccgaugggccucccaacgggcccuccuccccuccuugcaccgagauuaaucaaaggcucuuuucagagccaccaaaaaaaaaaaaaaaaaaaaaaaaaaaaaaaaaaaaaaaaaaaaaaaaaaaaaaaaaaaaaaaaagaauu

SEQ ID NO: 32818 - RNA, 1655 nt, Artificial Sequence
  mRNA product Design i-3 (hSL-A64-N5) comprising derived and/or modified sequence from LASV(Lassa virus/H.sapiens-wt/NGA/2018/ISTH_0959;Clade II)__AVV65099__GPCmut7 (opt4)
aggagaaagcuuaccaugggccagaucaucaccuucuuccaggaggugccccacgugaucgaggaggugaugaacaucgugcugaucgcccugagccugcuggccauccugaagggcaucuacaacguggugaccugcggccuguucggccuggugagcuuccugcugcugugcggcagaagcugcagcaccaccuacaagggcguguacgagcugcagacccuggagcuggacauggccagccugaacaugaccaugccccugagcugcaccaagaacaacagccaccacuacaucauggugggcaacgagaccggccuggagcugacccugaccaacaccagcaucaucaaccacaaguucugcaaccugagcgacgcccacaagaagaaccuguacgaccacgcccugaugagcaucaucagcaccuuccaccugagcauccccaacuucaaccaguacgaggccaugagcugcgacuucaacggcggcaagaucagcgugcaguacaaccugagccacgccuacgccaucgacgccgccaaccacugcggcaccaucgccaacggcgugcugcagaccuucaugagaauggccuggggcggcagcuacaucgcccuggacagcggcaagggcagcugggacugcaucaugaccagcuaccaguaccugaucauccagaacaccaccugggaggaccacugccaguucagcagacccagccccaucggcuaccugggccugcugagccagagaaccagagacaucuacaucagcagaagacugcugggcaccuucaccuggacccugagcgacagcgagggcaacgagacccccggcggcuacugccugaccagauggaugcugaucgaggccgagcugaagugcuucggcaacaccgccguggccaagugcaacgagaagcacgacgaggaguucugcgacaugcugagacuguucgacuucaacaagcaggccaucagaagacugaagacccccgcccagaugagcauccagcugaucaacaaggccgugaacgcccugaucaacgaccagcugaucaugaagaaccaccugagagacaucaugggcauccccuacugcaacuacagcaaguacugcuaccugaaccacaccgugaccggcaagaccagccugcccagaugcugccuggugagcaacggcagcuaccugaacgagacccacuucagcgacgacaucgagcagcaggccgacaacaugaucaccgagcugcugcagaaggaguacaucgacagacagggcaagaccccccugggccugguggaccuguucguguucagcaccagcuucuaccugaucagcaucuuccugcaccuggugaagauccccacccacagacacgugaucggcaagcccugccccaagccccacagacugaaccacaugggcaucugcagcugcggccuguacaagcaccccggcgugcccgugaaguggaagagaugaggacuaguuauaagacugacuagcccgaugggccucccaacgggcccuccuccccuccuugcaccgagauuaaucaaaggcucuuuucagagccaccaaaaaaaaaaaaaaaaaaaaaaaaaaaaaaaaaaaaaaaaaaaaaaaaaaaaaaaaaaaaaaaaagaauu

SEQ ID NO: 32819 - RNA, 1655 nt, Artificial Sequence
  mRNA product Design i-3 (hSL-A64-N5) comprising derived and/or modified sequence from LASV(LASV003-NIG-2008;Clade II)__AIT17580__GPCmut7 (opt4)
aggagaaagcuuaccaugggccagaucaucaccuucuuccaggaggugccccacgugaucgaggaggugaugaacaucgugcugaucgcccugagccugcuggccauccugaagggcaucuacaacguggccaccugcggccuguucggccuggugagcuuccugcugcugugcggcagaagcugcagcaccaccuacaagggcguguacgagcugcagacccuggagcuggacauggccagccugaacaugaccaugccccugagcugcaccaagaacaacagccaccacuacaucauggugggcaacgagaccggccuggagcugacccugaccaacaccagcaucaucaaccacaaguucugcaaccugagcgacgcccacaagaagaaccuguacgaccacgcccugaugagcaucaucagcaccuuccaccugagcauccccaacuucaaccaguacgaggccaugagcugcgacuucaacggcggcaagaucagcgugcaguacaaccugagccacaccuacgccguggacgccgccaaccacugcggcaccaucgccaacggcgugcugcagaccuucaugagaauggccuggggcggcagcuacaucgcccuggacagcggcaagggcagcugggacugcaucaugaccagcuaccaguaccugaucauccagaacaccaccugggaggaccacugccaguucagcagacccagccccaucggcuaccugggccugcugagccagagaaccagagacaucuacaucagcagaagacugcugggcaccuucaccuggacccugagcgacagcgagagcaacgagacccccggcggcuacugccugaccagauggaugcugaucgaggccgagcugaagugcuucggcaacaccgccguggccaagugcaacgagaagcacgacgaggaguucugcgacaugcugagacuguucgacuucaacaagcaggccaucagaagacugaaggcccccgcccagaugagcauccagcugaucaacaaggccgugaacgcccugaucaacgaccagcugaucaugaagaaccaccugagagacaucaugggcauccccuacugcaacuacagcaaguacugcuaccugaaccacaccgugaccggcagaaccagccugcccagaugcugccuggugagcaacggcagcuaccugaacgagacccacuucagcgacgacaucgagcagcaggccgacaacaugaucaccgagcugcugcagaaggaguacauggacagacagggcaagaccccccugggccugguggaccuguucguguucagcaccagcuucuaccugaucagcaucuuccugcaccuggugaagauccccacccacagacacgugaucggcaagcccugccccaagccccacagacugaaccacaugggcaucugcagcugcggccuguacaagcaccccggcgugcccgugaaguggaagagaugaggacuaguuauaagacugacuagcccgaugggccucccaacgggcccuccuccccuccuugcaccgagauuaaucaaaggcucuuuucagagccaccaaaaaaaaaaaaaaaaaaaaaaaaaaaaaaaaaaaaaaaaaaaaaaaaaaaaaaaaaaaaaaaaagaauu

SEQ ID NO: 32820 - RNA, 1655 nt, Artificial Sequence
  mRNA product Design i-3 (hSL-A64-N5) comprising derived and/or modified sequence from LASV(LASV035-NIG-2009;Clade II)__AIT17588__GPCmut7 (opt4)
aggagaaagcuuaccaugggccagaucaucaccuucuuccaggaggugccccacgugaucgaggaggugaugaacaucgugcugaucgcccugagccugcuggccauccugaagggcaucuacaacguggccaccugcggccuguucggccuggugagcuuccugcugcugugcggcagaagcugcagcaccaccuacaagggcguguacgagcugcagacccuggagcuggacauggccagccugaacaugaccaugccccugagcugcaccaagaacaacagccaccacuacaucauggugggcaacgagaccggccuggagcugacccugaccaacaccagcaucaucaaccacaaguucugcaaccugagcgacgcccacaagaagaaccuguacgaccacgcccugaugagcaucaucagcaccuuccaccugagcauccccaacuucaaccaguacgaggccaugagcugcgacuucaacggcggcaagaucagcgugcaguacaaccugagccacgccuacgccguggacgccgccaaccacugcggcaccaucgccaacggcgugcugcagaccuucaugagaauggccuggggcggcagcuacaucgcccuggacagcggcaagggcagcugggacugcaucaugaccagcuaccaguaccugaucauccagaacaccaccugggaggaccacugccaguucagcagacccagccccaucggcuaccugggccugcugagccagagaaccagagacaucuacaucagcagaagacugcugggcaccuucaccuggacccugagcgacagcgagggcaacgagacccccggcggcuacugccugaccagauggaugcugaucgaggccgagcugaagugcuucggcaacaccgccguggccaagugcaacgagaagcacgacgaggaguucugcgacaugcugagacuguucgacuucaacaagcaggccaucagaagacugaaggcccccgcccagaugagcauccagcugaucaacaaggccgugaacgcccugaucaacgaccagcugaucaugaagaaccaccugagagacaucaugggcauccccuacugcaacuacagcaaguacugcuaccugaaccacaccgugaccggcaagaccagccugcccagaugcugccuggugagcaacggcagcuaccugaacgagacccacuucagcgacgacaucgagcagcaggccgacaacaugaucaccgagcugcugcagaaggaguacaucgacagacagggcaagaccccccugggccugguggaccuguucguguucagcaccagcuucuaccugaucagcaucuuccugcaccuggugaagauccccacccacagacacgugaucggcaagcccugccccaagccccacagacugaaccacaugggcaucugcagcugcggccuguacaagcaccccggcgugcccgugaaguggaagagaugaggacuaguuauaagacugacuagcccgaugggccucccaacgggcccuccuccccuccuugcaccgagauuaaucaaaggcucuuuucagagccaccaaaaaaaaaaaaaaaaaaaaaaaaaaaaaaaaaaaaaaaaaaaaaaaaaaaaaaaaaaaaaaaaagaauu

SEQ ID NO: 32821 - RNA, 1655 nt, Artificial Sequence
  mRNA product Design i-3 (hSL-A64-N5) comprising derived and/or modified sequence from LASV(LASV1000-NIG-2009;Clade II)__AIT17782__GPCmut7 (opt4)
aggagaaagcuuaccaugggccagaucaucaccuucuuccaggaggugccccacgugaucgaggaggugaugaacaucgugcugaucgcccugagccugcuggccauccugaagggcaucuacaacguggccaccugcggccuguucggccuggugagcuuccugcugcugugcggcagaagcugcagcaccaccuacaagggcguguacgagcugcagacccuggagcuggacauggccagccugaacaugaccaugccccugagcugcaccaagaacaacagccaccacuacaucauggugggcaacgagaccggccuggagcugacccugaccaacaccagcaucaucaaccacaaguucugcaaccugagcgacgcccacaagaagaaccuguacgaccacgcccugaugagcaucaucagcaccuuccaccugagcauccccaacuucaaccaguacgaggccaugagcugcgacuucaacggcggcaagaucagcgugcaguacaaccugagccacaccuacgccguggacgccgccaaccacugcggcaccaucgccaacggcgugcugcagaccuucaugagaauggccuggggcggcagcuacaucgcccuggacagcggcaagggcagcugggacugcaucaugaccagcuaccaguaccugaucauccagaacaccaccugggaggaccacugccaguucagcagacccagccccaucggcuaccugggccugcugagccagagaaccagagacaucuacaucagcagaagacugcugggcaccuucaccuggacccugagcgacagcgagggcaacgagacccccggcggcuacugccugaccagauggaugcugaucgaggccgagcugaagugcuucggcaacaccgccguggccaagugcaacgagaagcacgacgaggaguucugcgacaugcugagacuguucgacuucaacaagcaggccaucaagagacugaagacccccgcccagaugagcauccagcugaucaacaaggccgugaacgcccugaucaacgaccagcugaucaugaagaaccaccugagagacaucaugggcauccccuacugcaacuacagcaaguacugcuaccugaaccacaccgugaccggcaagaccagccugcccagaugcugccuggugagcaacggcagcuaccugaacgagacccacuucagcgacgacaucgagcagcaggccgacaacaugaucaccgagcugcugcagaaggaguacaucgacagacagggcaagaccccccugggccugguggaccuguucguguucagcaccagcuucuaccugaucagcaucuuccugcaccuggugaagauccccacccacagacacguggugggcaagcccugccccaagccccacagacugaaccacaugggcaucugcagcugcggccuguacaagcaccccggcgugcccgugaaguggaagagaugaggacuaguuauaagacugacuagcccgaugggccucccaacgggcccuccuccccuccuugcaccgagauuaaucaaaggcucuuuucagagccaccaaaaaaaaaaaaaaaaaaaaaaaaaaaaaaaaaaaaaaaaaaaaaaaaaaaaaaaaaaaaaaaaagaauu

SEQ ID NO: 32822 - RNA, 1655 nt, Artificial Sequence
  mRNA product Design i-3 (hSL-A64-N5) comprising derived and/or modified sequence from LASV(LASV221-NIG-2010;Clade II)__AIT17624__GPCmut7 (opt4)
aggagaaagcuuaccaugggccagaucaucaccuucuuccaggaggugccccacgugaucgaggaggugaugaacaucgugcugaucgcccugagccugcuggccauccugaagggcaucuacaacguggccaccugcggccuguucggccuggugagcuuccugcugcugugcggcagaagcugcagcaccaccuacaagggcguguacgagcugcagacccuggagcuggacauggccagccugaacaugaccaugccccugagcugcaccaagaacaacagccaccacuacaucauggugggcaacgagaccggccuggagcugacccugaccaacaccagcaucaucaaccacaaguucugcaaccugagcgacgcccacaagaagaaccuguacgaccacgcccugaugagcaucaucagcaccuuccaccugagcauccccaacuucaaccaguacgaggccaugagcugcgacuucaacggcggcaagaucagcgugcaguacaaccugagccacaccuacgccaucgacgccgccaaccacugcggcaccaucgccaacggcgugcugcagaccuucaugagaauggccuggggcggcagcuacaucgcccuggacagcggcaagggcagcugggacugcaucaugaccagcuaccaguaccugaucauccagaacaccaccugggaggaccacugccaguucagcagacccagccccaucggcuaccugggccugcugagccagagaaccagagacaucuacaucagcagaagacugcugggcaccuucaccuggacccugagcgacagcgagggcaacgagacccccggcggcuacugccugaccagauggaugcugaucgaggccgagcugaagugcuucggcaacaccgccguggccaagugcaacgagaagcacgacgaggaguucugcgacaugcugagacuguucgacuucaacaagcaggccaucagaagacugaagacccccgcccagaugagcauccagcugaucaacaaggccgugaacgcccugaucaacgaccagcugaucaugaagaaccaccugagagacaucaugggcauccccuacugcaacuacagcaaguacugcuaccugaaccacaccgugaccggcaagaccagccugcccagaugcugccuggugagcaacggcagcuaccugaacgagacccacuucagcgacgacaucgagcagcaggccgacaacaugaucaccgagaugcugcagaaggaguacauggacagacagggcaagaccccccugggccugguggaccuguucguguucagcaccagcuucuaccugaucagcaucuuccugcaccuggugaagauccccacccacagacacgugaucggcaagcccugccccaagccccacagacugaaccacaugggcaucugcagcugcggccuguacaagcaccccggcgugcccgugaaguggaagagaugaggacuaguuauaagacugacuagcccgaugggccucccaacgggcccuccuccccuccuugcaccgagauuaaucaaaggcucuuuucagagccaccaaaaaaaaaaaaaaaaaaaaaaaaaaaaaaaaaaaaaaaaaaaaaaaaaaaaaaaaaaaaaaaaagaauu

SEQ ID NO: 32823 - RNA, 1655 nt, Artificial Sequence
  mRNA product Design i-3 (hSL-A64-N5) comprising derived and/or modified sequence from LASV(LASV237-NIG-2010;Clade II)__AIT17638__GPCmut7 (opt4)
aggagaaagcuuaccaugggccagaucaucaccuucuuccaggaggugccccacgugaucgaggaggugaugaacaucgugcugaucgcccugagccugcuggccauccugaagggcaucuacaacguggccaccugcggccuguucggccuggugagcuuccugcugcugugcggcagaagcugcagcaccaccuacaagggcguguacgagcugcagacccuggagcuggacauggccagccugaacaugaccaugccccugagcugcaccaagaacaacagccaccacuacaucauggugggcaacgagaccggccuggagcugacccugaccaacaccagcaucaucaaccacaaguucugcaaccugagcgacgcccacaagaaggaccuguacgaccacgcccugaugagcaucaucagcaccuuccaccugagcauccccaacuucaaccaguacgaggccaugagcugcgacuucaacggcggcaagaucagcgugcaguacaaccugagccacaccuacgccguggacgccgccaaccacugcggcaccaucgccaacggcgugcugcagaccuucaugagaauggccuggggcggcagcuacaucgcccuggacagcggcaagggcagcugggacugcaucaugaccagcuaccaguaccugaucauccagaacaccaccugggaggaccacugccaguucagcagacccagccccaucggcuaccugggccugcugagccagagaaccagagacaucuacaucagcagaagacugcugggcaccuucaccuggacccugagcgacagcgagggcaacgagacccccggcggcuacugccugaccagauggaugcugaucgaggccgagcugaagugcuucggcaacaccgccguggccaagugcaacgagaagcacgacgaggaguucugcgacaugcugagacuguucgacuucaacaagcaggccaucagaagacugaagacccccgcccagaugagcauccagcugaucaacaaggccgugaacgcccugaucaacgaccagcugaucaugaagaaccaccugagagacaucaugggcauccccuacugcaacuacagcaaguacugcuaccugaaccacaccgugaccggcaagaccagccugcccagaugcugccuggugagcaacggcagcuaccugaacgagacccacuucagcgacgacaucgagcagcaggccgacaacaugaucaccgagcugcugcagaaggaguacauggacagacagggcaagaccccccugggccugguggaccuguucguguucagcaccagcuucuaccugaucagcaucuuccugcaccugaucaagauccccacccacagacacaucaccggcaagcccugccccaagccccacagacugaaccacaugggcaucugcagcugcggccuguacaagcaccccggcgugcccgugaaguggaagagaugaggacuaguuauaagacugacuagcccgaugggccucccaacgggcccuccuccccuccuugcaccgagauuaaucaaaggcucuuuucagagccaccaaaaaaaaaaaaaaaaaaaaaaaaaaaaaaaaaaaaaaaaaaaaaaaaaaaaaaaaaaaaaaaaagaauu

SEQ ID NO: 32824 - RNA, 1655 nt, Artificial Sequence
  mRNA product Design i-3 (hSL-A64-N5) comprising derived and/or modified sequence from LASV(LASV253-NIG-2011;Clade II)__AIT17670__GPCmut7 (opt4)
aggagaaagcuuaccaugggccagaucaucaccuucuuccaggaggugccccacgugaucgaggaggugaugaacaucgugcugaucgcccugagccugcuggccauccugaagggcaucuacaacguggccaccugcggccuguucggccuggugagcuuccugcugcugugcggcagaagcugcagcaccaccuacaagggcguguacgagcugcagacccuggagcuggacauggccagccugaacaugaccaugccccugagcugcaccaagaacaacagccaccacuacaucauggugggcaacgagaccggccuggagcugacccugaccaacaccagcaucaucaaccacaaguucugcaaccugagcgacgcccacaagaagaaccuguacgaccacgcccugaugagcaucaucagcaccuuccaccugagcauccccaacuucaaccaguacgaggccaugagcugcgacuucaacggcggcaagaucagcgugcaguacaaccugagccacaccuacgccguggacgccgccaaccacugcggcaccaucgccaacggcgugcugcagaccuucaugagaauggccuggggcggcagcuacaucgcccuggacagcggcaagggcagcugggacugcaucaugaccagcuaccaguaccugaucauccagaacaccaccugggaggaccacugccaguucagcagacccagccccaucggcuaccugggccugcugagccagagaaccagagacaucuacaucagcagaagacugcugggcaccuucaccuggacccugagcgacagcgagggcaacgagacccccggcggcuacugccugaccagauggaugcugaucgaggccgagcugaagugcuucggcaacaccgccguggccaagugcaacgagaagcacgacgaggaguucugcgacaugcugagacuguucgacuucaacaagcaggccaucagaagacugaaggcccccgcccagaugagcauccagcugaucaacaaggccgugaacgcccugaucaacgaccagcugaucaugaagaaccaccugagagacaucaugggcauccccuacugcaacuacagcaaguacugcuaccugaaccacaccgugaccggcagaaccagccugcccagaugcugccuggugagcaacggcagcuaccugaacgagacccacuucagcgacgacaucgagcagcaggccgacaacaugaucaccgagcugcugcagaaggaguacaucgacagacagggcaagaccccccugggccugguggaccuguucguguucagcaccagcuucuaccugaucagcaucuuccugcaccuggugaagauccccacccacagacacaucaucggcaagcccugccccaagccccacagacugaaccacaugggcaucugcagcugcggccuguacaagcaccccggcgugcccgugaaguggaagagaugaggacuaguuauaagacugacuagcccgaugggccucccaacgggcccuccuccccuccuugcaccgagauuaaucaaaggcucuuuucagagccaccaaaaaaaaaaaaaaaaaaaaaaaaaaaaaaaaaaaaaaaaaaaaaaaaaaaaaaaaaaaaaaaaagaauu

SEQ ID NO: 32825 - RNA, 1655 nt, Artificial Sequence
  mRNA product Design i-3 (hSL-A64-N5) comprising derived and/or modified sequence from LASV(LASV254-NIG-2011;Clade II)__AIT17674__GPCmut7 (opt4)
aggagaaagcuuaccaugggccagaucaucaccuucuuccaggaggugccccacgugaucgaggaggugaugaacaucgugcugaucgcccugagccugcuggccauccugaagggcaucuacaacguggccaccugcggccuguucggccuggugagcuuccugcugcugugcggcagaagcugcagcaccaccuacaagggcguguacgagcugcagacccuggagcuggacaugaccaaccugaacaugaccaugccccugagcugcaccaagaacaacagccaccacuacaucauggugggcaacgagaccggccuggagcugacccugaccaacaccagcaucaucaaccacaaguucugcaaccugagcgacgcccacaagaagaaccuguacaaccacgcccugaugagcaucaucagcaccuuccaccugagcauccccaacuucaaccaguacgaggccaugagcugcgacuucaacggcggcaagaucagcgugcaguacaaccugagccacagcuacgccguggacgccgccaaccacugcggcaccaucgccaacggcgugcugcagaccuucaugagaauggccuggggcggcagcuacaucgcccuggacagcggcaagggcaacugggacugcaucaugaccagcuaccaguaccugaucauccagaacaccaccugggaggaccacugccaguucagcagacccagccccaucggcuaccugggccugcugagccagagaaccagagacaucuacaucagcagaagacugcugggcaccuucaccuggacccugagcgacagcgagggcaacgagacccccggcggcuacugccugaccagauggaugcugaucgaggccgagcugaagugcuucggcaacaccgccguggccaagugcaacgagaagcacgacgaggaguucugcgacaugcugagacuguucgacuucaacaagcaggccaucagaagacugaagacccccgcccaggccaacauccagcugaucaacaaggccgugaacgcccugaucaacgaccagcugaucaugaagaaccaccugagagacaucaugggcauccccuacugcaacuacagcaaguacugcuaccugaaccacaccgugaccggcaagaccagccugcccagaugcugccuggugagcaacggcagcuaccugaacgagacccacuucagcgacgacaucgagcagcaggccgacaacaugaucaccgagcugcugcagaaggaguacauggacagacagggcaagaccccccugggccugguggaccuguucguguucagcaccagcuucuaccugaucagcaucuuccugcaccuggugaagauccccacccacagacacgugaucggcaagcccugccccaagccccacagacugaaccacaugggcaucugcagcugcggccuguacaagcaccccggcgugcccgugaaguggaagagaugaggacuaguuauaagacugacuagcccgaugggccucccaacgggcccuccuccccuccuugcaccgagauuaaucaaaggcucuuuucagagccaccaaaaaaaaaaaaaaaaaaaaaaaaaaaaaaaaaaaaaaaaaaaaaaaaaaaaaaaaaaaaaaaaagaauu

SEQ ID NO: 32826 - RNA, 1655 nt, Artificial Sequence
  mRNA product Design i-3 (hSL-A64-N5) comprising derived and/or modified sequence from LASV(Nig08-A19;Clade III)__ADU56618__GPCmut7 (opt4)
aggagaaagcuuaccaugggccagaucgugaccuucuuccaggaggugccccacgugaucgaggaggugaugaacaucgugcugaucgcccugagcauccuggccauccugaagggccuguacaacaucgccaccugcggccugaucggccuggugaccuuccugcugcugagcggcagaagcugcagcaugaccuacaagggcguguacgagcugcagacccuggagcugaacaugaacacccugaacaugaccaugccccugagcugcaccaagaacaacagccaccacuacaucauggugggcaacgagaccggccuggagcugacccugaccaacaccagccugcugcaccacaaguucugcaaccugagcgacgcccacaagaagaaccuguacgaccacacccugaugagcaucaucagcaccuuccaccugagcauccccaacuucaaccaguacgaggccaugagcugcgacuucaacggcggcaagaucaccgugcaguacaaccugagccacagcuacgccaucgacgccgccaaccacugcggcaccguggccaacggcgugcugcagaccuucaugagaauggccuggggcggcagcuacaucgcccuggacagcggcagaggcaagugggacugcaucaugaccagcuaccaguaccugaucauccagaacaccaccugggaggaccacugccaguucagcagacccagccccaucggcuaccugggccugcugagccagagaaccagagacaucuacaucagcagaagacugcugggcaccuucaccuggacccugagcgacagcgagggcaacgagacccccggcggcuacugccugaccagauggaugcugaucgaggccgagcugaagugcuucggcaacaccgccguggccaagugcaacgagaagcacgacgaggaguucugcgacaugcugagacuguucgacuucaacaagcaggccaucagaagacugaaggcccccgcccagaugagcauccagcugaucaacaaggccgugaacgcccugaucaacgaccagcugaucaugaagaaccaccugagagacaucaugggcauccccuacugcaacuacagcaaguacugcuaccugaaccacaccagcaccggcagaaccagccugcccagaugcugccuggugagcaacggcagcuaccugaacgagacccacuucagcgacgacaucgagcagcaggccgacaacaugaucaccgagaugcugcagaaggaguaccuggacagacagggcaagaccccccugggccugguggaccuguucguguucagcaccagcuucuaccugaucagcaucuuccugcaccuggugaagauccccacccacagacacaucgugggcaagcccugccccaagccccacagacugaaccacaugggcaucugcagcugcggccuguacaagcagcccggcgugcccgugagauggaagagaugaggacuaguuauaagacugacuagcccgaugggccucccaacgggcccuccuccccuccuugcaccgagauuaaucaaaggcucuuuucagagccaccaaaaaaaaaaaaaaaaaaaaaaaaaaaaaaaaaaaaaaaaaaaaaaaaaaaaaaaaaaaaaaaaagaauu

SEQ ID NO: 32827 - RNA, 1658 nt, Artificial Sequence
  mRNA product Design i-3 (hSL-A64-N5) comprising derived and/or modified sequence from LASV(G1180-SLE-2010;Clade IV)__AIT17168__GPCmut7 (opt4)
aggagaaagcuuaccaugggccagaucgugaccuucuuccaggaggugccccacgugaucgaggaggugaugaacaucgugcugaucgcccugagcauccuggccgugcugaagggccuguacaacuucgccaccugcggccuggugggccugcugaccuuccugcugcugugcggcagaagcugcaccgccagcagauacaagggcguguacgagcugcagacccuggagcugaacauggagacccugaacaugaccaugccccugagcugcaccaagaacaacagccaccacuacaucauggugggcaacgagaccggccuggagcugacccugaccaacaccagcaucaucaaccacaaguucugcaaccugagcgacgcccacaagaagaaccuguacgaccacgcccugaugagcaucaucagcaccuuccaccugagcauccccaacuucaaccaguacgaggccaugagcugcgacuucaacggcggcaagaucagcgugcaguacaaccugagccacagcuacgccggcgacgccgccaaccacugcggcaccguggccaacggcgugcugcagaccuucaugagaauggccuggggcggcagcuacaucgcccuggacagcggccacggcagcugggacugcaucaugaccagcuaccaguaccugaucauccagaacaccaccugggaggaccacugccaguucagcagacccagccccaucggcuaccugggccugcugagccagagaaccagagacaucuacaucagcagaagacugcugggcaccuucaccuggacccugagcgacagcgagggcaaggacacccccggcggcuacugccugaccagauggaugcugaucgaggccgagcugaagugcuucggcaacaccgccguggccaagugcaacgagaagcacgacgaggaguucugcgacaugcugagacuguucgacuucaacaagcaggccauccagagacugaaggcccccgcccagaugagcauccagcugaucaacaaggccgugaacgcccugaucaacgaccagcugaucaugaagaaccaccugagagacaucaugggcauccccuacugcaacuacagcaaguacugcuaccugaaccacaccaccaccggcaagaccagccugcccaagugcugccuggugagcaacggcagcuaccugaacgagacccacuucagcgacgacaucgagcagcaggccgacaacaugaucaccgagaugcugcagaaggaguacauggagagacagggcaagaccccccugggccugguggaccuguucguguucagcaccagcuucuaccugaucagcaucuuccugcaccuggugaagauccccacccacagacacaucgugggcaagagcugccccaagccccacagacugaaccacaugggcaucugcagcugcggccuguacaagcagcccggcgugcccgugaaguggaagagaugaggacuaguuauaagacugacuagcccgaugggccucccaacgggcccuccuccccuccuugcaccgagauuaaucaaaggcucuuuucagagccaccaaaaaaaaaaaaaaaaaaaaaaaaaaaaaaaaaaaaaaaaaaaaaaaaaaaaaaaaaaaaaaaaagaauu

SEQ ID NO: 32828 - RNA, 1658 nt, Artificial Sequence
  mRNA product Design i-3 (hSL-A64-N5) comprising derived and/or modified sequence from LASV(G1442-SLE-2011;Clade IV)__AIT17180__GPCmut7 (opt4)
aggagaaagcuuaccaugggccagaucgugaccuucuuccaggaggugccccacgugaucgaggaggugaugaacaucgugcugaucgcccugagcauccuggccgugcugaagggccuguacaacguggccaccugcggccugaucggccuggugaccuuccugcugcugugcggcagaagcugcaccaccacccuguacaagggcguguacgagcugcagacccuggagcugaacauggagacccugaacaugaccaugccccugagcugcaccaagaacaacagccaccacuacaucagagugggcaacgagaccggccuggagcugacccugaccaacaccagcaucaucaaccacaaguucugcaaccugagcgacgcccacaagaagaaccuguacgaccacgcccugaugagcaucaucagcaccuuccaccugagcauccccaacuucaaccaguacgaggccaugagcugcgacuucaacggcggcaagaucagcgugcaguacaaccugagccacagcuacgccggcgacgccgccaaccacugcggcaccguggccaacggcgugcugcagaccuucaugagaauggccuggggcggcagcuacaucgcccuggacagcggcagaggcaacugggacugcaucaugaccagcuaccaguaccugaucauccagaacaccaccugggacgaccacugccaguucagcagacccagccccaucggcuaccugggccugcugagccagagaaccagagacguguacaucagcagaagacugcugggcaccuucaccuggacccugagcgacagcgagggcaaggacacccccggcggcuacugccugaccagauggaugcugaucgaggccgagcugaagugcuucggcaacaccgccguggccaagugcaacgagaagcacgacgaggaguucugcgacaugcugagacuguucgacuucaacaagcaggccauccagagacugaaggcccccgcccagaugagcauccagcugaucaacaaggccgugaacgcccugaucaacgaccagcugaucaugaagaaccaccugagagacaucaugggcauccccuacugcaacuacagcaaguacugcuaccugaacaacaccgccaccggcaagaccagccugcccaagugcugccugaucagcaacggcagcuaccugaacgagacccacuucagcgacgacaucgagcaggaggccgacaacaugaucaccgagaugcugcagaaggaguacauggagagacagggcaagaccccccugggccugguggaccuguucguguucagcaccagcuucuaccugaucagcaucuuccugcaccuggugaagauccccacccacagacacaucgugggcaagagcugccccaagccccacagacugaaccacaugggcaucugcagcugcggccuguacaagcagcccggcgugcccgugagauggaagagaugaggacuaguuauaagacugacuagcccgaugggccucccaacgggcccuccuccccuccuugcaccgagauuaaucaaaggcucuuuucagagccaccaaaaaaaaaaaaaaaaaaaaaaaaaaaaaaaaaaaaaaaaaaaaaaaaaaaaaaaaaaaaaaaaagaauu

SEQ ID NO: 32829 - RNA, 1658 nt, Artificial Sequence
  mRNA product Design i-3 (hSL-A64-N5) comprising derived and/or modified sequence from LASV(G3010-SLE-2013;Clade IV)__AIT17344__GPCmut7 (opt4)
aggagaaagcuuaccaugggccagaucgugaccuucuuccaggaggugccccacgugaucgaggaggugaugaacaucgugcugaucgcccugagcauccuggccgugcugaagggccuguacaacuucgccaccugcggccuggugggccuggugaccuuccugcugcugugcggcagaagcugcaccaccagccuguacaagggcguguacgagcugcagacccuggagcugaacauggagacccugaacaugaccaugccccugagcugcaccaagaacaacagccaccacuacaucauggugggcaacgagaccggccuggagcugacccugaccaacaccagcaucaucaaccacaaguucugcaaccugagcgacgcccacaagaagaaccuguacaaccacgcccugaugagcaucaucagcaccuuccaccugagcauccccaacuucaaccaguacgaggccaugagcugcgacuucaacggcggcaagaucagcgugcaguacaaccugagccacagcuacgccggcgacgccgccagccacugcggcaccguggccaacggcgugcugcagaccuucaugagaauggccuggggcggcagcuacaucgcccuggacagcggcuacggcaagugggacugcaucaugaccagcuaccaguaccugaucauccagaacaccaccugggaggaccacugccaguucagcagacccagccccaucggcuaccugggccugcugagccagagaaccagagacaucuacaucagcagaagacugcugggcaccuucaccuggacccugagcgacagcgagggcaaggacacccccggcggcuacugccugaccagauggaugcugaucgaggccgagcugaagugcuucggcaacaccgccguggccaagugcaacgagaagcacgacgaggaguucugcgacaugcugagacuguucgacuucaacaagcaggccauccagagacugaagacccccgcccagaugagcauccagcugaucaacaaggccgugaacgcccugaucaacgaccagcugaucaugaagaaccaccugagagacaucaugggcauccccuacugcaacuacagcaaguacugcuaccugaaccacaccaccaccggcaagaccagccugcccaagugcugccuggugagcaacggcagcuaccugaacgagacccacuucagcgacgacaucgagcagcaggccgacaacaugaucaccgagaugcugcagaaggaguacauggagagacagggcaagaccccccugggccugguggaccuguucguguucagcaccagcuucuaccugaucagcaucuuccugcaccuggugaagauccccacccacagacacaucgugggcaagagcugccccaagccccacagacugaaccacaugggcaucugcagcugcggccuguacaagcagcccggcgugcccgugagauggaagagaugaggacuaguuauaagacugacuagcccgaugggccucccaacgggcccuccuccccuccuugcaccgagauuaaucaaaggcucuuuucagagccaccaaaaaaaaaaaaaaaaaaaaaaaaaaaaaaaaaaaaaaaaaaaaaaaaaaaaaaaaaaaaaaaaagaauu

SEQ ID NO: 32830 - RNA, 1658 nt, Artificial Sequence
  mRNA product Design i-3 (hSL-A64-N5) comprising derived and/or modified sequence from LASV(G502-SLE-2009;Clade IV)__AIT17126__GPCmut7 (opt4)
aggagaaagcuuaccaugggccagaucgugaccuucuuccaggaggugccccacgugaucgaggaggugaugaacaucgugcugaucgcccugagcauccuggccgugcugaagggccuguacaacuucgccaccugcggccuggugggccugcugaccuuccugcugcugugcggcagaagcugcaccaccggccuguacaagggcguguacgagcugcagacccuggagcugaacauggagacccugaacaugaccaugccccugagcugcaccaagaacaacagccaccacuacaucauggugggcaacgagaccggccuggagcugacccugaccaacaccagcaucaucaaccacaaguucugcaaccugagcgacgcccacaagaagaaccuguacgaccacgcccugaugagcaucaucagcaccuuccaccugagcauccccaacuucaaccaguacgaggccaugagcugcgacuucaacggcggcaagaucagcgugcaguacaaccugagccacagcuacgccggcgacgccgccgaccacugcggcaccguggccaacggcgugcugcagaccuucaugagaauggccuggggcggcagcuacaucgcccuggacagcggcagaggcagaugggacugcaucaugaccagcuaccaguaccugaucauccagaacaccaccugggaggaccacugccaguucagcagacccagccccaucggcuaccugggccugcugagccagagaaccagagacaucuacaucagcagaagacugcugggcaccuucaccuggacccugagcgacagcgagggcaaggacacccccggcggcuacugccugaccagauggaugcugaucgaggccgagcugaagugcuucggcaacaccgccguggccaagugcaacgagaagcacgacgaggaguucugcgacaugcugagacuguucgacuucaacaagcaggccauccagagacugaaggcccccgcccagaugagcauccagcugaucaacaaggccgugaacgcccugaucaacgaccagcuggugaugaagaaccaccugagagacaucaugggcauccccuacugcaacuacagcagauacugcuaccugaaccacaccaccaccggcagaaccagccugcccaagugcugccuggugagcaacggcagcuaccugaacgagacccacuucagcgacgacaucgagcagcaggccgacaacaugaucaccgagaugcugcagaaggaguacauggagagacagggcaagaccccccugggccugguggaccuguucguguucagcaccagcuucuaccugaucagcaucuuccugcaccuggugaagauccccacccacagacacaucgugggcaagagcugccccaagccccacagacugaaccacaugggcaucugcagcugcggccuguacaagcagcccggcgugcccgugaaguggaagagaugaggacuaguuauaagacugacuagcccgaugggccucccaacgggcccuccuccccuccuugcaccgagauuaaucaaaggcucuuuucagagccaccaaaaaaaaaaaaaaaaaaaaaaaaaaaaaaaaaaaaaaaaaaaaaaaaaaaaaaaaaaaaaaaaagaauu

SEQ ID NO: 32831 - RNA, 1658 nt, Artificial Sequence
  mRNA product Design i-3 (hSL-A64-N5) comprising derived and/or modified sequence from LASV(G733-SLE-2010;Clade IV)__AIT17154__GPCmut7 (opt4)
aggagaaagcuuaccaugggccagaucgugaccuucuuccaggaggugccccacgugaucgaggaggugaugaacaucgugcugaucgcccugagcauccuggccgugcugaagggccuguacaacuucgccaccugcggcaucgugggccuggugagcuuccugcugcugugcggcagaagcugcaccaccagccuguacaagggcguguacgagcugcagacccuggagcugaacauggagacccugaacaugaccaugccccugagcugcaccaagaacaacagccaccacuacaucauggugggcaacgagaccggccuggagcugacccugaccaacaccagcaucaucaaccacaaguucugcaaccugagcgacgcccacaagaagaaccuguacgaccacgcccugaugagcaucaucagcaccuuccaccugagcauccccaacuucaaccaguacgaggccaugagcugcgacuucaacggcggcaagaucagcgugcaguacaaccugagccacagcuacgccggcgacgccgccaaccacugcggcaccaucgccaacggcgugcugcagaccuucaugagaauggccuggggcggcagcuacaucgcccuggacagcggcagagacagaugggacugcaucaugaccagcuaccaguaccugaucauccagaacaccaccugggaggaccacugccaguucagcagacccagccccaucggcuaccugggccugcugagccagagaaccagagacaucuacaucagcagaagacugcugggcaccuucaccuggacccugagcgacagcgagggcaaggacacccccggcggcuacugccugaccagauggaugcugaucgaggccgagcugaagugcuucggcaacaccgccguggccaagugcaacgagaagcacgacgaggaguucugcgacaugcugagacuguucgacuucaacaagcaggccauccagagacugaaggcccccgcccagaugagcauccagcugaucaacaaggccgugaacgcccugaucaacgaccagcugaucaugaagaaccaccugagagacaucaugggcauccccuacugcaacuacagcaaguacugcuaccugaaccacaccaccaccggcaagaccagccugcccaagugcugccuggugagcaacggcagcuaccugaacgagacccacuucagcgacgacaucgagcagcaggccgacaacaugaucaccgagaugcugcagaaggaguacauggagagacagggcaagaccccccugggccugguggaccuguucguguucagcaccagcuucuaccugaucagcaucuuccugcaccuggugaagauccccacccacagacacguggugggcaagagcugccccaagccccacagacugaaccacaugggcaucugcagcugcggccuguacggccagcccggcgugcccgugaaguggaagagaugaggacuaguuauaagacugacuagcccgaugggccucccaacgggcccuccuccccuccuugcaccgagauuaaucaaaggcucuuuucagagccaccaaaaaaaaaaaaaaaaaaaaaaaaaaaaaaaaaaaaaaaaaaaaaaaaaaaaaaaaaaaaaaaaagaauu

SEQ ID NO: 32832 - RNA, 1658 nt, Artificial Sequence
  mRNA product Design i-3 (hSL-A64-N5) comprising derived and/or modified sequence from MOPV/LASV reassortant(IGS-1;Clade IV)__AFY05576__GPCmut7 (opt4)
aggagaaagcuuaccaugggccagaucgugaccuucuuccaggaggugccccacgugaucgaggaggugaugaacaucgugcugaucgcccugagcgugcuggccgugcugaagggccuguacaacuucgccaccugcggccuggugggccuggugaccuuccugcugcugugcggcagaagcugcaccaccagccuguacaagggcguguacgagcugcagacccuggagcugaacauggagacccugaacaugaccaugccccugagcugcaccaagaacaacagccaccacuacaucauggugggcaacgagaccggccuggagcugacccugaccaacaccagcaucaucaaccacaaguucugcaaccugagcgacgcccacaagaagaaccuguacgaccacgcccugaugagcaucaucagcaccuuccaccugagcauccccaacuucaaccaguacgaggccaugagcugcgacuucaacggcggcaagaucagcgugcaguacaaccugagccacagcuacgccggcgacgccgccaaccacugcggcaccguggccaacggcgugcugcagaccuucaugagaauggccuggggcggcagcuacaucgcccuggacagcggcagaggcaacugggacugcaucaugaccagcuaccaguaccugaucauccagaacaccaccugggaggaccacugccaguucagcagacccagccccaucggcuaccugggccugcugagccagagaaccagagacaucuacaucagcagaagacugcugggcaccuucaccuggacccugagcgacagcgagggcgaggacacccccggcggcuacugccugaccagauggaugcugaucgaggccgagcugaagugcuucggcaacaccgccguggccaagugcaacgagaagcacgacgaggaguucugcgacaugcugagacuguucgacuucaacaagcaggccauccagagacugaaggcccccgcccagaugagcauccagcugaucaacaaggccgugaacgcccugaucaacgaccagcugaucaugaagaaccaccugagagacaucaugggcauccccuacugcaacuacagcaaguacugcuaccugaaccacaccaccaccggcagaaccagccugcccaagugcugccuggugagcaacggcagcuaccugaacgagacccacuucagcgacgacaucgagcagcaggccgacaacaugaucaccgagaugcugcagaaggaguacauggagagacagggcaagaccccccugggccugguggaccuguucguguucagcaccagcuucuaccugaucagcaucuuccugcaccuggugaagauccccacccacagacacaucgugggcaagagcugccccaagccccacagacugaaccacaugggcaucugcagcugcggccuguacaagcagcccggcgugcccgugaaguggaagagaugaggacuaguuauaagacugacuagcccgaugggccucccaacgggcccuccuccccuccuugcaccgagauuaaucaaaggcucuuuucagagccaccaaaaaaaaaaaaaaaaaaaaaaaaaaaaaaaaaaaaaaaaaaaaaaaaaaaaaaaaaaaaaaaaagaauu

SEQ ID NO: 32833 - RNA, 1658 nt, Artificial Sequence
  mRNA product Design i-3 (hSL-A64-N5) comprising derived and/or modified sequence from LASV(LM765-SLE-2012;Clade IV)__AIT17814__GPCmut7 (opt4)
aggagaaagcuuaccaugggccagaucgugaccuucuuccaggaggugccccacgugaucgaggaggugaugaacaucgugcugaucgcccugagcauccuggccgugcugaagggccuguacaacuucgccaccugcggccuggugggccuggugaccuuccugcugcugugcggcagaagcugcaccaccagccuguacaagggcguguacgagcugcagacccuggagcugaacauggagacccugaacaugaccaugccccugagcugcaccaagaacaacagccaccacuacaucauggugggcaacgagaccggccuggagcugacccugaccaacaccagcaucaucgaccacaaguucugcaaccugagcgacgcccacagaaagaaccuguacgaccacgcccugaugagcaucaucagcaccuuccaccugagcauccccaacuucaaccaguacgaggccaugagcugcgacuucaacggcggcaagaucagcgugcaguacaaccugagccacagcuacgccaaggacgccgccgaccacugcggcaccguggccaacggcgugcugcagaccuucaugagaauggccuggggcggcagcuacaucgcccuggacagcggcagaggcagaugggacugcaucaugaccagcuaccaguaccugaucauccagaacaccaccugggaggaccacugccaguucagcagacccagccccaucggcuaccugggccugcugagccagagaaccagagacaucuacaucagcagaagacugcugggcaccuucaccuggacccugagcgacagcgagggcaaggacacccccggcggcuacugccugaccagauggaugcugaucgaggccgagcugaagugcuucggcaacaccgccguggccaagugcaacgagaagcacgacgaggaguucugcgacaugcugagacuguucgacuucaacaagcaggccauccagagacugaaggcccccgcccagaugagcauccagcugaucaacaaggccgugaacgcccugaucaacgaccagcugaucaugaagaaccaccugagagacaucaugggcauccccuacugcaacuacagcaaguacugcuaccugaaccacaccaccaccggcaagaccagccugcccaagugcugccuggugagcaacggcagcuaccugaacgagacccacuucagcgacgacaucgagcagcaggccgacaacaugaucaccgagaugcugcagaaggaguacauggagagacagggcaagaccccccugggccugguggaccuguucguguucagcaccagcuucuaccugaucagcaucuuccugcaccuggugaagauccccacccacagacacaucgugggcaagcccugccccaagccccacagacugaaccacaugggcaucugcagcugcggccuguacaagcagcccggcgugcccgugaaguggaagagaugaggacuaguuauaagacugacuagcccgaugggccucccaacgggcccuccuccccuccuugcaccgagauuaaucaaaggcucuuuucagagccaccaaaaaaaaaaaaaaaaaaaaaaaaaaaaaaaaaaaaaaaaaaaaaaaaaaaaaaaaaaaaaaaaagaauu

SEQ ID NO: 32834 - RNA, 1658 nt, Artificial Sequence
  mRNA product Design i-3 (hSL-A64-N5) comprising derived and/or modified sequence from LASV(LM776-SLE-2012;Clade IV)__AIT17824__GPCmut7 (opt4)
aggagaaagcuuaccaugggccagaucgugaccuucuuccaggaggugccccacgugaucgaggaggugaugaacaucgugcugaucgcccugagcauccuggccgugcugaagggccuguacaacuucgccaccugcggccuggugggccuggugaccuuccugcugcugugcggcagaagcugcaccaccagcguguacaagggcguguacgagcugcagacccuggagcugaacauggagacccugaacaugaccaugccccugagcugcaccaagaacaacagccaccacuacaucauggugggcaacgagaccggccuggagcugacccugaccaacaccagcaucaucaaccacaaguucugcaaccugagcgacgcccacaagaagaaccuguacgaccacgcccugaugagcaucaucagcaccuuccaccugagcauccccaacuucaaccaguacgaggccaugagcugcgacuucaacggcggcaagaucagcgugcaguacaaccugagccacagcuacgccggcgacgccgccaaccacugcggcaccguggccaacggcgugcugcagaccuucaugagaauggccuggggcggcagcuacaucgcccuggacagcggccacggcaagugggacugcaucaugaccagcuaccaguaccugaucauccagaacaccaccugggaggaccacugccaguucagcagacccagccccaucggcuaccugggccugcugagccagagaaccagagacaucuacaucagcagaagacugcugggcaccuucaccuggacccugagcgacagcgagggcaaggacacccccggcggcuacugccugaccagauggaugcugaucgaggccgagcugaagugcuucggcaacaccgccguggccaagugcaacgagaagcacgacgaggaguucugcgacaugcugagacuguucgacuucaacaagcaggccauccagagacugaaggcccccgcccagaugagcauccagcugaucaacaaggccgugaacgcccugaucaacgaccagcugaucaugaagaaccaccugagagacaucaugggcauccccuacugcaacuacagcaaguacugcuaccugaaccacaccaccaccggcaagaccagccugcccaagugcugccuggugagcaacggcagcuaccugaacgagacccacuucagcgacgacaucgagcagcaggccgacaacaugaucaccgagaugcugcagaaggaguacauggagagacagggcaagaccccccugggccugguggaccuguucguguucagcaccagcuucuaccugaucagcaucuuccugcaccuggugaagauccccacccacagacacaucgugggcaagagcugccccaagccccacagacugaaccacaugggcaucugcagcugcggccuguacaagcagcccggcgugcccgugagauggaagagaugaggacuaguuauaagacugacuagcccgaugggccucccaacgggcccuccuccccuccuugcaccgagauuaaucaaaggcucuuuucagagccaccaaaaaaaaaaaaaaaaaaaaaaaaaaaaaaaaaaaaaaaaaaaaaaaaaaaaaaaaaaaaaaaaagaauu

SEQ ID NO: 32835 - RNA, 1658 nt, Artificial Sequence
  mRNA product Design i-3 (hSL-A64-N5) comprising derived and/or modified sequence from LASV(Mad39;Clade IV)__ANH09722__GPCmut7 (opt4)
aggagaaagcuuaccaugggccagaucgugaccuucuuccaggaggugccccacgugaucgaggaggugaugaacaucgugcugaucgcccugagcauccuggccgugcugaagggccuguacaacguggccaccugcggccugaucggccuggugaccuuccugcugcugugcggcagaagcugcaccaccacccuguacaagggcguguacgagcugcaggcccuggagcugaacauggagacccugaacaugaccaugccccugagcugcaccaagaacaacagccaccacuacaucagagugggcaacgagaccggccuggagcugacccugaccaacaccagccugaucaaccacaaguucugcaaccugagcgacgcccacaagaagaaccuguacgaccacgcccugaugagcaucaucagcaccuuccaccugagcauccccaacuucaaccaguacgaggccaugagcugcgacuucaacgacggcaagaucagcgugcaguacaaccugagccacaccuacgccggcgacaccgccaaccacugcggcaccguggccaacggcgugcugcagaccuucaugagaauggccuggggcggcagcuacaucgcccuggacagcggcagaggcggcugggacugcaucaugaccagcuaccaguaccugaucauccagaacaccaccugggaggaccacugccaguucagcagacccagccccaucggcuaccugggccugcugagccagagaaccagagacaucuacaucagcagaagacugcugggcaccuucaccuggacccugagcgacagcgagggcaaggacacccccggcggcuacugccugaccagauggaugcugaucgaggccgagcugaagugcuucggcaacaccgccguggccaagugcaacgagaagcacgacgaggaguucugcgacaugcugagacuguucgacuucaacaagcaggccauccagagacugaaggcccccgcccagaugagcauccagcugaucaacaaggccgugaacgcccugaucaacgaccagcugaucaugaagaaccaccugagagacaucaugggcauccccuacugcaacuacagcaaguacugcuaccugaaccacaccgugaccggcaagaccagccugcccaagugcugccuggugagcaacggcagcuaccugaacgagacccacuucagcgacgacaucgagcagcaggccgacaacaugaucaccgagaugcugcagaaggaguacauggagagacagggcaagaccccccugggccugguggaccuguucguguucagcaccagcuucuaccugaucagcaucuuccugcaccuggugaagauccccacccacagacacguggugggcaagcccugccccaagccccacagacugaaccacaugggcaucugcagcugcggcuucuacaagcagcccggcgugcccgugagauggaagagaugaggacuaguuauaagacugacuagcccgaugggccucccaacgggcccuccuccccuccuugcaccgagauuaaucaaaggcucuuuucagagccaccaaaaaaaaaaaaaaaaaaaaaaaaaaaaaaaaaaaaaaaaaaaaaaaaaaaaaaaaaaaaaaaaagaauu

SEQ ID NO: 32836 - RNA, 1658 nt, Artificial Sequence
  mRNA product Design i-3 (hSL-A64-N5) comprising derived and/or modified sequence from LASV(Z0947-SLE-2011;Clade IV)__AIT17840__GPCmut7 (opt4)
aggagaaagcuuaccaugggccagaucgugaccuucuuccaggaggugccccacgugaucgaggaggugaugaacaucgugcugaucgcccugagcauccuggccgugcugaagggccuguacaacuucgccaccugcggccuggugggccuggugaccuuccugcugcugugcggcagaagcugcaccaucagccuguacaagggcguguacgagcugcagacccuggagcugaacauggagacccugaacaugaccaugccccugagcugcaccaagaacaacagccaccacuacaucauggugggcaacgagaccggccuggagcugacccugaccaacaccagcaucaucaaccacaaguucugcaaccugagcgacgcccacaagaagaaccuguacgaccacgcccugaugagcaucaucagcaccuuccaccugagcauccccaacuucaaccaguacgaggccaugagcugcgacuucaacggcggcaagaucagcgugcaguacaaccugagccacagcuacgccggcgacgccgccaaccacugcggcaccguggccaacggcgugcugcagaccuucaugagaauggccuggggcggcagcuacaucgcccuggacagcggcagagacagaugggacugcaucaugaccagcuaccaguaccugaucauccagaacaccaccugggaggaccacugccaguucagcagacccagccccaucggcuaccugggccugcugagccagagaaccagagacaucuacaucagcagaagacugcugggcaccuucaccuggacccugagcgacagcgagggcaaggacacccccggcggcuacugccugaccagauggaugcugaucgaggccgagcugaagugcuucggcaacaccgccguggccaagugcaacgagaagcacgacgaggaguucugcgacaugcugagacuguucgacuucaacaagcaggccauccagagacugaaggcccccgcccagaugagcauccagcugaucaacaaggccgugaacgcccugaucaacgaccagcugaucaugaagaaccaccugagagacaucaugggcauccccuacugcaacuacagcaaguacugcuaccugaaccacaccaccaccggcaagaccagccugcccaagugcugccuggugagcaacggcagcuaccugaacgagacccacuucagcgacgacaucgagcagcaggccgacaacaugaucaccgagaugcugcagaaggaguacauggagagacagggcaagaccccccugggccugguggaccuguucguguucagcaccagcuucuaccugaucagcaucuuccugcaccuggugaagauccccacccacagacacaucgugggcaagcccugccccaagccccacagacugaaccacaugggcaucugcagcugcggccuguacaagcagcccggcgugcccgugaaguggaagagaugaggacuaguuauaagacugacuagcccgaugggccucccaacgggcccuccuccccuccuugcaccgagauuaaucaaaggcucuuuucagagccaccaaaaaaaaaaaaaaaaaaaaaaaaaaaaaaaaaaaaaaaaaaaaaaaaaaaaaaaaaaaaaaaaagaauu

SEQ ID NO: 32837 - RNA, 1658 nt, Artificial Sequence
  mRNA product Design i-3 (hSL-A64-N5) comprising derived and/or modified sequence from LASV(Josiah;Clade IV)__NP_694870__GPCmut7 (opt5)
aggagaaagcuuaccaugggccagaucgugaccuucuuucaagaggucccccacguuauugaagaggugaugaacaucgugcugauugcccucagcguccuggcugugcuuaaggggcuguacaauuucgccacaugcggacucguuggccuggugacguuucuucugcucugugggagauccugcaccacaucucuguauaaaggagucuacgaacugcagacccucgagcugaacauggaaacacuuaauaugaccaugccucugagcuguacaaagaacaauucccaucacuauaucauggugggcaacgagaccgggcucgagcugacgcuuaccaauacaucuauuaucaaccauaaauucugcaaucugagcgacgcgcacaagaaaaaccucuacgaucaugcucugauguccaucauuucuaccuuucaccugagcaucccgaauuucaaccaguaugaagccauguccugugacuuuaauggaggcaagauuagcguucaguacaaccucucucacuccuaugccggcgaugcugccaaucauugcgggacaguggcuaacggaguccugcaaaccuucaugcggauggccuggggcgggagcuacaucgcgcuugacucuggacgcggcaacugggauuguauuaugacguccuaccaguaucugaucauucagaauacaaccugggaggaccacugccaguuuagcagacccucuccuaucggguaccucggacugcuuucccaacggacacgcgauaucuauauuagcagacggcugcucggcaccuucaccuggacacuguccgacucugaaggcaaggauacgcccgggggauacugucugacccgcuggaugcucaucgaggccgagcugaaaugcuuuggcaacacagcuguggccaaguguaaugaaaaacaugacgaggaguucugcgauaugcuuagacuguuugacuucaacaagcaggcuauucagcggcucaaagccccugcgcagaugagcauccaacugauuaauaaggccgugaacgcucuuaucaaugaucagcugaucaugaagaaccaccuccgcgacauuauggggauccccuauugcaauuacuccaaauauuguuaccugaaccacaccacaaccggaagaacgagccugccuaagugcugucucgucucuaauggcuccuaccugaacgaaacacauuucagcgacgauauugaacagcaagccgacaauaugaucaccgagaugcuucagaaagaguauauggaacggcaggggaagaccccgcugggacucguugaucuguuuguguucucuaccagcuuuuaccugauuuccaucuuccuucaccucgugaaaauccccacacaucgccacauugucggcaagucuugcccuaaaccccauagacugaaccacaugggcaucuguagcugcgggcuguauaagcagccuggagugcccguuaaguggaaacggugaggacuaguuauaagacugacuagcccgaugggccucccaacgggcccuccuccccuccuugcaccgagauuaaucaaaggcucuuuucagagccaccaaaaaaaaaaaaaaaaaaaaaaaaaaaaaaaaaaaaaaaaaaaaaaaaaaaaaaaaaaaaaaaaagaauu

SEQ ID NO: 32838 - RNA, 1655 nt, Artificial Sequence
  mRNA product Design i-3 (hSL-A64-N5) comprising derived and/or modified sequence from LASV(LP;Clade I)__AAF86701__GPCmut7 (opt5)
aggagaaagcuuaccaugggccagaucauuaccuucuuucaagaggugccccacgucaucgaagagguuaugaacauugugcugaucgcccucagccugcuugcuauucugaaggggcucuacaauaucgccacaugcggaaucauuggccugguggcguuccuuuuucugugugggaaauccugcucucucacgcugaagggaggcuaugaacugcagacccucgagcugaacauggaaacacuuaauaugaccaugccucugagcuguaccaaaaacuccucucaucacuacaucagagucgggaaugagacaggacucgagcugacacuuaccaacacgagcauuaucaaucauaaguucugcaaccuguccgacgcucacaaaaagaaucucuaugaucaugcccugaugucuauuaucagcaccuuucaccuguccauuccgaacuucaaucaguacgaagccaugagcugugacuuuaacggcggcaagaucucugugcaguauaaucucucccacagcuacgcuggggaugccgcugagcauugcggaacaguugccaacggcgugcugcaaaccuucaugcggauggcguggggagggcgcuauaucgcccuugacucuggcaaagggaauugggauuguauuaugacauccuaccaguaccugaucauucagaacaccacgugggaagaccacugccaguuuagcagacccucuccuaucggauaucucggccugcuuucccaacggacacgcgauauuuacaucagcagacggcugcucggcaccuucacauggacccuguccgacucugaggggaacgagacccccggaggcuauugucugacacgcuggaugcucaucgaagcugagcugaagugcuuugggaauacggccgucgcuaaauguaacgaaaagcaugaugaggaguucugcgacaugcuuagacuguuugauuucaauaaacaggccauucggcgccucaaggcgccugcccagaugagcauccagcugauuaacaaggcugugaaugcccuuaucaacgaccaacugauuaugaaaaaucaccucagagauaucaugggaauccccuacugcaacuauuccaaguacuguuaucugaaucacaccagcucuggccggacaucccugccuaaaugcugucucauuagcaacgggucuuaccugaaugaaacccaguucagcgacgacaucgagcagcaagcugauaacaugauuacagaaaugcuucagaaggaguacaucgaacgccagggaaaaaccccgcugggccucguugacauuuuuaucuucuccacgucuuuuuaucugauuagcaucuuccugcaucuuaucaagauucccacacacagacauaucgugggcaaaccuugccccaagccucaccggcucaaucauaugggggucuguuccugcggacuguacaagcaccccggcgugccgaccaaauggaagcgcugaggacuaguuauaagacugacuagcccgaugggccucccaacgggcccuccuccccuccuugcaccgagauuaaucaaaggcucuuuucagagccaccaaaaaaaaaaaaaaaaaaaaaaaaaaaaaaaaaaaaaaaaaaaaaaaaaaaaaaaaaaaaaaaaagaauu

SEQ ID NO: 32839 - RNA, 1655 nt, Artificial Sequence
  mRNA product Design i-3 (hSL-A64-N5) comprising derived and/or modified sequence from LASV(803213;Clade II)__AAF86703__GPCmut7 (opt5)
aggagaaagcuuaccaugggccagaucauuaccuucuuucaagaggugccccacgucaucgaagagguuaugaacauugugcugaucgcccucagccugcuugcuauucugaaggggaucuacaauguggccacaugcggacucuucggccugaucuccuuucuucugcucugugggagaucuugcagcgucacguauaaaggaguguacgaacugcagacccuggagcucaacauggcgaaucugaacaugacaaugccucuuuccuguaccaagaauaacucucaucacuauauuaugguuggcaaugaaacagggcuggagcucacccugacaaacaccagcaucauuaaucauaaauucugcaaccuuuccgacgcucacaagaaaaaucuguacgaucaugcccucaugucuaucauuagcacguuucaccuguccaucccgaacuucaaucaguaugaggccaugagcugugacuuuaacggaggcaagauuucugugcaguacaaucugucccacagcuucgcugucgaugccgcuaaccauugcggcaccaucgccaacggggugcuccaaacauuuaugcggauggcguggggaggcucuuauaucgcccuggacuccgggaagggaaauugggauuguauuaugaccagcuaccaguaccuuaucauucagaacacaaccugggaagaccacugccaguucucucgccccuccccuaucggcuaucuggggcuccugagccaaagaacgcgggauauuuacaucucccgcagacuucugggaacauuuaccuggacacucucugacagcgagggcaaugaagcucccggcggguauugucugacccgguggaugcugaucgaggccgagcucaaaugcuucggaaacaccgcuguugccaaguguaaugaaaaacaugaugaggaauuuugcgacaugcugcgccuuuucgauuucaacaagcaggcgauuaaaagacugaagacgccugcccagauguccauccagcucauuaauaaggcugugaacgcccugaucaaugaccaacuuauuaugaaaaaccaucugcgggauaucaugggcauccccuacugcaauuauagccgcuacuguuaucucaaccacacagucaccgggaagacaucucugccuagaugcugucugguguccaauggaagcuaccucaacgagacccacuuuucugacgacauugaacagcaggcugauaauaugaucacagagaugcugcaaaaagaguacauggaccggcagggcaagaccccgcuugggcugguggaucucuucgucuuuagcacguccuucuaucugauuucuaucuuucugcaccuuguuaaaauucccacacaucgccacaucgugggaaagccuugccccaaaccucauagacucaaccacaugggcauuuguagcugcggccuguacaagcaccccggggugccggucaaguggaaacggugaggacuaguuauaagacugacuagcccgaugggccucccaacgggcccuccuccccuccuugcaccgagauuaaucaaaggcucuuuucagagccaccaaaaaaaaaaaaaaaaaaaaaaaaaaaaaaaaaaaaaaaaaaaaaaaaaaaaaaaaaaaaaaaaagaauu

SEQ ID NO: 32840 - RNA, 1655 nt, Artificial Sequence
  mRNA product Design i-3 (hSL-A64-N5) comprising derived and/or modified sequence from LASV(GA391;Clade III)__CAA36645__GPCmut7 (opt5)
aggagaaagcuuaccaugggccagaucgugaccuucuuucaagaggucccccacguuauugaagaggugaugaacaucgugcugauugcccucagcauccuggcuauucuuaaggggcuguacaaugucgccacaugcggacucaucggccuggugacguuccuucugcucuccgggagaucuuguagccugaucuauaaaggaaccuacgaacugcagacacucgagcugaacauggaaacccuuaauaugacaaugccucuguccugcaccaagaacaauucucaucacuauauucggguuggcaacgagacagggcucgagcugacccuuacgaauaccagcauccugaaccauaaauuuuguaaucucuccgacgcgcacaagcgcaaccuguacgaucauucucugaugagcauuaucuccacauuccaccucagcauuccgaauuuuaaccaguaugaagcuaugucuugcgacuucaauggaggcaaaaucaccgugcaguacaaccugucccacagcuuugccgucgaugccgcuggccauugugggacacuugccaauggagugcugcaaaccuucaugagaauggcuuggggcgggucuuauauugcccucgacuccggacggggcaacugggauugcaucaugacgagcuaccaguaccugaucauucagaacacaaccugggacgaucacugucaguuuucucgccccuccccuaucggguaucuuggacugcucagccaaagaacacgggacauuuacaucucccgcagacugcugggcaccuucaccuggacacucucugauagcgagggcaaugaaacgcccgggggauauugccugacccgguggaugcuuauugaggcggagcugaaguguuuuggcaacacagccguugcuaagugcaaugaaaaacaugacgaggaguucugugauaugcuccgccuguuugacuucaacaagcaggccaucagacggcuuaaaaccccugcucagauguccauccagcugauuaauaaggccgugaacgcgcucaucaaugaucaacugauuaugaaaaaccaucugcgcgacaucauggggauucccuacugcaauuauagcagauacugcuaucucaaccacacaucuaccggaaagacgucccugccucgguguugccuuaucagcaauggcucuuaccugaacgaaacaaaguucagcgacgauaucgaacagcaggccgacaauaugauuaccgagaugcuccaaaaagaguacaucgaucgccaggggaagaccccgcugggacuggucgaccuuuuuguguucuccacaucuuuuuaucucauuagcaucuuccugcaccuggugaaaauucccacccacagacauaucgucggcaagccuugucccaaaccucaccggcucaaccauaugggcauuugcuccugugggcuguacaagcagcccggaguuccggugagauggaaacgcugaggacuaguuauaagacugacuagcccgaugggccucccaacgggcccuccuccccuccuugcaccgagauuaaucaaaggcucuuuucagagccaccaaaaaaaaaaaaaaaaaaaaaaaaaaaaaaaaaaaaaaaaaaaaaaaaaaaaaaaaaaaaaaaaagaauu

SEQ ID NO: 32841 - RNA, 1658 nt, Artificial Sequence
  mRNA product Design i-3 (hSL-A64-N5) comprising derived and/or modified sequence from LASV(AV;Clade V)__CCA30314__GPCmut7 (opt5)
aggagaaagcuuaccaugggccagaucgugaccuucuuucaagaggucccccacguuauugaagaggugaugaacaucgugcugauugcccucagcauccuggcuguccuuaaggggcuguacaauauugccacaugcggacucaucggccugaucacguuccuucugcucugugggagauccugcucuagcaaccuguauaaaggaguguacgaacugcagucccucgaccugaauauggagacccuuaacaugacaaugccucugucuuguaccaagaauaacagccaucacuauauucggguuggcaaugauacagggcucgaacugacccuuacaaacaccuccauccugaaucauaaauuuugcaaccucucugacgcgcacaagaaagaucuguacgaccaugcucugaugagcauuaucuccacguuccaccucagcauuccgaauuuuaaccaguaugaggccaugucuugugauuucaauggaggcaagaucuccgugcaguacaaccugagccacucuuaugccauugacgcugccaaucauugcggcaccgucgcuaacgggauccuucaaacauuuaugcgcauggccuggggaggcuccuacaucgcgcuggauagcgggagaggaaacugggacuguauuaugaccucuuaccaguaucucaucauucagaauacaaccugggagaaccacugccaguucucccggcccagcccuaucggcuaccuggggcuucugucccaacgcacgagagauauuuauaucucucggcgccuccugggaacauuuaccuggacacugagcgacuccgaaggcaaugccacccccggcggguacugucucaccagauggaugcugaucgaggcugaacuuaagugcuucggaaacacagccguggcuaaauguaaugagaagcaugaugaggaauuuugcgacaugcugcgccucuucgauuuuaacaaacaggccauuagccggcugaagucuccugcgcagauguccauccagcuuauuaauaaagccguuaacgcucugaucaaugaccaacucauuaugaagaaccaccugagagacaucaugggcauccccuauugcaauuacagcaaguauuguuaccugaaccacacgauuaccgggaaaacaucucucccuaagugcugucuggugagcaauggauccuaccuuaacgagacccauuucucugaugacaucgaacagcaggccgauaauaugauuacagagaugcugcaaaaagaauauauggagcggcagggcaagaccccgcucgggcuggucgaccuguucguguuuagcacguccuucuaccuuaucagcauuuuucuccgccuggugaaaauccccacacacagacauauugucggaaagccuugccccaaaccucaccggcugaaccauaugggcaucuguucuugcggccucuauaagcagcccgggguuccggugcgcuggaagagaugaggacuaguuauaagacugacuagcccgaugggccucccaacgggcccuccuccccuccuugcaccgagauuaaucaaaggcucuuuucagagccaccaaaaaaaaaaaaaaaaaaaaaaaaaaaaaaaaaaaaaaaaaaaaaaaaaaaaaaaaaaaaaaaaagaauu

SEQ ID NO: 32842 - RNA, 1655 nt, Artificial Sequence
  mRNA product Design i-3 (hSL-A64-N5) comprising derived and/or modified sequence from LASV(Togo/2016/7082;Clade VI)__AMR44577__GPCmut7 (opt5)
aggagaaagcuuaccaugggccagaucauuaccuucuuucaagaggugccccacgucaucgaagagguuaugaacauugugcugaucgcccucagccugcuugcuauucugaaggggguguacaaugucgccacaugcggaaucaucggccucgugacguuccuguuucuuugugggagauccugcucucugauuuauaaaggaagcuacgaacuccagacccuggagcugaacauggaaacacucaauaugaccaugccucuguccuguacaaagaacucuagccaucacuauauccggguuggcaaugagaccgggcuugagcugacacucaccaacacguccauuaucaaucauaaauucugcaaccugucugacgcgcacaagcgcaaucuuuacgaucaugcucugaugagcauucucuccaccuuucaccugagcaucccgaacuucaaucaguaugaagccaugucuugugacuuuaacggaggcaaaauuuccgugcaguacaaucugagccacgccuaugcugucgaugccgcugagcauugcggcacaguggccaacgggguucuccaaaccuucaugagaauggcguggggaggcucuuacaucgcccuggacuccgggcggggaaauugggauuguaucaugacaagcuaccaguaucuuauuauccagaacaccacgugggaagaccacugccaguuuucucgccccuccccuauuggcuaccuggggcuccugagccaaagaacacgggauaucuauauuucccgcagacuucugggaaccuucacauggacccucucugacagcgagggcaacgagacccccggcggguacugucugacacgguggaugcugaucgaagcugagcucaagugcuuuggaaauacggccguggcuaaguguaacgaaaaacaugaugaggaguucugcgacaugcugcgccuuuuugauuucaauaagcaggccauccagagacugaaauccccugcgcagaugagcauucaacucaucaacaaggccgucaaugcucugauuaacgaccagcuuaucaugaaaaaucaucugcgggauaugaugggcauucccuauugcaacuacucuaaguauuguuaccucaaucacaccuccagcgggcgcacaucucugccuaagugcugucuggugagcaacggauccuaccucaaugaaacccacuucucugacgacaucgagcagcaagccgauaacaugaucacagaaaugcugcagaaagaguauauugacagacagggcaagaccccgcuugggcugguggaucucuuugucuucagcacguccuuuuaccugaucagcauuuuccugcaccuuaucaaaauucccacacaucggcacaucguuggaaagccuugccccaaaccucaucgccucaaucacaugggcauuuguucuugcggccuguauaagcagcccggggugccgaccagauggaaacggugaggacuaguuauaagacugacuagcccgaugggccucccaacgggcccuccuccccuccuugcaccgagauuaaucaaaggcucuuuucagagccaccaaaaaaaaaaaaaaaaaaaaaaaaaaaaaaaaaaaaaaaaaaaaaaaaaaaaaaaaaaaaaaaaagaauu

SEQ ID NO: 32843 - RNA, 1655 nt, Artificial Sequence
  mRNA product Design i-3 (hSL-A64-N5) comprising derived and/or modified sequence from LASV(KAK-428;Clade n.d. (VII))__ANH09740__GPCmut7 (opt5)
aggagaaagcuuaccaugggccagaucgugaccuucuuucaagaggucccccacguuauugaagaggugaugaacaucgugcugauugcccucagccugcuugcuauccugaaggggcucuacaauuucgccacaugcggagucauuggccugaucacguuucuucugcucugugggagauccugcucugcgaccuauaaaggacaguacgaacugcagacacuggagcucaacauggaaagccugaauaugaccaugccucuuuccuguacaaagaacaauucucaucacuauauccgggcuggcaacaauaccgggcuggagcucacacugaccaacacgagcauuaucucccauaaauucugcaaucuuucugacgcccacaagaaaaaccuguacgaucauacccucaugagcauuaucacaaccuuucaccuguccauuccgaauuucaaccaguaugaggccaugagcugugacuuuaauggaggcaagaucucuauucaauacaaccugucccacagcuaugcuggcgaugccgcucagcauugcgggacaguggccaauggaguucuccagaccuucaugcgcauggcguggggcgggucuuaccuggcccuugacuccggaagacggggcugggauuguaucaucagcucuuaccaguaucugauuauccaaaacacgacaugggacgaucacugccaguuuucccgccccagcccuauuggguaccucggauucgugucccagaagaccagagacaucuauauuucucggcgccugcuuggcacauuuaccuggacccugagcgauuccgaaggccaugacaugcccgggggauacugucucacaagauggaugcugaucgaggcugaucugaaaugcuucggcaacacggccgucgcuaaguguaaugaaaaacacgacgaggaguuuugcgauauguggcgccucuucgacuucaacaagcaggccauccaacggcugaaagcgccugcccagaugaauauucagcuuaucaacaaggcugugaaugcccugauuaacgaccaacucaugaugaagaaucaccugagagauaucauggggauucccuauugcaacuacagcaaauuuuguuaucuuaauaacaccacaaccggacggacaucucugccucgcugcugucucaucuccaauggcagcuaccugaacgaaacccauuucucugacgauaucgagcagcaggcugacaauaugauuacggaaaugcugcagaaggaguacauggauagacaagggaaaacaccgcucggacugguugaccuuuuuguguucagcaccuccuuuuaucugaucaccauuuuccuccaccuggucaagauccccacacaucggcacauugugggcaaaccuugccccaagccucaucgccugaaccacaugggcaucuguucuugcgggcuuuacaaacagcccggagugccggucagauggaagcggugaggacuaguuauaagacugacuagcccgaugggccucccaacgggcccuccuccccuccuugcaccgagauuaaucaaaggcucuuuucagagccaccaaaaaaaaaaaaaaaaaaaaaaaaaaaaaaaaaaaaaaaaaaaaaaaaaaaaaaaaaaaaaaaaagaauu

SEQ ID NO: 32844 - RNA, 1655 nt, Artificial Sequence; identical to SEQ ID NO: 32838
  mRNA product Design i-3 (hSL-A64-N5) comprising derived and/or modified sequence from LASV(Pinneo-NIG-1969;Clade I)__AIT17836__GPCmut7 (opt5)

SEQ ID NO: 32845 - RNA, 1655 nt, Artificial Sequence
  mRNA product Design i-3 (hSL-A64-N5) comprising derived and/or modified sequence from LASV(ISTH0009-NIG-2011;Clade II)__AIT17404__GPCmut7 (opt5)
aggagaaagcuuaccaugggccagaucauuaccuucuuucaagaggugccccacgucaucgaagagguuaugaacauugugcugaucgcccucagccugcuugcuauucugaaggggaucuacaauguggccacaugcggacucuucggccuggucuccuuucuucugcucugugggagaucuugcagcacgaccuauaaaggaguguacgaacugcagacacuggagcucgacauggcgucccugaacaugaccaugccucuuucuuguacaaagaauaacagccaucacuauaucaugguuggcaaugaaaccgggcuggagcucacacugaccaacacguccauuaucaaucauaaauucugcaaccuuucugaugcucacaagaaaaaucuguacgaccaugcccucaugagcauuaucuccaccuuucaccugagcauuccgaacuucaaucaguaugaggccaugucuugugauuuuaacggaggcaagaucuccgugcaguacaaucugagccacgcuuaugccgucgacgcugccaaccauugcggcacaauugcgaauggggugcuccaaaccuucaugcggauggccuggggaggcucuuacaucgcucuggauuccgggaagggaagcugggacuguaucaugacaucuuaccaguaucuuauuauccagaacaccacgugggaagaucacugccaguuuucccgccccagcccuauuggcuaccuggggcuccugucccaaagaacacgggacaucuauauuucucgcagacuucugggaaccuucacauggacccucagcgauuccgagggcaacgaaacccccggcggguacugucugacacgguggaugcugaucgaggccgagcucaaaugcuuuggaaauacggcuguugccaaguguaacgaaaaacaugacgaggaguucugcgauaugcugcgccuuuuugacuucaauaagcaggcgaucagacggcugaaaaccccugcccagaugagcauucagcucaucaacaaggcugugaaugcccugauuaacgaucaacuuaucaugaagaaucaucugcgcgacauuaugggcauccccuauugcaacuacucuaaauauuguuaccucaaucacacagucaccgggaagacaucccugccuagaugcugucuggugagcaacggaucuuaccucaaugaaacccacuucagcgacgauaucgaacagcaggcugacaacaugauuacggagcugcuucaaaaagaguauauggaucggcagggcaagacaccgcuggggcucguggaccuguuugucuucuccaccucuuuuuaccugaucagcauuuuccuucaccucaucaaaauucccacccaucgccacaucacaggaaagccuugccccaaaccucauagacugaaucacaugggcauuuguuccugcggccuguauaagcaccccgggguuccggugaaguggaaacggugaggacuaguuauaagacugacuagcccgaugggccucccaacgggcccuccuccccuccuugcaccgagauuaaucaaaggcucuuuucagagccaccaaaaaaaaaaaaaaaaaaaaaaaaaaaaaaaaaaaaaaaaaaaaaaaaaaaaaaaaaaaaaaaaagaauu

SEQ ID NO: 32846 - RNA, 1655 nt, Artificial Sequence
  mRNA product Design i-3 (hSL-A64-N5) comprising derived and/or modified sequence from LASV(ISTH2010-NIG-2012;Clade II)__AIT17482__GPCmut7 (opt5)
aggagaaagcuuaccaugggccagaucauuaccuucuuucaagaggugccccacgucaucgaagagguuaugaacauugugcugaucgcccucagccugcuugcuauucugaaggggaucuacaauguggccacaugcggacucuucggccuggucuccuuucuucugcucugugggagaucuugcagcacgaccuauaaaggaguguacgaacugcagacacuggagcucgacauggcgucccugaacaugaccaugccucuuucuuguacaaagaauaacagccaucacuauaucaugguuggcaaugaaaccgggcuggagcucacacugaccaacacguccauuaucaaucauaaauucugcaaccuuucugaugcucacaagaaaaaucuguacgaccaugcccucaugagcauuaucuccaccuuucaccugagcauuccgaacuucaaucaguaugaggccaugucuugugauuuuaacggaggcaagaucuccgugcaguacaaucugagccacgcuuaugccgucgacgcugccaaccauugcggcacaauugcgaauggggugcuccaaaccuucaugcggauggccuggggaggcucuuacaucgcucuggauuccgggaagggaagcugggacuguaucaugacaucuuaccaguaucuuauuauccagaacauuaccugggaagaucacugccaguuuucccgccccagcccuaucggcuaccuggggcuccugucccaaagaacgcgggacauuuauaucucucgcagacuucugggaacauucaccuggacacucagcgauuccgagggcaacgaaacccccggcggguacugucugacccgguggaugcugaucgaggccgagcucaaaugcuuuggaaauacagcuguugccaaguguaacgaaaaacaugacgaggaguucugcgauaugcugcgccuuuuugacuucaauaagcaggcgauuagacggcugaaaacgccugcccagaugagcauccagcucauuaacaaggcugugaaugcccugaucaacgaucaacuuauuaugaagaaucaucugcgcgacaucaugggcauccccuauugcaacuacucuaaauauuguuaccucaaucacaccgucacagggaagaccucccugccuagaugcugucuggugagcaacggaucuuaccucaaugaaacacacuucagcgacgauauugaacagcaggcugacaacaugaucaccgagcugcuucaaaaagaguauauugaucggcagggcaagacgccgcuggggcucguggaccuguuugucuucuccacaucuuuuuaccugaucagcauuuuccuucaccucguuaaaauccccacccaucgccacguggugggaaagccuugccccaaaccucauagacugaaucacaugggcauuuguuccugcggccuguauaagcaccccggggucccggugaaguggaaacggugaggacuaguuauaagacugacuagcccgaugggccucccaacgggcccuccuccccuccuugcaccgagauuaaucaaaggcucuuuucagagccaccaaaaaaaaaaaaaaaaaaaaaaaaaaaaaaaaaaaaaaaaaaaaaaaaaaaaaaaaaaaaaaaaagaauu

SEQ ID NO: 32847 - RNA, 1655 nt, Artificial Sequence
  mRNA product Design i-3 (hSL-A64-N5) comprising derived and/or modified sequence from LASV(Lassa virus/H.sapiens-wt/NGA/2015/ISTH_0543;Clade II)__AVO03639__GPCmut7 (opt5)
aggagaaagcuuaccaugggccagaucauuaccuucuuucaagaggugccccacgucaucgaagagguuaugaacauugugcugaucgcccucagccugcuugcuauucugaaggggaucuacaauguggccacaugcggacucuucggccuggucuccuuucuucugcucugugggagaucuugcagcacgaccuauaaaggaguguacgaacugcagacacuggagcucgacauggcgaaccugaauaugaccaugccucuuuccuguacaaagaacaauucucaucacuauaucaugguuggcaacgaaaccgggcuggagcucacacugaccaauacgagcauuaucaaccauaaauucugcaaucuuuccgaugcucacaagaaaaaccuguacgaccaugcccucaugucuauuaucagcaccuuucaccuguccauuccgaauuucaaccaguaugaggccaugagcugugauuuuaauggaggcaagaucucugugcaguacaaccugucccacacauaugcugucgacgccgcuaaucauugcggcaccauugccaacggggugcuccaaacauucaugcggauggcguggggaggcagcuacaucgcccuggauucugggaagggauccugggacuguaucaugaccagcuaccaguaucuuguuauucagaacacgacaugggaagaucacugccaguuuucucgccccuccccuaucggcuaccuggggcuccugagccaaagaacccgggacauuuauaucucccgcagacuucugggaacauucaccuggacccucucugauagcgagggcaaugaaacacccggcggguacugucugacgcgguggaugcugauugaggcugagcucaaaugcuuuggaaacaccgccguggcuaaguguaaugaaaaacaugacgaggaguucugcgauaugcugcgccuuuuugacuucaacaagcaggccaucagacggcugaaaaccccugcgcagauguccauccagcucauuaauaaggccgucaacgcucugaucaaugaucaacuuauuaugaagaaccaucugcgcgacaucaugggcauucccuauugcaauuacagcaaauauuguuaccucaaccacacagugacagggaagaccucucugccuagaugcugucugguguccaauggaagcuaccucaacgaaacgcacuucucugacgauaucgaacagcaggccgacaauaugaucacagagcugcuucaaaaagaguauauugaucggcagggcaagaccccgcuggggcucgucgaccuguuuguuuucagcaccuccuuuuaccugaucucuauuuuccuucaccucgugaaaauccccacacaucgccacauuaccggaaagccuugccccaaaccucauagacugaaccacaugggcaucuguagcugcggccuguauaagcaccccggggugccggucaaguggaaacggugaggacuaguuauaagacugacuagcccgaugggccucccaacgggcccuccuccccuccuugcaccgagauuaaucaaaggcucuuuucagagccaccaaaaaaaaaaaaaaaaaaaaaaaaaaaaaaaaaaaaaaaaaaaaaaaaaaaaaaaaaaaaaaaaagaauu

SEQ ID NO: 32848 - RNA, 1655 nt, Artificial Sequence
  mRNA product Design i-3 (hSL-A64-N5) comprising derived and/or modified sequence from LASV(Lassa virus/H.sapiens-wt/NGA/2016/ISTH_0009;Clade II)__AVO03571__GPCmut7 (opt5)
aggagaaagcuuaccaugggccagaucauuaccuucuuucaagaggugccccacgucaucgaagagguuaugaacauugugcugaucgcccucagccugcuugcuauucugaaggggaucuacaauguggccacaugcggacuccugggccuugucuccuuccugcuccugugugggagaucuugcagcacgaccuauaaaggaguguacgaacugcagacacucgagcuggacauggcgucccuuaacaugaccaugccucugucuuguacaaagaauaacagccaucacuauaucaugguuggcaaugaaaccgggcucgagcugacacuuaccaacacguccauuaucaaucauaaauuuugcaaccugucugaugcucacaagaaaaaucucuacgaccaugcccugaugagcauuaucuccaccuuccaccugagcauuccgaacuuuaaucaguaugaggccaugucuugugauuucaacggaggccggaucuccgugcaguacaaucucagccacucuuaugcugucgacgccgcuaaccauugcggcacaauugccaauggggugcugcaaaccuuuaugcgcauggcguggggaggcuccuacaucgcccuugauagcgggaagggaucuugggacuguaucaugacauccuaccaguaucugauuauccagaacaccacgugggaagaucacugccaguucagcagacccuccccuauuggcuaccucgggcugcuuucucaacggacacgcgacaucuauauuagcagacggcugcucggaaccuuuacauggacccuguccgauagcgagggcaacgaaacccccggcggguacugucugacacgcuggaugcucaucgaggcugagcugaagugcuucggaaauacggccguugcuaaauguaacgaaaagcaugacgaggaauuuugcgauaugcuuagacuguucgacuuuaauaaacaggccauccggcgccucaagaccccugcgcagaugucuauucagcugaucaacaaagccgugaaugcucuuauuaacgaucaacugaucaugaagaaucaccucagagacauuaugggcauccccuauugcaacuacuccaaguauuguuaccugaaucacacagucaccgggaaaacaagccugccucggugcugucucgugucuaacggaagcuaccugaaugagacccauuucuccgacgauaucgaacagcaggccgacaacaugauuacggagcuucugcaaaaggaguauaucgaucgccagggcaaaacaccgcucgggcugguggaccuguucgucuuuucuaccagcuucuaccuuauuuccaucuuucuccaccugguuaagauucccacccauagacacaucacaggaaaaccuugccccaagccucaucggcugaaucacaugggcauuuguagcugcggccucuauaaccaccccggggugccggugaaauggaagcgcugaggacuaguuauaagacugacuagcccgaugggccucccaacgggcccuccuccccuccuugcaccgagauuaaucaaaggcucuuuucagagccaccaaaaaaaaaaaaaaaaaaaaaaaaaaaaaaaaaaaaaaaaaaaaaaaaaaaaaaaaaaaaaaaaagaauu

SEQ ID NO: 32849 - RNA, 1655 nt, Artificial Sequence
  mRNA product Design i-3 (hSL-A64-N5) comprising derived and/or modified sequence from LASV(Lassa virus/H.sapiens-wt/NGA/2016/ISTH_0017;Clade II)__AVO03567__GPCmut7 (opt5)
aggagaaagcuuaccaugggccagaucauuaccuucuuucaagaggugccccacgucaucgaagagguuaugaacauugugcugaucgcccucagccugcuugcuauucugaaggggaucuacaauguggccacaugcggacucuucggccuggucuccuuucuucugcucugugggagaucuugcagcacgaccuauaaaggaguguacgaacugcagacacuggagcucgacauggcgucccugaacaugaccaugccucuuucuuguacaaagaauaacagccaucacuauaucaugguuggcaaugaaaccgggcuggagcucacacugaccaacacguccauuaucaaucauaaauucugcaaccuuucugaugcucacaagaaaaaucuguacgaccaugcccucaugagcauuaucuccaccuuucaccugagcauuccgaacuucaaucaguaugaggccaugucuugugauuuuaacggaggcaagaucuccgugcaguacaaucugagccacacauaugcuauugacgccgcuaaccauugcggcaccaucgccaaugggguccuccaaacauucaugcggauggcguggggaggcucuuacaucgcccuggauuccgggaagggaagcugggacuguauuaugaccucuuaccaguaucuuaucauucagaacacgacaugggaagaucacugccaguuuucccgccccagcccuaucggcuaccuggggcuccugucccaaagaacccgggacauuuauaucucucgcagacuucugggaacauucaccuggacccucagcgauuccgagggcaacgaaacacccggcggguacugucugacgcgguggaugcugaucgaggcugagcucaaaugcuuuggaaauaccgccguggcuaaguguaacgaaaaacaugacgaggaguucugcgauaugcugcgccuuuuugacuucaauaagcaggccauuagacggcugaaaaccccugcgcagaugagcauccagcucauuaacaaggccguuaaugcucugaucaacgaucaacuuauuaugaagaaucaucugcgcgacaucaugggcauccccuauugcaacuacucuaaauauuguuaccucaaucacacagugacagggaagaccucccugccuagaugcugucuggucagcaacggaucuuaccucaaugaaacgcacuucagcgacgauauugaacagcaggccgacaacaugaucacagagcugcuucaaaaagaguauauggaucggcagggcaagaccccgcuggggcucguggaccuguuuguguucuccaccucuuuuuaccugauuagcaucuuccuucaccucguccgcauucccacacauagacacguuaucggaaaaccuugccccaagccucaucggcugaaucacaugggcauuuguuccugcggccuguauaaacaccccggggugccggugaaguggaagcgcugaggacuaguuauaagacugacuagcccgaugggccucccaacgggcccuccuccccuccuugcaccgagauuaaucaaaggcucuuuucagagccaccaaaaaaaaaaaaaaaaaaaaaaaaaaaaaaaaaaaaaaaaaaaaaaaaaaaaaaaaaaaaaaaaagaauu

SEQ ID NO: 32850 - RNA, 1655 nt, Artificial Sequence
  mRNA product Design i-3 (hSL-A64-N5) comprising derived and/or modified sequence from LASV(Lassa virus/H.sapiens-wt/NGA/2018/ISTH_0959;Clade II)__AVV65099__GPCmut7 (opt5)
aggagaaagcuuaccaugggccagaucauuaccuucuuucaagaggugccccacgucaucgaagagguuaugaacauugugcugaucgcccucagccugcuugcuauucugaaggggaucuacaauguggucacaugcggacucuucggccugguguccuuucuucugcucugugggagaucuugcagcacgaccuauaaaggaguuuacgaacugcagacacuggagcucgacauggccucccugaacaugaccaugccucuuucuuguacaaagaauaacagccaucacuauaucauggugggcaaugaaaccgggcuggagcucacacugaccaacacguccauuaucaaucauaaauucugcaaccuuucugaugcgcacaagaaaaaucuguacgaccaugcucucaugagcauuaucuccaccuuucaccugagcauuccgaacuucaaucaguaugaggccaugucuugugauuuuaacggaggcaagaucuccguccaguacaaucugagccacgccuaugcuauugacgccgcuaaccauugcggcacaaucgccaauggggugcuccaaaccuucaugcggauggcguggggaggcucuuacaucgcccuggauuccgggaagggaagcugggacuguauuaugacaucuuaccaguaucuuaucauucagaacaccacgugggaagaucacugccaguuuucccgccccagcccuaucggcuaccuggggcuccugucccaaagaacacgggacauuuauaucucucgcagacuucugggaaccuucacauggacccucagcgauuccgagggcaacgaaacccccggcggguacugucugacacgguggaugcugaucgaggcugagcucaaaugcuuuggaaauacggccguugcuaaguguaacgaaaaacaugacgaggaguucugcgauaugcugcgccuuuuugacuucaauaagcaggccauuagacggcugaaaaccccugcgcagaugagcauccagcucauuaacaaggccgugaaugcucugaucaacgaucaacuuauuaugaagaaucaucugcgcgacaucaugggcauccccuauugcaacuacucuaaauauuguuaccucaaucacacagucaccgggaagacaucccugccuagaugcugucuggugagcaacggaucuuaccucaaugaaacccacuucagcgacgauauugaacagcaggccgacaacaugaucacggagcugcuucaaaaagaguauauugaucggcagggcaagacaccgcuggggcucguggaccuguuugucuucuccaccucuuuuuaccugaucagcauuuuccuucaccucguuaaaauccccacccaucgccacgugauuggaaagccuugccccaaaccucauagacugaaucacaugggcaucuguuccugcggccuguauaagcaccccggggugccggucaaguggaaacggugaggacuaguuauaagacugacuagcccgaugggccucccaacgggcccuccuccccuccuugcaccgagauuaaucaaaggcucuuuucagagccaccaaaaaaaaaaaaaaaaaaaaaaaaaaaaaaaaaaaaaaaaaaaaaaaaaaaaaaaaaaaaaaaaagaauu

SEQ ID NO: 32851 - RNA, 1655 nt, Artificial Sequence
  mRNA product Design i-3 (hSL-A64-N5) comprising derived and/or modified sequence from LASV(LASV003-NIG-2008;Clade II)__AIT17580__GPCmut7 (opt5)
aggagaaagcuuaccaugggccagaucauuaccuucuuucaagaggugccccacgucaucgaagagguuaugaacauugugcugaucgcccucagccugcuugcuauucugaaggggaucuacaauguggccacaugcggacucuucggccuggucuccuuucuucugcucugugggagaucuugcagcacgaccuauaaaggaguguacgaacugcagacacuggagcucgacauggcgucccugaacaugaccaugccucuuucuuguacaaagaauaacagccaucacuauaucaugguuggcaaugaaaccgggcuggagcucacacugaccaacacguccauuaucaaucauaaauucugcaaccuuucugaugcucacaagaaaaaucuguacgaccaugcccucaugagcauuaucuccaccuuucaccugagcauuccgaacuucaaucaguaugaggccaugucuugugauuuuaacggaggcaagaucuccgugcaguacaaucugagccacacauaugcugucgacgccgcuaaccauugcggcaccauugccaauggggugcuccaaacauucaugcggauggcguggggaggcucuuacaucgcccuggauuccgggaagggaagcugggacuguaucaugaccucuuaccaguaucuuauuauccagaacacgacaugggaagaucacugccaguuuucccgccccagcccuauuggcuaccuggggcuccugucccaaagaacccgggacaucuauauuucucgcagacuucugggaacauucaccuggacccucagcgauuccgagagcaacgaaacacccggcggcuacugucugacgcgguggaugcugaucgaggcugagcucaaaugcuuugggaauaccgccguugcuaaguguaacgaaaaacaugacgaggaguucugcgauaugcugcgccuuuuugacuucaauaagcaggccaucagacggcugaaagcgccugcccagaugucuauucagcucaucaacaaggcugugaaugcccugauuaacgaucaacuuaucaugaagaaucaucugcgcgacauuaugggaauccccuauugcaacuacuccaaauauuguuaccucaaucacacagucaccggcagaacaagccugccucggugcugucuggugucuaacgggagcuaccucaaugaaacccacuucuccgacgauaucgaacagcaggcugacaacaugauuacggagcugcuucaaaaggaguauauggaucgccagggaaaaacaccgcugggccucguggaccuguuugucuucucuaccagcuuuuaccugaucuccauuuuccuucaccucguuaagauccccacccauagacacgugauugggaaaccuugccccaagccucaucggcugaaucacaugggaaucuguagcugcggccuguauaaacaccccggcgugccggucaaguggaagcgcugaggacuaguuauaagacugacuagcccgaugggccucccaacgggcccuccuccccuccuugcaccgagauuaaucaaaggcucuuuucagagccaccaaaaaaaaaaaaaaaaaaaaaaaaaaaaaaaaaaaaaaaaaaaaaaaaaaaaaaaaaaaaaaaaagaauu

SEQ ID NO: 32852 - RNA, 1655 nt, Artificial Sequence
  mRNA product Design i-3 (hSL-A64-N5) comprising derived and/or modified sequence from LASV(LASV035-NIG-2009;Clade II)__AIT17588__GPCmut7 (opt5)
aggagaaagcuuaccaugggccagaucauuaccuucuuucaagaggugccccacgucaucgaagagguuaugaacauugugcugaucgcccucagccugcuugcuauucugaaggggaucuacaauguggccacaugcggacucuucggccuggucuccuuucuucugcucugugggagaucuugcagcacgaccuauaaaggaguguacgaacugcagacacuggagcucgacauggcgucccugaacaugaccaugccucuuucuuguacaaagaauaacagccaucacuauaucaugguuggcaaugaaaccgggcuggagcucacacugaccaacacguccauuaucaaucauaaauucugcaaccuuucugaugcucacaagaaaaaucuguacgaccaugcccucaugagcauuaucuccaccuuucaccugagcauuccgaacuucaaucaguaugaggccaugucuugugauuuuaacggaggcaagaucuccgugcaguacaaucugagccacgcuuaugccgucgacgcugccaaccauugcggcacaauugcgaauggggugcuccaaaccuucaugcggauggccuggggaggcucuuacaucgcucuggauuccgggaagggaagcugggacuguaucaugacaucuuaccaguaucuuauuauccagaacaccacgugggaagaucacugccaguuuucccgccccagcccuauuggcuaccuggggcuccugucccaaagaacacgggacaucuauauuucucgcagacuucugggaaccuucacauggacccucagcgauuccgagggcaacgaaacccccggcggguacugucugacacgguggaugcugaucgaggccgagcucaaaugcuuuggaaauacggcuguugccaaguguaacgaaaaacaugacgaggaguucugcgauaugcugcgccuuuuugacuucaauaagcaggcgaucagacggcugaaagccccugcucagaugagcauucagcucaucaacaaggccgugaaugcucugauuaacgaucaacuuaucaugaagaaucaucugcgcgacauuaugggcauccccuauugcaacuacucuaaauauuguuaccucaaucacaccgucacagggaagaccucccugccuagaugcugucuggugagcaacggaucuuaccucaaugaaacacacuucagcgacgauaucgaacagcaggccgacaacaugauuaccgagcugcuucaaaaagaguauaucgaucggcagggcaagacgccgcuggggcucguggaccuguuugucuucuccacaucuuuuuaccugauuagcaucuuccuucaccucguuaaaauucccacccaucgccacgugaucggaaagccuugccccaaaccucauagacugaaucacaugggcauuuguuccugcggccuguauaagcaccccggggugccggucaaguggaaacggugaggacuaguuauaagacugacuagcccgaugggccucccaacgggcccuccuccccuccuugcaccgagauuaaucaaaggcucuuuucagagccaccaaaaaaaaaaaaaaaaaaaaaaaaaaaaaaaaaaaaaaaaaaaaaaaaaaaaaaaaaaaaaaaaagaauu

SEQ ID NO: 32853 - RNA, 1655 nt, Artificial Sequence
  mRNA product Design i-3 (hSL-A64-N5) comprising derived and/or modified sequence from LASV(LASV1000-NIG-2009;Clade II)__AIT17782__GPCmut7 (opt5)
aggagaaagcuuaccaugggccagaucauuaccuucuuucaagaggugccccacgucaucgaagagguuaugaacauugugcugaucgcccucagccugcuugcuauucugaaggggaucuacaauguggccacaugcggacucuucggccuggucuccuuucuucugcucugugggagaucuugcagcacgaccuauaaaggaguguacgaacugcagacacuggagcucgacauggcgucccugaacaugaccaugccucuuucuuguacaaagaauaacagccaucacuauaucaugguuggcaaugaaaccgggcuggagcucacacugaccaacacguccauuaucaaucauaaauucugcaaccuuucugaugcucacaagaaaaaucuguacgaccaugcccucaugagcauuaucuccaccuuucaccugagcauuccgaacuucaaucaguaugaggccaugucuugugauuuuaacggaggcaagaucuccgugcaguacaaucugagccacacauaugcugucgacgccgcuaaccauugcggcaccauugccaauggggugcuccaaacauucaugcggauggcguggggaggcucuuacaucgcccuggauuccgggaagggaagcugggacuguaucaugaccucuuaccaguaucuuauuauccagaacacgacaugggaagaucacugccaguuuucccgccccagcccuauuggcuaccuggggcuccugucccaaagaacccgggacaucuauauuucucgcagacuucugggaacauucaccuggacccucagcgauuccgagggcaacgaaacacccggcggguacugucugacgcgguggaugcugaucgaggcugagcucaaaugcuuuggaaauaccgccguugcuaaguguaacgaaaaacaugacgaggaguucugcgauaugcugcgccuuuuugacuucaauaagcaggccaucaaaagacugaagaccccugcgcagaugagcauucagcucaucaacaaggccgugaaugcucugauuaacgaucaacuuaucaugaaaaaucaucugcgggacauuaugggcauccccuauugcaacuacucuaaguauuguuaccucaaucacacagucacagggaaaaccucccugccucgcugcugucuggugagcaacggaucuuaccucaaugaaacgcacuucagcgacgauaucgaacagcaggccgacaacaugauuacagagcugcuucaaaaggaguauaucgauagacagggcaaaaccccgcuggggcucguggaccuguuugucuucuccaccucuuuuuaccugauuagcaucuuccuucaccucguuaagauucccacacaucggcacguggugggaaaaccuugccccaagccucaucgccugaaucacaugggcaucuguuccugcggccuguauaagcaccccggggucccggugaaauggaagagaugaggacuaguuauaagacugacuagcccgaugggccucccaacgggcccuccuccccuccuugcaccgagauuaaucaaaggcucuuuucagagccaccaaaaaaaaaaaaaaaaaaaaaaaaaaaaaaaaaaaaaaaaaaaaaaaaaaaaaaaaaaaaaaaaagaauu

SEQ ID NO: 32854 - RNA, 1655 nt, Artificial Sequence
  mRNA product Design i-3 (hSL-A64-N5) comprising derived and/or modified sequence from LASV(LASV221-NIG-2010;Clade II)__AIT17624__GPCmut7 (opt5)
aggagaaagcuuaccaugggccagaucauuaccuucuuucaagaggugccccacgucaucgaagagguuaugaacauugugcugaucgcccucagccugcuugcuauucugaaggggaucuacaauguggccacaugcggacucuucggccuggucuccuuucuucugcucugugggagaucuugcagcacgaccuauaaaggaguguacgaacugcagacacuggagcucgacauggcgucccugaacaugaccaugccucuuucuuguacaaagaauaacagccaucacuauaucaugguuggcaaugaaaccgggcuggagcucacacugaccaacacguccauuaucaaucauaaauucugcaaccuuucugaugcucacaagaaaaaucuguacgaccaugcccucaugagcauuaucuccaccuuucaccugagcauuccgaacuucaaucaguaugaggccaugucuugugauuuuaacggaggcaagaucuccgugcaguacaaucugagccacacauaugcuauugacgccgcuaaccauugcggcaccaucgccaaugggguccuccaaacauucaugcggauggcguggggaggcucuuacaucgcccuggauuccgggaagggaagcugggacuguauuaugaccucuuaccaguaucuuaucauucagaacacgacaugggaagaucacugccaguuuucccgccccagcccuaucggcuaccuggggcuccugucccaaagaacccgggacauuuauaucucucgcagacuucugggaacauucaccuggacccucagcgauuccgagggcaacgaaacacccggcggguacugucugacgcgguggaugcugaucgaggcugagcucaaaugcuuuggaaauaccgccguggcuaaguguaacgaaaaacaugacgaggaguucugcgauaugcugcgccuuuuugacuucaauaagcaggccauuagacggcugaaaaccccugcgcagaugagcauccagcucauuaacaaggccguuaaugcucugaucaacgaucaacuuauuaugaagaaucaucugcgcgacaucaugggcauccccuauugcaacuacucuaaauauuguuaccucaaucacacagugacagggaagaccucccugccuagaugcugucuggucagcaacggaucuuaccucaaugaaacgcacuucagcgacgauauugaacagcaggccgacaacaugaucacagagaugcugcaaaaagaguauauggaucggcagggcaagaccccgcuugggcugguggaccucuuuguguucuccaccucuuuuuaccugauuagcaucuuccugcaccuugucaaaauucccacacaucgccacguuaucggaaagccuugccccaaaccucauagacucaaucacaugggcauuuguuccugcggccuguauaagcaccccggggugccggugaaguggaaacggugaggacuaguuauaagacugacuagcccgaugggccucccaacgggcccuccuccccuccuugcaccgagauuaaucaaaggcucuuuucagagccaccaaaaaaaaaaaaaaaaaaaaaaaaaaaaaaaaaaaaaaaaaaaaaaaaaaaaaaaaaaaaaaaaagaauu

SEQ ID NO: 32855 - RNA, 1655 nt, Artificial Sequence
  mRNA product Design i-3 (hSL-A64-N5) comprising derived and/or modified sequence from LASV(LASV237-NIG-2010;Clade II)__AIT17638__GPCmut7 (opt5)
aggagaaagcuuaccaugggccagaucauuaccuucuuucaagaggugccccacgucaucgaagagguuaugaacauugugcugaucgcccucagccugcuugcuauucugaaggggaucuacaauguggccacaugcggacucuucggccuggucuccuuucuucugcucugugggagaucuugcagcacgaccuauaaaggaguguacgaacugcagacacuggagcucgacauggcgucccugaacaugaccaugccucuuucuuguacaaagaauaacagccaucacuauaucaugguuggcaaugaaaccgggcuggagcucacacugaccaacacguccauuaucaaucauaaauucugcaaccuuucugaugcucacaagaaagaccuguacgaucaugcccucaugagcauuaucuccaccuuucaccugagcauuccgaauuucaaccaguaugaggccaugucuugugacuuuaauggaggcaagaucuccgugcaguacaaccugagccacacauaugcugucgaugccgcuaaucauugcggcaccauugccaacggggugcuccaaacauucaugcggauggcguggggaggcucuuacaucgcccuggacuccgggaagggaagcugggauuguaucaugaccucuuaccaguaucuuauuauccagaauacgacaugggaagaccacugccaguuuucccgccccagcccuauuggcuaccuggggcuccugucccaaagaacccgggauaucuauauuucucgcagacuucugggaacauucaccuggacccucagcgacuccgagggcaacgaaacacccggcggguacugucugacgcgguggaugcugaucgaggcugagcucaaaugcuuuggaaacaccgccguugcuaaguguaaugaaaaacaugaugaggaguucugcgacaugcugcgccuuuuugauuucaacaagcaggccaucagacggcugaaaaccccugcgcagaugagcauucagcucaucaauaaggccgugaacgcucugauuaaugaccaacuuaucaugaagaaccaucugcgcgacauuaugggcauccccuauugcaauuacucuaaauauuguuaccucaaccacacagucacagggaagaccucccugccuagaugcugucuggugagcaauggaucuuaccucaacgaaacgcacuucagcgaugacaucgaacagcaggccgauaauaugauuacagagcugcuucaaaaagaguauauggaccggcagggcaagaccccgcuggggcucguggaucuguuugucuucuccaccucuuuuuaccugaucagcauuuuccuucaccucaucaaaauucccacacaucgccacaucaccggaaagccuugccccaaaccucauagacugaaccacaugggcauuuguuccugcggccuguauaagcaccccgggguuccggugaaguggaaacggugaggacuaguuauaagacugacuagcccgaugggccucccaacgggcccuccuccccuccuugcaccgagauuaaucaaaggcucuuuucagagccaccaaaaaaaaaaaaaaaaaaaaaaaaaaaaaaaaaaaaaaaaaaaaaaaaaaaaaaaaaaaaaaaaagaauu

SEQ ID NO: 32856 - RNA, 1655 nt, Artificial Sequence
  mRNA product Design i-3 (hSL-A64-N5) comprising derived and/or modified sequence from LASV(LASV253-NIG-2011;Clade II)__AIT17670__GPCmut7 (opt5)
aggagaaagcuuaccaugggccagaucauuaccuucuuucaagaggugccccacgucaucgaagagguuaugaacauugugcugaucgcccucagccugcuugcuauucugaaggggaucuacaauguggccacaugcggacucuucggccuggucuccuuucuucugcucugugggagaucuugcagcacgaccuauaaaggaguguacgaacugcagacacuggagcucgacauggcgucccugaacaugaccaugccucuuucuuguacaaagaauaacagccaucacuauaucaugguuggcaaugaaaccgggcuggagcucacacugaccaacacguccauuaucaaucauaaauucugcaaccuuucugaugcucacaagaaaaaucuguacgaccaugcccucaugagcauuaucuccaccuuucaccugagcauuccgaacuucaaucaguaugaggccaugucuugugauuuuaacggaggcaagaucuccgugcaguacaaucugagccacacauaugcugucgacgccgcuaaccauugcggcaccauugccaauggggugcuccaaacauucaugcggauggcguggggaggcucuuacaucgcccuggauuccgggaagggaagcugggacuguaucaugaccucuuaccaguaucuuauuauccagaacacgacaugggaagaucacugccaguuuucccgccccagcccuauuggcuaccuggggcuccugucccaaagaacccgggacaucuauauuucucgcagacuucugggaacauucaccuggacccucagcgauuccgagggcaacgaaacacccggcggguacugucugacgcgguggaugcugaucgaggcugagcucaaaugcuuuggaaauaccgccguugcuaaguguaacgaaaaacaugacgaggaguucugcgauaugcugcgccuuuuugacuucaauaagcaggccaucagacggcugaaagcgccugcccagaugagcauucagcucaucaacaaggcugugaaugcccugauuaacgaucaacuuaucaugaagaaucaucugcgcgacauuaugggcauccccuauugcaacuacucuaaauauuguuaccucaaucacacagucaccgggagaacaucccugccucggugcugucuggugagcaacggaucuuaccucaaugaaacccacuucagcgacgauaucgaacagcaggcugacaacaugauuacggagcugcuucaaaaggaguauaucgaucgccagggcaaaacaccgcuggggcucguggaccuguuugucuucuccaccucuuuuuaccugauuagcaucuuccuucaccucguuaagauucccacccauagacacaucauuggaaaaccuugccccaagccucaucggcugaaucacaugggcaucuguuccugcggccuguauaaacaccccggggugccggugaaguggaagcgcugaggacuaguuauaagacugacuagcccgaugggccucccaacgggcccuccuccccuccuugcaccgagauuaaucaaaggcucuuuucagagccaccaaaaaaaaaaaaaaaaaaaaaaaaaaaaaaaaaaaaaaaaaaaaaaaaaaaaaaaaaaaaaaaaagaauu

SEQ ID NO: 32857 - RNA, 1655 nt, Artificial Sequence
  mRNA product Design i-3 (hSL-A64-N5) comprising derived and/or modified sequence from LASV(LASV254-NIG-2011;Clade II)__AIT17674__GPCmut7 (opt5)
aggagaaagcuuaccaugggccagaucauuaccuucuuucaagaggugccccacgucaucgaagagguuaugaacauugugcugaucgcccucagccugcuugcuauucugaaggggaucuacaauguggccacaugcggacucuucggccuggucuccuuucuucugcucugugggagaucuugcagcacgaccuauaaaggaguguacgaacugcagacacuggagcucgacaugaccaaccugaauaugacaaugccucuuuccuguaccaagaacaauucucaucacuauaucaugguuggcaacgaaacagggcuggagcucacccugacgaauaccagcauuaucaaccauaaauucugcaaucuuuccgaugcgcacaagaaaaaccuguacaaucaugcucucaugucuauuaucagcacauuucaccuguccauuccgaacuucaaucaguaugaggccaugagcugugacuuuaacggaggcaagaucucugugcaguacaaucugucccacagcuaugccgucgaugcugccaaccauugcggcaccauugcuaacggggugcuccaaacauucaugcggauggccuggggaggcucuuacaucgcgcuggacuccgggaagggaaauugggauuguaucaugaccagcuaccaguaucuuauuauccagaacacgacaugggaagaccacugccaguuuucucgccccuccccuauuggcuaccuggggcuccugagccaaagaacccgggauaucuauauuucccgcagacuucugggaacauucaccuggacccucucugacagcgagggcaaugaaacacccggcggguacugucugacgcgguggaugcugaucgaggccgagcucaaaugcuuuggaaacaccgcuguugccaaguguaaugaaaaacaugaugaggaguucugcgacaugcugcgccuuuuugauuucaacaagcaggcuaucagacggcugaaaaccccugcccaggcgaauauucagcucaucaacaaggccgugaaugcucugauuaacgaccaacuuaucaugaagaaucaucugcgcgauauuaugggcauccccuauugcaacuacuccaaauauuguuaccucaaucacacagucacagggaagaccagccugccuagaugcugucuggugucuaacggauccuaccucaaugaaacgcacuucagcgacgacaucgaacagcaggccgauaacaugauuacagagcugcuucaaaaagaguauauggaccggcagggcaagaccccgcuggggcucguggaucuguuugucuucucuaccagcuuuuaccugaucuccauuuuccuucaccucguuaaaauccccacacaucgccacgugauuggaaagccuugccccaaaccucauagacugaaccacaugggcaucuguucuugcggccuguauaagcaccccggggugccggucaaguggaaacggugaggacuaguuauaagacugacuagcccgaugggccucccaacgggcccuccuccccuccuugcaccgagauuaaucaaaggcucuuuucagagccaccaaaaaaaaaaaaaaaaaaaaaaaaaaaaaaaaaaaaaaaaaaaaaaaaaaaaaaaaaaaaaaaaagaauu

SEQ ID NO: 32858 - RNA, 1655 nt, Artificial Sequence
  mRNA product Design i-3 (hSL-A64-N5) comprising derived and/or modified sequence from LASV(Nig08-A19;Clade III)__ADU56618__GPCmut7 (opt5)
aggagaaagcuuaccaugggccagaucgugaccuucuuucaagaggucccccacguuauugaagaggugaugaacaucgugcugauugcccucagcauccuggcuauucuuaaggggcuguacaauaucgccacaugcggacucaucggccuggucacguuccuucugcucuccgggagaucuuguagcaugaccuauaaaggaguguacgaacugcagacacuggagcucaacaugaauacccugaacaugacaaugccucuuuccugcaccaagaauaacucucaucacuauauuaugguuggcaaugaaacagggcuggagcucacccugacgaacaccagccuucugcaucacaaauuuuguaaucucuccgacgcgcauaagaaaaaccuguacgaucacacacugaugucuaucauuagcaccuuccaccucuccaucccgaauuuuaaccaguaugaggcuaugagcugcgacuucaauggaggcaagauuacagugcaguacaaccugucucauuccuaugccaucgaugccgcuaaucacuguggcaccgucgccaacggggugcuucaaacguuuaugcggauggcuuggggaggcagcuacauugcccuggacucugggcgcggaaagugggauugcaucaugacauccuaccaguaucucaucauucagaacaccacaugggaagaccauugucaguucagcagacccucuccuaucggcuaccuggggcuucugucccaacggacccgcgauauuuauaucagcagacggcuccugggaaccuuuacauggacgcuguccgacucugagggcaaugaaacccccggcggguacugccucacacgcuggaugcugauugaggcggagcuuaaauguuucggaaacaccgccguugcuaagugcaaugaaaaacacgaugaggaauuuugugacaugcugagacucuucgauuuuaacaagcaggccauccggcgccugaaagcuccugcccagaugagcauccagcuuauuaauaaggcggugaacgcccugaucaaugaccaacucauuaugaagaaccaccugagagauaucaugggcauucccuauugcaauuacuccaaauauugcuaccugaaccauacaagcaccgggcggacgucucucccucgcuguugccuggucuccaauggaagcuaccuuaacgagacacacuucucugacgacaucgaacagcaggcugauaauaugaucaccgagaugcugcaaaaggaguaucucgacagacagggcaaaaccccgcuggggcugguggaucuuuucguguuuagcacauccuucuaccucauuucuaucuuucugcaucuggucaagauucccacccaccggcauaucguuggaaaaccuugucccaagccucaccgccucaaccacaugggcauuugcagcuguggccuguauaaacagcccggggugccggugagauggaagcggugaggacuaguuauaagacugacuagcccgaugggccucccaacgggcccuccuccccuccuugcaccgagauuaaucaaaggcucuuuucagagccaccaaaaaaaaaaaaaaaaaaaaaaaaaaaaaaaaaaaaaaaaaaaaaaaaaaaaaaaaaaaaaaaaagaauu

SEQ ID NO: 32859 - RNA, 1658 nt, Artificial Sequence
  mRNA product Design i-3 (hSL-A64-N5) comprising derived and/or modified sequence from LASV(G1180-SLE-2010;Clade IV)__AIT17168__GPCmut7 (opt5)
aggagaaagcuuaccaugggccagaucgugaccuucuuucaagaggucccccacguuauugaagaggugaugaacaucgugcugauugcccucagcauccuggcuguccuuaaggggcuguacaauuucgccacaugcggacucgugggccugcuuacguuucugcuccugugugggagauccugcaccgcgucucgguauaaaggaguuuacgaacugcagacacucgagcugaacauggaaacccuuaauaugacaaugccucugagcuguaccaagaacaauucccaucacuauauuauggugggcaacgagacagggcucgagcugacccuuacgaauaccucuaucaucaaccauaaauucugcaaucugagcgacgcucacaagaaaaaccucuacgaucaugcccugauguccauuaucucuacauuucaccugagcauuccgaauuucaaccaguaugaagccauguccugugacuuuaauggaggcaagaucagcguccaguacaaccucucucacuccuaugcuggcgaugccgcuaaucauugcgggaccguggccaacggaguucugcaaacauucaugcgcauggcguggggcgggagcuacauugcccuugacucuggacacggcuccugggauuguaucaugaccagcuaccaguaucugauuauccagaacacgacaugggaggaccauugccaguuuucuagacccuccccuaucggguaccucggacugcuuagccaacggacccgcgauauuuauaucuccagacggcugcucggcacauucaccuggacccugucugacagcgaaggcaaggauacacccgggggauacugucugacgcgcuggaugcucauugaggcugagcugaaaugcuuuggcaauaccgccguggcuaaguguaacgaaaaacacgacgaggaguucugcgauaugcuuagacuguuugacuucaauaagcaggccauccagcggcucaaagcgccugcccagauguccauucaacugaucaacaaggcugucaaugcccuuaucaacgaucagcugauuaugaagaaucaccuccgcgacaucauggggauucccuauugcaacuacagcaaauauuguuaccugaaucauacaaccacaggaaagaccucucugccuaaaugcugucucguguccaacggcagcuaccugaaugaaacgcacuucucugacgauaucgaacagcaagcugacaacaugauuacagagaugcuucagaaggaguauauggaaagacaggggaaaaccccgcugggacucguggaucuguuugucuucagcaccuccuuuuaccugaucucuaucuuccuucaucucguuaagauucccacacaccggcauaucgugggcaaaagcugcccuaagccccaccgccugaaucacaugggcauuuguuccugcgggcuguauaagcagccuggagugcccgucaaauggaagagaugaggacuaguuauaagacugacuagcccgaugggccucccaacgggcccuccuccccuccuugcaccgagauuaaucaaaggcucuuuucagagccaccaaaaaaaaaaaaaaaaaaaaaaaaaaaaaaaaaaaaaaaaaaaaaaaaaaaaaaaaaaaaaaaaagaauu

SEQ ID NO: 32860 - RNA, 1658 nt, Artificial Sequence
  mRNA product Design i-3 (hSL-A64-N5) comprising derived and/or modified sequence from LASV(G1442-SLE-2011;Clade IV)__AIT17180__GPCmut7 (opt5)
aggagaaagcuuaccaugggccagaucgugaccuucuuucaagaggucccccacguuauugaagaggugaugaacaucgugcugauugcccucagcauccuggcuguccuuaaggggcuguacaauguggccacaugcggacucauuggccugguuacguuccuucugcucugugggagauccugcaccacaacccuguauaaaggaguguacgaacugcagacacucgagcugaacauggaaacccuuaauaugacaaugccucugucuuguaccaagaacaauagccaucacuauauccgggucggcaacgagacggggcucgagcugacccuuacaaauaccuccaucauuaaccauaaauuuugcaaucugucugacgcgcacaagaaaaaccucuacgaucaugcucugaugagcaucauuuccacauuccaccugucuaucccgaauuuuaaccaguaugaagccaugagcugugacuucaauggaggcaagauuuccgugcaguacaaccucagccacucuuaugccggcgaugcugccaaucauugcgggaccguugcuaacggagugcugcaaacguuuaugcgcauggccuggggcggguccuacaucgcgcuugacagcggaagaggcaacugggauuguauuaugacaucuuaccaguaucugaucauccagaauaccacaugggacgaucacugccaguucucccggcccagcccuauuggguaccucggacugcuuucucaacgcaccagagacgucuauaucucccggcgccugcucggcaccuuuacauggacgcugagcgauuccgagggcaaggacacccccgggggauacugucugacaagauggaugcucauugaagccgagcugaaaugcuucggcaacaccgcuguggccaaguguaaugagaaacaugaugaagaguuuugcgacaugcuucggcuguucgauuuuaacaagcaggcuauccagcgccucaaagccccugcgcagaugucuauucaacugaucaauaaggccgugaacgcucuuaucaaugaccagcugauuaugaagaaccaccucagagacaucauggggauucccuauugcaauuacagcaaauauuguuaccugaacaauacagccaccggaaagacgucccugccuaaaugcugucucaucagcaacggcucuuaccugaaugaaacacacuucuccgaugacauugagcaggaagcugauaacaugaucaccgagaugcuucaaaaggaguauauggaacggcaggggaaaaccccgcugggacucgucgaccuguucguuuuuagcacaucuuucuaccugaucagcauuuuucuucaucucgugaagauccccacccaccgccauauugugggcaaauccugcccuaagccccacagacugaaucauaugggcaucuguucuugcgggcuguauaagcagccuggaguccccgugcgguggaaacgcugaggacuaguuauaagacugacuagcccgaugggccucccaacgggcccuccuccccuccuugcaccgagauuaaucaaaggcucuuuucagagccaccaaaaaaaaaaaaaaaaaaaaaaaaaaaaaaaaaaaaaaaaaaaaaaaaaaaaaaaaaaaaaaaaagaauu

SEQ ID NO: 32861 - RNA, 1658 nt, Artificial Sequence
  mRNA product Design i-3 (hSL-A64-N5) comprising derived and/or modified sequence from LASV(G3010-SLE-2013;Clade IV)__AIT17344__GPCmut7 (opt5)
aggagaaagcuuaccaugggccagaucgugaccuucuuucaagaggucccccacguuauugaagaggugaugaacaucgugcugauugcccucagcauccuggcuguccuuaaggggcuguacaauuucgccacaugcggacucgugggccugguuacguuucuucugcucugugggagauccugcaccacaucucuguauaaaggaguguacgaacugcagacccucgagcugaacauggaaacacuuaauaugaccaugccucugagcuguacaaagaacaauucccaucacuauauuauggucggcaacgagaccgggcucgagcugacgcuuaccaauacaucuaucaucaaccauaaauucugcaaucugagcgacgcgcacaagaaaaaccucuacaaucaugcucugauguccauuaucucuaccuuucaccugagcauuccgaacuucaaucaguaugaagccauguccugugauuuuaacggaggcaagaucagcgugcaguacaaucucucucacuccuaugccggcgacgcugccagccauugcgggacaguugcuaacggagugcugcaaaccuucaugcggauggccuggggcgggucuuacauugcgcuugauuccggauacggcaagugggacuguaucaugacgagcuaucaguaccugauuauccagaacacaaccugggaggaucacugccaguuuucucgccccuccccuaucggguaucucggacugcuuagccaaagaacacgggacauuuacaucucccgcagacugcucggcaccuucaccuggacacugucugauagcgaaggcaaagacacgcccgggggauauugucugacccgguggaugcucauugaggccgagcugaagugcuuuggcaauacagcugucgccaaauguaacgaaaagcaugaugaggaguucugcgacaugcuucgccuguuugauuucaauaaacaggcuauccagagacucaagaccccugcccagauguccauucaacugaucaacaaggcggugaaugcccuuaucaacgaccagcugauuaugaaaaaucaccuccgggauaucauggggauucccuacugcaacuauagcaaguacuguuaccugaaucacacaaccacgggaaaaacaucucugccuaagugcugucucguguccaacggcagcuaucugaaugaaacccauuucucugacgacaucgaacagcaagcugauaacaugauuaccgagaugcuucagaaagaguacauggaacgccaggggaagacaccgcugggacucgucgaccuguuuguuuucagcaccuccuuuuaucugaucucuaucuuccuucaccucgugaaaauucccacacauagacacaucgugggcaagagcugcccuaagccccaucggcugaaucacaugggcauuuguuccugcgggcuguacaaacagccuggaguccccgugcgcuggaagagaugaggacuaguuauaagacugacuagcccgaugggccucccaacgggcccuccuccccuccuugcaccgagauuaaucaaaggcucuuuucagagccaccaaaaaaaaaaaaaaaaaaaaaaaaaaaaaaaaaaaaaaaaaaaaaaaaaaaaaaaaaaaaaaaaagaauu

SEQ ID NO: 32862 - RNA, 1658 nt, Artificial Sequence
  mRNA product Design i-3 (hSL-A64-N5) comprising derived and/or modified sequence from LASV(G502-SLE-2009;Clade IV)__AIT17126__GPCmut7 (opt5)
aggagaaagcuuaccaugggccagaucgugaccuucuuucaagaggucccccacguuauugaagaggugaugaacaucgugcugauugcccucagcauccuggcuguccuuaaggggcuguacaauuucgccacaugcggacucgugggccugcuuacguuucugcuccugugugggagauccugcaccacaggacuguauaaaggcguuuacgaacuccagacccuggagcuuaacauggaaacacugaauaugaccaugccucucucuuguacaaagaacaauagccaucacuauauuaugguggggaacgagaccggacuggagcuuacgcugaccaauacauccaucaucaaccauaaauucugcaaucucucugacgcgcacaagaaaaaccuguacgaucaugcucugaugagcauuaucuccaccuuucaccucucuauuccgaauuucaaccaguaugaagccaugagcugugacuuuaauggcggcaagaucuccguccaguacaaccugagccacucuuaugccggggaugcugccgaccauugcggaacaguggcuaauggcguucuucaaaccuucaugcggauggccuggggaggguccuacauugcgcuggauagcggccgcgggagaugggacuguaucaugacgucuuaccaguaucucauuauccagaacacaaccugggaggaucacugccaguuuucccggcccagcccuaucggauaccugggccuucugucucaacgcacaagagacauuuauaucucccggcgccuccugggcaccuucaccuggacacugagcgauuccgaagggaaggacacgcccggaggcuacugucucaccagauggaugcugauugaggccgagcuuaaaugcuuugggaacacagcuguggccaaguguaaugaaaaacaugaugaggaguucugcgacaugcugcggcucuuugauuucaacaagcaggcuauccagcgccugaaagccccugcgcagaugucuauucaacuuaucaauaaggccgucaacgcucugaucaaugaccagcucgugaugaagaaccaccugagagacauuaugggaauccccuauugcaauuacagccgguauuguuaccugaaccacaccacaaccggccgcacgucccucccuaaaugcugucuggugagcaaugggucuuaccuuaacgaaacacauuucuccgaugacauugaacagcaagccgauaauaugaucaccgagaugcugcagaaggaguauauggaaagacagggaaaaaccccgcucggccuggucgaccuguuuguuuucagcacaucuuuuuaccuuauuagcaucuuccuccaccuggugaagauccccacccaucggcacauugugggcaaauccugcccuaagccccaucgccugaaccacauggggaucuguucuugcggacucuauaaacagccuggcguccccgugaaguggaagagaugaggacuaguuauaagacugacuagcccgaugggccucccaacgggcccuccuccccuccuugcaccgagauuaaucaaaggcucuuuucagagccaccaaaaaaaaaaaaaaaaaaaaaaaaaaaaaaaaaaaaaaaaaaaaaaaaaaaaaaaaaaaaaaaaagaauu

SEQ ID NO: 32863 - RNA, 1658 nt, Artificial Sequence
  mRNA product Design i-3 (hSL-A64-N5) comprising derived and/or modified sequence from LASV(G733-SLE-2010;Clade IV)__AIT17154__GPCmut7 (opt5)
aggagaaagcuuaccaugggccagaucgugaccuucuuucaagaggucccccacguuauugaagaggugaugaacaucgugcugauugcccucagcauccuggcuguccuuaaggggcuguacaauuucgccacaugcggaauugugggccucguuuccuuucugcuucugugugggagaucuugcacgaccagccucuauaaaggaguguacgaacugcagacacuggagcucaacauggaaacccugaauaugacaaugccucuuuccuguaccaagaacaauucucaucacuauaucauggucggcaacgagacagggcuggagcucacccugacgaauaccagcaucauuaaccauaaauucugcaaucuuuccgacgcgcacaagaaaaaccuguacgaucaugcucucaugucuaucauuagcacauuucaccuguccaucccgaauuucaaccaguaugaagccaugagcugugacuuuaauggaggcaagauuucugugcaguacaaccugucccacagcuaugccggcgaugcugccaaucauugcgggaccaucgcuaacggaguucuccaaacauucaugcggauggccuggggcgggucuuacauugcgcuggacuccggacgcgauagaugggacuguaucaugaccagcuaccaguaucuuaucauucagaacacgacaugggaggaucacugccaguuuucucggcccuccccuaucggcuaccuggggcuccugagccaacgcaccagagacauuuauaucucccggcgccuucugggaacauucaccuggacccucucugauagcgaaggcaaggacacacccggcggguacugucugacgagauggaugcugauugaggccgagcucaaaugcuuuggaaauaccgcuguggccaaguguaacgaaaaacaugaugaggaguucugcgacaugcugcggcuuuuugauuucaauaagcaggcuauccagcgccugaaagccccugcgcagauguccauccaacucauuaacaaggccgucaaugcucugaucaacgaccagcuuauuaugaagaaucaccugagagacaucaugggcauucccuauugcaacuacagcaaauauuguuaccucaaucacacaaccacagggaagaccucucugccuaaaugcugucugguguccaacggaagcuaccucaaugaaacgcauuucucugaugacaucgaacagcaagccgauaacaugaucacagagaugcugcagaaggaguauauggaacggcagggcaaaaccccgcuugggcugguggaccucuuugucuucagcaccuccuuuuaccugauuucuaucuuccugcaccuuguuaagauucccacacaucgccacguggugggaaaaagcugcccuaagccccauagacucaaucacaugggcaucuguuccugcggccuguaugggcagccuggaguccccgugaaguggaaacggugaggacuaguuauaagacugacuagcccgaugggccucccaacgggcccuccuccccuccuugcaccgagauuaaucaaaggcucuuuucagagccaccaaaaaaaaaaaaaaaaaaaaaaaaaaaaaaaaaaaaaaaaaaaaaaaaaaaaaaaaaaaaaaaaagaauu

SEQ ID NO: 32864 - RNA, 1658 nt, Artificial Sequence
  mRNA product Design i-3 (hSL-A64-N5) comprising derived and/or modified sequence from MOPV/LASV reassortant(IGS-1;Clade IV)__AFY05576__GPCmut7 (opt5)
aggagaaagcuuaccaugggccagaucgugaccuucuuucaagaggucccccacguuauugaagaggugaugaacaucgugcugauugcccucagcguccuggcugugcuuaaggggcuguacaauuucgccacaugcggacucguuggccuggugacguuucuucugcucugugggagauccugcaccacaucucuguauaaaggagucuacgaacugcagacccucgagcugaacauggaaacacuuaauaugaccaugccucugagcuguacaaagaacaauucccaucacuauaucauggugggcaacgagaccgggcucgagcugacgcuuaccaauacaucuauuaucaaccauaaauucugcaaucugagcgacgcgcacaagaaaaaccucuacgaucaugcucugauguccaucauuucuaccuuucaccugagcaucccgaauuucaaccaguaugaagccauguccugugacuuuaauggaggcaagauuagcguucaguacaaccucucucacuccuaugccggcgaugcugccaaucauugcgggacaguggcuaacggaguccugcaaaccuucaugcggauggccuggggcgggagcuacaucgcgcuugacucuggacgcggcaacugggauuguauuaugacguccuaccaguaucugaucauucagaauacaaccugggaggaccacugccaguuuagcagacccucuccuaucggguaccucggacugcuuucccaacggacacgcgauaucuauauuagcagacggcugcucggcaccuucaccuggacacuguccgacucugaaggcgaggauacgcccgggggauacugucugacccgcuggaugcucaucgaggccgaacugaagugcuuuggcaacacagcuguggccaaauguaaugagaagcaugacgaagaguucugcgauaugcuuagacuguuugacuucaacaaacaggcuauucagcggcucaaggccccugcgcagaugagcauccaacugauuaauaaagccgugaacgcucuuaucaaugaucagcugaucaugaagaaccaccuccgcgacauuauggggauccccuauugcaauuacuccaaguauuguuaccugaaccacaccacaaccggaagaacgagccugccuaaaugcugucucgucucuaauggcuccuaccugaacgaaacacauuucagcgacgauauugagcagcaagccgacaauaugaucaccgagaugcuucagaaggaauauauggagcggcaggggaaaaccccgcugggacucguugaucuguuuguguucucuaccagcuuuuaccugauuuccaucuuccuucaccucgugaagauccccacacaucgccacauugucggcaaaucuugcccuaagccccauagacugaaccacaugggcaucuguagcugcgggcuguauaaacagccuggagugcccguuaaguggaagcggugaggacuaguuauaagacugacuagcccgaugggccucccaacgggcccuccuccccuccuugcaccgagauuaaucaaaggcucuuuucagagccaccaaaaaaaaaaaaaaaaaaaaaaaaaaaaaaaaaaaaaaaaaaaaaaaaaaaaaaaaaaaaaaaaagaauu

SEQ ID NO: 32865 - RNA, 1658 nt, Artificial Sequence
  mRNA product Design i-3 (hSL-A64-N5) comprising derived and/or modified sequence from LASV(LM765-SLE-2012;Clade IV)__AIT17814__GPCmut7 (opt5)
aggagaaagcuuaccaugggccagaucgugaccuucuuucaagaggucccccacguuauugaagaggugaugaacaucgugcugauugcccucagcauccuggcuguccuuaaggggcuguacaauuucgccacaugcggacucgugggccugguuacguuucuucugcucugugggagauccugcaccacaucucuguauaaaggaguguacgaacugcagacccucgagcugaacauggaaacacuuaauaugaccaugccucugagcuguacaaagaacaauucccaucacuauauuauggucggcaacgagaccgggcucgagcugacgcuuaccaauacaucuaucaucgaccauaaauucugcaaccugagcgaugcgcaccggaagaaucucuacgaccaugcucugauguccauuaucucuaccuuucaccugagcauuccgaacuucaaucaguaugaagccauguccugugauuuuaacggaggcaaaaucagcgugcaguacaaucucucucacuccuaugccaaggacgcugccgaucauugcggcacaguugcuaacggggugcugcaaaccuucaugcgcauggccuggggaggcagcuacauugcgcuugacucugggagaggacggugggauuguaucaugacguccuaccaguaucugauuauccagaauacaaccugggaggaccacugccaguuuagccgccccucuccuaucggcuaccucgggcugcuuucccaaagaacacgggauauuuauaucagccgcagacugcucggaaccuucaccuggacacuguccgacucugaaggcaaggauacgcccggcggguacugucugacccgguggaugcucauugaggccgagcugaaaugcuuuggaaacacagcugucgccaaguguaacgaaaaacaugacgaggaguucugcgauaugcuucgccuguuugacuucaauaagcaggcuauccagagacucaaagccccugcgcagaugagcauucaacugaucaacaaggccgugaaugcucuuaucaacgaccagcugauuaugaagaaucaccuccgggauaucaugggcauucccuauugcaacuacuccaaauauuguuaccugaaucacaccacaaccgggaagacgagccugccuaaaugcugucucgugucuaacggauccuaccugaaugaaacacauuucagcgacgauaucgaacagcaagccgacaacaugauuaccgagaugcuucagaaggaguauauggaacgccagggcaaaaccccgcuggggcucgucgaucuguuuguuuucucuaccagcuuuuaccugaucuccaucuuccuucaccucgugaagauucccacacauagacacaucgugggaaaaccuugccccaagccucaucggcugaaucacaugggcauuuguucuugcggccuguauaagcagcccggggucccggugaaauggaagcgcugaggacuaguuauaagacugacuagcccgaugggccucccaacgggcccuccuccccuccuugcaccgagauuaaucaaaggcucuuuucagagccaccaaaaaaaaaaaaaaaaaaaaaaaaaaaaaaaaaaaaaaaaaaaaaaaaaaaaaaaaaaaaaaaaagaauu

SEQ ID NO: 32866 - RNA, 1658 nt, Artificial Sequence
  mRNA product Design i-3 (hSL-A64-N5) comprising derived and/or modified sequence from LASV(LM776-SLE-2012;Clade IV)__AIT17824__GPCmut7 (opt5)
aggagaaagcuuaccaugggccagaucgugaccuucuuucaagaggucccccacguuauugaagaggugaugaacaucgugcugauugcccucagcauccuggcuguccuuaaggggcuguacaauuucgccacaugcggacucgugggccugguuacguuucuucugcucugugggagauccugcaccacaucuguguauaaaggagucuacgaacugcagacccuggagcucaacauggaaacacugaauaugaccaugccucuuagcuguacaaagaacaauucccaucacuauauuauggugggcaacgagaccgggcuggagcucacgcugaccaauacaucuaucaucaaccauaaauucugcaaucuuagcgacgcgcacaagaaaaaccuguacgaucaugcucucauguccauuaucucuaccuuucaccugagcauuccgaauuucaaccaguaugaagccauguccugugacuuuaauggaggcaagaucagcguucaguacaaccugucucacuccuaugccggcgaugcugccaaucauugcgggacaguggcuaacggaguccuccaaaccuucaugcggauggccuggggcgggagcuacauugcgcuggacucuggacacggcaagugggauuguaucaugacguccuaccaguaucuuauuauccagaacacaaccugggaggaccauugccaguuuagccgccccucuccuaucggguaccugggacuccugucccaaagaacacgggauauuuauaucagccgcagacuucugggcaccuucaccuggacacucuccgacucugaaggcaaagauacgcccgggggauacugucugacccgguggaugcugauugaggccgagcucaagugcuuuggcaauacagcuguggccaaauguaacgaaaagcacgacgaggaguucugcgauaugcugcgccuuuuugacuucaauaaacaggcuauccagagacugaaggccccugcgcagaugagcauucaacucaucaacaaggccgugaaugcucugaucaacgaucagcuuauuaugaaaaaucaucugcgggacaucauggggauucccuauugcaacuacuccaaguauuguuaccucaaucacaccacaaccggaaaaacgagccugccuaagugcugucuggucucuaacggcuccuaccucaaugaaacacacuucagcgacgauaucgaacagcaagccgacaacaugauuaccgagaugcugcagaaagaguauauggaacgccaggggaagaccccgcuuggacugguugaucucuuuguguucucuaccagcuuuuaccugaucuccaucuuccugcaucuugugaaaauucccacacacagacauaucgucggcaagucuugcccuaagccccaccggcucaaucacaugggcauuuguagcugcgggcuguauaaacagccuggagugcccguucgcuggaagagaugaggacuaguuauaagacugacuagcccgaugggccucccaacgggcccuccuccccuccuugcaccgagauuaaucaaaggcucuuuucagagccaccaaaaaaaaaaaaaaaaaaaaaaaaaaaaaaaaaaaaaaaaaaaaaaaaaaaaaaaaaaaaaaaaagaauu

SEQ ID NO: 32867 - RNA, 1658 nt, Artificial Sequence
  mRNA product Design i-3 (hSL-A64-N5) comprising derived and/or modified sequence from LASV(Mad39;Clade IV)__ANH09722__GPCmut7 (opt5)
aggagaaagcuuaccaugggccagaucgugaccuucuuucaagaggucccccacguuauugaagaggugaugaacaucgugcugauugcccucagcauccuggcuguccuuaaggggcuguacaauguggccacaugcggacucauuggccugguuacguuccuucugcucugugggagauccugcaccacaacccuguauaaaggaguguacgaacugcaggcgcucgagcugaacauggaaacacuuaauaugaccaugccucugucuuguacaaagaacaauagccaucacuauauccgggucggcaacgagaccgggcucgagcugacgcuuaccaauacaucccugaucaaccauaaauuuugcaaucucucugacgcucacaagaaaaaccuguacgaucaugcccugaugagcauuaucuccaccuuccaccucucuauuccgaauuuuaaccaguaugaagccaugagcugugacuucaaugauggaaagaucuccgugcaguacaaccugagccacacauaugcuggcgacaccgccaaucauugcggcacgguugcuaacggggugcuucaaacauuuaugcgcauggccuggggaggcucuuacauugcgcuggauuccgggagaggaggcugggacuguaucaugaccagcuaccaguaucucauuauccagaacacaaccugggaggaucacugccaguucucucggcccuccccuaucggguaccugggacuucugagccaacgcaccagagacauuuauaucucucggcgccuccugggcacauuuacguggacccuguccgauagcgaaggcaaggacacacccgggggauacugucucaccagauggaugcugauugaggccgagcuuaaaugcuucggcaauacagcugucgccaaguguaacgaaaaacaugaugaggaauuuugcgacaugcugcgccucuucgauuuuaauaagcaggcuauccagcggcugaaagccccugcgcagauguccauucaacuuaucaacaaggccgugaaugcucugaucaacgaccagcucauuaugaagaaucaccugagagacaucauggggauucccuauugcaacuacucuaaauauuguuaccugaaucacaccgugacgggaaagacaagccucccuaaaugcugucuggucuccaacggcagcuaccuuaaugagacccauuucucugaugacaucgaacagcaagccgauaacaugauuaccgagaugcugcagaaggaguauauggaacggcaggggaaaacaccgcucggacugguugaccuguucguguuuuccaccagcuucuaccuuaucucuaucuuucuccaccuggugaagauucccacacaucgccacgucgugggcaaaccuugccccaagccucauagacugaaucacaugggcaucuguagcugcggguucuauaagcagcccggaguuccggugcgguggaaacgcugaggacuaguuauaagacugacuagcccgaugggccucccaacgggcccuccuccccuccuugcaccgagauuaaucaaaggcucuuuucagagccaccaaaaaaaaaaaaaaaaaaaaaaaaaaaaaaaaaaaaaaaaaaaaaaaaaaaaaaaaaaaaaaaaagaauu

SEQ ID NO: 32868 - RNA, 1658 nt, Artificial Sequence
  mRNA product Design i-3 (hSL-A64-N5) comprising derived and/or modified sequence from LASV(Z0947-SLE-2011;Clade IV)__AIT17840__GPCmut7 (opt5)
aggagaaagcuuaccaugggccagaucgugaccuucuuucaagaggucccccacguuauugaagaggugaugaacaucgugcugauugcccucagcauccuggcuguccuuaaggggcuguacaauuucgccacaugcggacucgugggccugguuacguuucuucugcucugugggagauccugcaccauuucucuguauaaaggaguguacgaacugcagacacucgagcugaacauggaaacccuuaauaugacaaugccucugagcuguaccaagaacaauucccaucacuauaucauggucggcaacgagacagggcucgagcugacccuuacgaauaccucuaucauuaaccauaaauucugcaaucugagcgacgcgcacaagaaaaaccucuacgaucaugcucugauguccaucauuucuacauuucaccugagcaucccgaauuucaaccaguaugaagccauguccugugacuuuaauggaggcaagauuagcgugcaguacaaccucucucacuccuaugccggcgaugcugccaaucauugcgggaccguugcuaacggagugcugcaaacauucaugcggauggccuggggcgggagcuacaucgcgcuugacucuggacgcgauagaugggacuguauuaugaccuccuaccaguaucugaucauccagaacacgacaugggaggaucacugccaguuuagccggcccucuccuauuggcuaccucgggcugcuuucccaacgcaccagagacaucuauauuagccggcgccugcucggaacauucaccuggacccuguccgauucugaaggcaaggacacacccggcggguacugucugacgagauggaugcucaucgaggccgagcugaaaugcuuuggaaauaccgcugucgccaaguguaacgaaaaacaugaugaggaguucugcgacaugcuucggcuguuugauuucaauaagcaggcuauucagcgccucaaagccccugcgcagaugagcauccaacugaucaacaaggccgugaaugcucuuauuaacgaccagcugaucaugaagaaucaccucagagacauuaugggcauccccuauugcaacuacuccaaauauuguuaccugaaucacacaaccacagggaagaccagccugccuaaaugcugucucgugucuaacggauccuaccugaaugaaacgcauuucagcgaugacauugaacagcaagccgauaacaugaucacagagaugcuucagaaggaguauauggaacggcagggcaaaaccccgcuggggcucgucgaccuguuuguuuucucuaccagcuuuuaccugaucuccauuuuccuucaccucgugaagauccccacacaucgccacauugugggaaaaccuugccccaagccucauagacugaaucacaugggcaucuguucuugcggccuguauaagcagcccggggucccggugaaauggaagcggugaggacuaguuauaagacugacuagcccgaugggccucccaacgggcccuccuccccuccuugcaccgagauuaaucaaaggcucuuuucagagccaccaaaaaaaaaaaaaaaaaaaaaaaaaaaaaaaaaaaaaaaaaaaaaaaaaaaaaaaaaaaaaaaaagaauu

SEQ ID NO: 32869 - RNA, 1689 nt, Artificial Sequence
  mRNA product Design i-3 (hSL-A100) comprising derived and/or modified sequence from LASV(Josiah;Clade IV)__NP_694870__GPCmut7 (opt1)
aggagaaagcuuaccaugggccagaucgugaccuucuuccaggaggucccccacgugaucgaggaggugaugaacaucguccugaucgcccucagcgugcuggccgugcugaaggggcucuacaacuucgcgaccugcggccuggucgggcuggugacguuccuccugcugugcggccgcuccugcaccaccagccucuacaaggggguguacgagcugcagacccuggagcucaacauggagacgcugaacaugaccaugccgcuguccugcaccaagaacaacagccaccacuacaucauggucggcaacgagaccggccucgagcugacgcugaccaacaccuccaucaucaaccacaaguucugcaaccucagcgacgcccacaagaagaaccuguacgaccacgcccugauguccaucaucagcaccuuccaccucuccauccccaacuucaaccaguacgaggccaugagcugcgacuucaacgggggcaagaucuccgugcaguacaaccugagccacuccuacgccggggacgcggccaaccacugcggcacgguggccaacgggguccugcagaccuucaugcggauggccuggggcggcagcuacaucgcgcucgacuccgggcgcggcaacugggacugcaucaugaccagcuaccaguaccugaucauccagaacaccacgugggaggaccacugccaguucucccggcccagccccaucggguaccugggccuccugucccagcgcacccgggacaucuacaucagccgccggcugcucggcaccuucaccuggacgcugagcgacuccgaggggaaggacaccccgggcggguacugccugacccgcuggaugcucaucgaggccgagcugaagugcuucggcaacaccgccguggccaagugcaacgagaagcacgacgaggaguucugcgacaugcugcggcuguucgacuucaacaagcaggccauccagcgccugaaggcgcccgcccagaugagcauccagcugaucaacaaggccgugaacgcccucaucaacgaccagcugaucaugaagaaccaccuccgggacaucauggggauccccuacugcaacuacuccaaguacugcuaccucaaccacacgaccaccggccgcaccagccugcccaagugcugccuggucuccaacggcagcuaccucaacgagacgcacuucuccgacgacaucgagcagcaggccgacaacaugaucaccgagaugcugcagaaggaguacauggagcggcaggggaagacgccccugggccucguggaccuguucguguucagcaccuccuucuaccugaucagcaucuuccugcaccucgucaagaucccgacccaccgccacaucguggggaaguccugccccaagccccaccggcugaaccacaugggcaucugcagcugcgggcuguacaagcagcccggcgugccggucaaguggaagcgcugaggacuaguuauaagacugacuagcccgaugggccucccaacgggcccuccuccccuccuugcaccgagauuaaucaaaggcucuuuucagagccaccaaaaaaaaaaaaaaaaaaaaaaaaaaaaaaaaaaaaaaaaaaaaaaaaaaaaaaaaaaaaaaaaaaaaaaaaaaaaaaaaaaaaaaaaaaaaaaaaaaaaa

SEQ ID NO: 32870 - RNA, 1686 nt, Artificial Sequence
  mRNA product Design i-3 (hSL-A100) comprising derived and/or modified sequence from LASV(LP;Clade I)__AAF86701__GPCmut7 (opt1)
aggagaaagcuuaccaugggccagaucaucaccuucuuccaggaggugccccacgucaucgaggaggugaugaacaucgugcugaucgcccucagccugcuggccauccucaaggggcuguacaacaucgcgaccugcggcaucaucgggcuggucgccuuccucuuccugugcggcaaguccugcagccugacgcucaagggcggguacgagcugcagacccuggagcucaacauggagacccugaacaugaccaugccgcuguccugcacgaagaacagcucccaccacuacauccgcgugggcaacgagaccgggcucgagcugacccugaccaacacgagcaucaucaaccacaaguucugcaaccucuccgacgcccacaagaagaaccuguacgaccacgcccugaugagcaucaucuccaccuuccaccucagcauccccaacuucaaccaguacgaggccauguccugcgacuucaacggcgggaagaucagcgugcaguacaaccugucccacagcuacgcgggcgacgccgccgagcacugcgggaccgucgccaacggcgugcugcagaccuucaugcggauggcguggggcgggcgcuacaucgcccucgacuccggcaaggggaacugggacugcaucaugacgagcuaccaguaccugaucauccagaacaccaccugggaggaccacugccaguucucccggcccagccccaucggcuaccugggccuccugucccagcgcacccgggacaucuacaucagccgccggcugcucgggacguucaccuggacccugagcgacuccgagggcaacgagacccccgggggcuacugccugacgcgcuggaugcucaucgaggccgagcugaagugcuucgggaacaccgccguggccaagugcaacgagaagcacgacgaggaguucugcgacaugcugcggcuguucgacuucaacaagcaggcgauccgccggcugaaggcccccgcccagaugagcauccagcugaucaacaaggccgucaacgcccucaucaacgaccagcugaucaugaagaaccaccuccgcgacaucaugggcauccccuacugcaacuacuccaaguacugcuaccucaaccacaccagcuccggccggaccagccugcccaagugcugccugaucuccaacgggagcuaccucaacgagacgcaguucuccgacgacaucgagcagcaggcggacaacaugaucaccgagaugcugcagaaggaguacaucgagcgccagggcaagaccccgcuggggcucguggacaucuucaucuucagcaccuccuucuaccugaucagcaucuuccugcaccugaucaagaucccgacgcaccggcacaucgugggcaagcccugccccaagccccaccgccucaaccacaugggggucugcuccugcggccuguacaagcacccgggcgugcccaccaaguggaagcggugaggacuaguuauaagacugacuagcccgaugggccucccaacgggcccuccuccccuccuugcaccgagauuaaucaaaggcucuuuucagagccaccaaaaaaaaaaaaaaaaaaaaaaaaaaaaaaaaaaaaaaaaaaaaaaaaaaaaaaaaaaaaaaaaaaaaaaaaaaaaaaaaaaaaaaaaaaaaaaaaaaaaa

SEQ ID NO: 32871 - RNA, 1686 nt, Artificial Sequence
  mRNA product Design i-3 (hSL-A100) comprising derived and/or modified sequence from LASV(803213;Clade II)__AAF86703__GPCmut7 (opt1)
aggagaaagcuuaccaugggccagaucaucaccuucuuccaggaggugccccacgucaucgaggaggugaugaacaucgugcugaucgcccucagccugcuggccauccucaaggggaucuacaacgucgcgaccugcggccuguucgggcugaucuccuuccuccugcugugcggccgcagcugcuccgugacguacaaggggguguacgagcuccagacccuggagcugaacauggccaaccucaacaugaccaugccgcugagcugcaccaagaacaacucccaccacuacaucauggucggcaacgagacgggccuggagcucacccugaccaacaccagcaucaucaaccacaaguucugcaaccuguccgacgcccacaagaagaaccucuacgaccacgcccugaugagcaucaucuccacguuccaccugagcauccccaacuucaaccaguacgaggccauguccugcgacuucaacgggggcaagaucagcgugcaguacaaccucucccacagcuucgcgguggacgccgccaaccacugcgggaccaucgccaacggcguccugcagaccuucaugcggauggcguggggcggguccuacaucgcccuggacagcggcaaggggaacugggacugcaucaugaccuccuaccaguaccucaucauccagaacacgaccugggaggaccacugccaguucagccgccccucccccaucggcuaccuggggcugcucagccagcggacccgcgacaucuacaucagccggcgccugcugggcaccuucacguggacccucuccgacagcgagggcaacgaggcccccgggggcuacugccugacccgguggaugcugaucgaggccgagcucaagugcuucgggaacaccgccguggcgaagugcaacgagaagcacgacgaggaguucugcgacaugcugcgccuguucgacuucaacaagcaggccaucaagcggcucaagacgcccgcccagauguccauccagcugaucaacaaggccgugaacgcccugaucaacgaccagcucaucaugaagaaccaccuccgcgacaucaugggcauccccuacugcaacuacagccgguacugcuaccugaaccacaccgucaccgggaagaccucccugccccgcugcugccuggugagcaacggcuccuaccugaacgagacgcacuucagcgacgacaucgagcagcaggcggacaacaugaucaccgagaugcuccagaaggaguacauggaccggcagggcaagaccccgcuggggcugguggaccucuucgucuucuccaccagcuucuaccugaucuccaucuuccugcaccuggugaagaucccgacgcaccgccacaucgugggcaagcccugccccaagccccaccggcucaaccacauggggaucugcagcugcggccuguacaagcacccggggguccccgugaaguggaagcgcugaggacuaguuauaagacugacuagcccgaugggccucccaacgggcccuccuccccuccuugcaccgagauuaaucaaaggcucuuuucagagccaccaaaaaaaaaaaaaaaaaaaaaaaaaaaaaaaaaaaaaaaaaaaaaaaaaaaaaaaaaaaaaaaaaaaaaaaaaaaaaaaaaaaaaaaaaaaaaaaaaaaaa

SEQ ID NO: 32872 - RNA, 1686 nt, Artificial Sequence
  mRNA product Design i-3 (hSL-A100) comprising derived and/or modified sequence from LASV(GA391;Clade III)__CAA36645__GPCmut7 (opt1)
aggagaaagcuuaccaugggccagaucgugaccuucuuccaggaggucccccacgugaucgaggaggugaugaacaucguccugaucgcccucagcauccuggccauccugaaggggcucuacaacguggcgaccugcggccugaucgggcuggugacguuccuccugcuguccggccgcagcugcucccucaucuacaaggggaccuacgagcugcagacccuggagcucaacauggagacccugaacaugacgaugccgcugagcugcaccaagaacaacucccaccacuacauccgggucggcaacgagaccggccucgagcugacccugacgaacaccagcauccucaaccacaaguucugcaaccuguccgacgcccacaagcgcaaccuguacgaccacagccucauguccaucaucagcaccuuccaccuguccauccccaacuucaaccaguacgaggccaugagcugcgacuucaacgggggcaagaucaccgugcaguacaaccugucccacagcuucgccguggacgccgcggggcacugcggcacgcucgccaacgggguccugcagaccuucaugcggauggccuggggcggcuccuacaucgcccuggacagcgggcgcggcaacugggacugcaucaugaccuccuaccaguaccucaucauccagaacaccacgugggacgaccacugccaguucagccggcccucccccaucggguaccugggccugcucagccagcgcacccgggacaucuacaucagccgccggcugcugggcaccuucaccuggacgcucuccgacagcgaggggaacgagaccccgggcggguacugccugacccgcuggaugcugaucgaggcggagcucaagugcuucggcaacaccgccguggccaagugcaacgagaagcacgacgaggaguucugcgacaugcugcggcuguucgacuucaacaagcaggccauccgccggcucaagacgcccgcccagauguccauccagcugaucaacaaggcggugaacgcccugaucaacgaccagcucaucaugaagaaccaccuccgcgacaucauggggauccccuacugcaacuacagccgguacugcuaccugaaccacaccuccaccggcaagaccagccugccccgcugcugccugaucuccaacggcagcuaccugaacgagacgaaguucuccgacgacaucgagcagcaggccgacaacaugaucaccgagaugcuccagaaggaguacaucgaccggcaggggaagacgccccugggccuggucgaccuguucguguucagcaccuccuucuaccucaucagcaucuuccugcaccuggugaagaucccgacccaccgccacaucgucgggaagcccugccccaagccccaccggcucaaccacaugggcaucugcuccugcgggcuguacaagcagccgggcgugcccgugcgcuggaagcggugaggacuaguuauaagacugacuagcccgaugggccucccaacgggcccuccuccccuccuugcaccgagauuaaucaaaggcucuuuucagagccaccaaaaaaaaaaaaaaaaaaaaaaaaaaaaaaaaaaaaaaaaaaaaaaaaaaaaaaaaaaaaaaaaaaaaaaaaaaaaaaaaaaaaaaaaaaaaaaaaaaaaa

SEQ ID NO: 32873 - RNA, 1689 nt, Artificial Sequence
  mRNA product Design i-3 (hSL-A100) comprising derived and/or modified sequence from LASV(AV;Clade V)__CCA30314__GPCmut7 (opt1)
aggagaaagcuuaccaugggccagaucgugaccuucuuccaggaggucccccacgugaucgaggaggugaugaacaucguccugaucgcccucagcauccuggccgugcugaaggggcucuacaacaucgcgaccugcggccugaucgggcugaucacguuccuccugcugugcggccgcuccugcagcuccaaccucuacaaggggguguacgagcugcagagccuggaccucaacauggagacccugaacaugaccaugccgcuguccugcaccaagaacaacagccaccacuacauccgggucggcaacgacacgggccucgagcugacccugaccaacaccuccauccucaaccacaaguucugcaaccugagcgacgcccacaagaaggaccuguacgaccacgcccucauguccaucaucagcacguuccaccuguccauccccaacuucaaccaguacgaggccaugagcugcgacuucaacgggggcaagaucuccgugcaguacaaccugagccacuccuacgccaucgacgcggccaaccacugcgggaccguggccaacggcauccuccagaccuucaugcgcauggccuggggcgggagcuacaucgcgcuggacuccggccgggggaacugggacugcaucaugaccagcuaccaguaccugaucauccagaacacgaccugggagaaccacugccaguucucccgccccagccccaucggcuaccucgggcugcugagccagcggacccgcgacaucuacaucucccggcgccuccugggcaccuucacguggacccugagcgacuccgagggcaacgccacccccgggggcuacugccucacccgguggaugcugaucgaggccgagcugaagugcuucgggaacacggccgucgccaagugcaacgagaagcacgacgaggaguucugcgacaugcuccgccuguucgacuucaacaagcaggcgaucagccggcugaagucccccgcccagaugagcauccagcucaucaacaaggccgugaacgcccugaucaacgaccagcugaucaugaagaaccaccuccgcgacaucaugggcauccccuacugcaacuacuccaaguacugcuaccugaaccacaccaucaccgggaagaccagccugcccaagugcugccucguguccaacggcagcuaccugaacgagacgcacuucuccgacgacaucgagcagcaggccgacaacaugaucaccgagaugcugcagaaggaguacauggagcggcagggcaagaccccgcucgggcuggucgaccuguucguguucagcaccuccuucuaccugaucagcaucuuccuccgccuggugaagaucccgacgcaccggcacaucgucggcaagcccugccccaagccccaccgccugaaccacauggggaucugcuccugcggccucuacaagcagccgggggugcccgugcgguggaagcgcugaggacuaguuauaagacugacuagcccgaugggccucccaacgggcccuccuccccuccuugcaccgagauuaaucaaaggcucuuuucagagccaccaaaaaaaaaaaaaaaaaaaaaaaaaaaaaaaaaaaaaaaaaaaaaaaaaaaaaaaaaaaaaaaaaaaaaaaaaaaaaaaaaaaaaaaaaaaaaaaaaaaaa

SEQ ID NO: 32874 - RNA, 1686 nt, Artificial Sequence
  mRNA product Design i-3 (hSL-A100) comprising derived and/or modified sequence from LASV(Togo/2016/7082;Clade VI)__AMR44577__GPCmut7 (opt1)
aggagaaagcuuaccaugggccagaucaucaccuucuuccaggaggugccccacgucaucgaggaggugaugaacaucgugcugaucgcccucagccugcuggccauccucaagggggucuacaacguggcgaccugcggcaucaucgggcuggugacguuccuguuccucugcggccgcuccugcagccugaucuacaagggguccuacgagcugcagacccucgagcugaacauggagacccugaacaugaccaugccgcucagcugcacgaagaacuccagccaccacuacauccgggucggcaacgagaccggccuggagcugacccucaccaacacguccaucaucaaccacaaguucugcaaccugagcgacgcccacaagcgcaaccuguacgaccacgcccucauguccauccugagcaccuuccaccuguccauccccaacuucaaccaguacgaggccaugagcugcgacuucaacgggggcaagaucuccgugcaguacaaccucagccacgccuacgcgguggacgccgccgagcacugcgggaccgucgccaacggcgugcugcagaccuucaugcggauggcguggggcggguccuacaucgcccuggacagcggccgcgggaacugggacugcaucaugacguccuaccaguaccucaucauccagaacaccaccugggaggaccacugccaguucagccggcccucccccaucggcuaccuggggcugcucagccagcgcacccgggacaucuacaucagccgccggcugcugggcacguucaccuggacccucuccgacagcgagggcaacgagacccccgggggcuacugccugacgcgcuggaugcugaucgaggccgagcucaagugcuucgggaacaccgccguggccaagugcaacgagaagcacgacgaggaguucugcgacaugcugcggcuguucgacuucaacaagcaggcgauccagcgccucaagucccccgcccagaugagcauccagcugaucaacaaggccgucaacgcccugaucaacgaccagcucaucaugaagaaccaccuccgggacaugaugggcauccccuacugcaacuacuccaaguacugcuaccugaaccacaccagcuccgggcgcaccagccugcccaagugcugccugguguccaacggcagcuaccugaacgagacgcacuucuccgacgacaucgagcagcaggccgacaacaugaucaccgagaugcuccagaaggaguacaucgaccggcagggcaagaccccgcuggggcugguggaccucuucgucuucagcaccuccuucuaccugaucagcaucuuccugcaccugaucaagaucccgacgcaccgccacaucgugggcaagcccugccccaagccccaccggcucaaccacauggggaucugcuccugcggccuguacaagcagccgggggugcccacccgcuggaagcggugaggacuaguuauaagacugacuagcccgaugggccucccaacgggcccuccuccccuccuugcaccgagauuaaucaaaggcucuuuucagagccaccaaaaaaaaaaaaaaaaaaaaaaaaaaaaaaaaaaaaaaaaaaaaaaaaaaaaaaaaaaaaaaaaaaaaaaaaaaaaaaaaaaaaaaaaaaaaaaaaaaaaa

SEQ ID NO: 32875 - RNA, 1686 nt, Artificial Sequence
  mRNA product Design i-3 (hSL-A100) comprising derived and/or modified sequence from LASV(KAK-428;Clade n.d. (VII))__ANH09740__GPCmut7 (opt1)
aggagaaagcuuaccaugggccagaucgugaccuucuuccaggaggucccccacgugaucgaggaggugaugaacaucguccugaucgcccucagccugcuggccauccucaaggggcuguacaacuucgcgaccugcggcgugaucgggcugaucacguuccuccugcugugcggccgcuccugcagcgccaccuacaaggggcaguacgagcuccagacccuggagcugaacauggagucccucaacaugaccaugccgcugagcugcacgaagaacaacucccaccacuacauccgggccggcaacaacaccggccuggagcucacccugaccaacacgagcaucaucucccacaaguucugcaaccugagcgacgcccacaagaagaaccucuacgaccacacccugauguccaucaucaccaccuuccaccugagcauccccaacuucaaccaguacgaggccauguccugcgacuucaacgggggcaagaucagcauccaguacaaccucucccacagcuacgcgggggacgccgcccagcacugcggcacgguggccaacgggguccugcagaccuucaugcgcauggcguggggcggcuccuaccuggcccucgacagcgggcggcgcggcugggacugcaucaucuccagcuaccaguaccugaucauccagaacaccaccugggacgaccacugccaguucucccggcccagccccaucggguaccugggcuucgugagccagaagacgcgcgacaucuacaucucccggcgccuccugggcaccuucaccuggacccugagcgacuccgaggggcacgacaugccgggcggguacugccucacgcgguggaugcugaucgaggccgaccugaagugcuucggcaacaccgccguggccaagugcaacgagaagcacgacgaggaguucugcgacauguggcgccucuucgacuucaacaagcaggcgauccagcggcugaaggcccccgcccagaugaacauccagcugaucaacaaggccgucaacgcccucaucaacgaccagcugaugaugaagaaccaccuccgcgacaucauggggauccccuacugcaacuacagcaaguucugcuaccugaacaacaccaccacgggccggaccucccugccccgcugcugccugaucagcaacggcuccuaccucaacgagacccacuucagcgacgacaucgagcagcaggcggacaacaugaucaccgagaugcugcagaaggaguacauggaccggcaggggaagacgccccugggccucguggaccuguucguguucuccaccagcuucuaccugaucaccaucuuccuccaccuggucaagaucccgacccaccgccacaucguggggaagcccugccccaagccccaccggcugaaccacaugggcaucugcuccugcgggcuguacaagcagccgggcgugcccguccgcuggaagcggugaggacuaguuauaagacugacuagcccgaugggccucccaacgggcccuccuccccuccuugcaccgagauuaaucaaaggcucuuuucagagccaccaaaaaaaaaaaaaaaaaaaaaaaaaaaaaaaaaaaaaaaaaaaaaaaaaaaaaaaaaaaaaaaaaaaaaaaaaaaaaaaaaaaaaaaaaaaaaaaaaaaaa

SEQ ID NO: 32876 - RNA, 1686 nt, Artificial Sequence; identical to SEQ ID NO: 32870
  mRNA product Design i-3 (hSL-A100) comprising derived and/or modified sequence from LASV(Pinneo-NIG-1969;Clade I)__AIT17836__GPCmut7 (opt1)

SEQ ID NO: 32877 - RNA, 1686 nt, Artificial Sequence
  mRNA product Design i-3 (hSL-A100) comprising derived and/or modified sequence from LASV(ISTH0009-NIG-2011;Clade II)__AIT17404__GPCmut7 (opt1)
aggagaaagcuuaccaugggccagaucaucaccuucuuccaggaggugccccacgucaucgaggaggugaugaacaucgugcugaucgcccucagccugcuggccauccucaaggggaucuacaacgucgcgaccugcggccuguucgggcugguguccuuccuccugcugugcggccgcagcugcuccacgaccuacaaggggguguacgagcuccagacccuggagcuggacauggccagccucaacaugaccaugccgcuguccugcacgaagaacaacagccaccacuacaucauggucggcaacgagaccggccuggagcucacccugaccaacacguccaucaucaaccacaaguucugcaaccugagcgacgcccacaagaagaaccucuacgaccacgcccugauguccaucaucagcaccuuccaccuguccauccccaacuucaaccaguacgaggccaugagcugcgacuucaacgggggcaagaucuccgugcaguacaaccucagccacgcguacgccguggacgccgccaaccacugcgggaccaucgcgaacggcguccugcagaccuucaugcggauggccuggggcggguccuacaucgcccuggacagcggcaagggguccugggacugcaucaugacgagcuaccaguaccucaucauccagaacaccaccugggaggaccacugccaguucucccgccccagccccaucggcuaccuggggcugcucagccagcggacccgcgacaucuacaucucccggcgccugcugggcacguucaccuggacccucagcgacuccgagggcaacgagacccccgggggcuacugccugacgcgguggaugcugaucgaggccgagcucaagugcuucgggaacaccgccguggcgaagugcaacgagaagcacgacgaggaguucugcgacaugcugcgccuguucgacuucaacaagcaggccauccggcgccucaagacccccgcccagaugagcauccagcugaucaacaaggccgugaacgcccugaucaacgaccagcucaucaugaagaaccaccuccgggacaucaugggcaucccguacugcaacuacuccaaguacugcuaccugaaccacaccgucacggggaagaccagccugccccgcugcugccugguguccaacggcagcuaccugaacgagacccacuucuccgacgacaucgagcagcaggcggacaacaugaucaccgagcuccugcagaaggaguacauggaccggcagggcaagacgccccuggggcucguggaccuguucgucuucagcaccuccuucuaccugaucagcaucuuccugcaccucaucaagaucccgacccaccgccacaucaccggcaagcccugccccaagccccaccggcugaaccacauggggaucugcuccugcggccuguacaagcacccgggggugcccgugaaguggaagcgcugaggacuaguuauaagacugacuagcccgaugggccucccaacgggcccuccuccccuccuugcaccgagauuaaucaaaggcucuuuucagagccaccaaaaaaaaaaaaaaaaaaaaaaaaaaaaaaaaaaaaaaaaaaaaaaaaaaaaaaaaaaaaaaaaaaaaaaaaaaaaaaaaaaaaaaaaaaaaaaaaaaaaa

SEQ ID NO: 32878 - RNA, 1686 nt, Artificial Sequence
  mRNA product Design i-3 (hSL-A100) comprising derived and/or modified sequence from LASV(ISTH2010-NIG-2012;Clade II)__AIT17482__GPCmut7 (opt1)
aggagaaagcuuaccaugggccagaucaucaccuucuuccaggaggugccccacgucaucgaggaggugaugaacaucgugcugaucgcccucagccugcuggccauccucaaggggaucuacaacgucgcgaccugcggccuguucgggcugguguccuuccuccugcugugcggccgcagcugcuccacgaccuacaaggggguguacgagcuccagacccuggagcuggacauggccagccucaacaugaccaugccgcuguccugcacgaagaacaacagccaccacuacaucauggucggcaacgagaccggccuggagcucacccugaccaacacguccaucaucaaccacaaguucugcaaccugagcgacgcccacaagaagaaccucuacgaccacgcccugauguccaucaucagcaccuuccaccuguccauccccaacuucaaccaguacgaggccaugagcugcgacuucaacgggggcaagaucuccgugcaguacaaccucagccacgcguacgccguggacgccgccaaccacugcgggaccaucgcgaacggcguccugcagaccuucaugcggauggccuggggcggguccuacaucgcccuggacagcggcaagggguccugggacugcaucaugacgagcuaccaguaccucaucauccagaacaucaccugggaggaccacugccaguucucccgccccagccccaucggcuaccuggggcugcucagccagcggacccgcgacaucuacaucucccggcgccugcugggcaccuucacguggacccucagcgacuccgagggcaacgagacccccgggggcuacugccugacccgguggaugcugaucgaggccgagcucaagugcuucgggaacacggccguggcgaagugcaacgagaagcacgacgaggaguucugcgacaugcugcgccuguucgacuucaacaagcaggccauccggcgccucaagacccccgcccagaugagcauccagcugaucaacaaggccgugaacgcccugaucaacgaccagcucaucaugaagaaccaccuccgggacaucaugggcauccccuacugcaacuacuccaaguacugcuaccugaaccacaccgucaccgggaagacgagccugccccgcugcugccugguguccaacggcagcuaccugaacgagacccacuucuccgacgacaucgagcagcaggcggacaacaugaucaccgagcuccugcagaaggaguacaucgaccggcagggcaagaccccgcuggggcucguggaccuguucgucuucagcacguccuucuaccugaucagcaucuuccugcaccucgugaagaucccgacccaccgccacguggucggcaagcccugccccaagccccaccggcugaaccacauggggaucugcuccugcggccuguacaagcacccgggggugcccgugaaguggaagcgcugaggacuaguuauaagacugacuagcccgaugggccucccaacgggcccuccuccccuccuugcaccgagauuaaucaaaggcucuuuucagagccaccaaaaaaaaaaaaaaaaaaaaaaaaaaaaaaaaaaaaaaaaaaaaaaaaaaaaaaaaaaaaaaaaaaaaaaaaaaaaaaaaaaaaaaaaaaaaaaaaaaaaa

SEQ ID NO: 32879 - RNA, 1686 nt, Artificial Sequence
  mRNA product Design i-3 (hSL-A100) comprising derived and/or modified sequence from LASV(Lassa virus/H.sapiens-wt/NGA/2015/ISTH_0543;Clade II)__AVO03639__GPCmut7 (opt1)
aggagaaagcuuaccaugggccagaucaucaccuucuuccaggaggugccccacgucaucgaggaggugaugaacaucgugcugaucgcccucagccugcuggccauccucaaggggaucuacaacgucgcgaccugcggccuguucgggcugguguccuuccuccugcugugcggccgcagcugcuccacgaccuacaaggggguguacgagcuccagacccuggagcuggacauggccaaccucaacaugaccaugccgcugagcugcacgaagaacaacucccaccacuacaucauggucggcaacgagaccggccuggagcucacccugaccaacacgagcaucaucaaccacaaguucugcaaccuguccgacgcccacaagaagaaccucuacgaccacgcccugaugagcaucaucuccaccuuccaccugagcauccccaacuucaaccaguacgaggccauguccugcgacuucaacgggggcaagaucagcgugcaguacaaccucucccacaccuacgcgguggacgccgccaaccacugcgggaccaucgccaacggcguccugcagacguucaugcggauggcguggggcgggagcuacaucgcccuggacuccggcaaggggagcugggacugcaucaugaccuccuaccaguaccucgugauccagaacaccaccugggaggaccacugccaguucagccgccccucccccaucggcuaccuggggcugcucagccagcggacgcgcgacaucuacaucagccggcgccugcugggcaccuucaccuggacccucuccgacagcgagggcaacgagacgcccgggggcuacugccugacccgguggaugcugaucgaggccgagcucaagugcuucgggaacaccgccguggccaagugcaacgagaagcacgacgaggaguucugcgacaugcugcgccuguucgacuucaacaagcaggcgauccggcgccucaagacccccgcccagauguccauccagcugaucaacaaggccgucaacgcccugaucaacgaccagcucaucaugaagaaccaccuccgggacaucaugggcauccccuacugcaacuacagcaaguacugcuaccugaaccacacggugaccgggaagaccucccugccccgcugcugccuggugagcaacggcuccuaccugaacgagacccacuucagcgacgacaucgagcagcaggccgacaacaugaucacggagcuccugcagaaggaguacaucgaccggcagggcaagaccccgcuggggcucgucgaccuguucguguucuccaccagcuucuaccugaucuccaucuuccugcaccucgugaagaucccgacccaccgccacaucacgggcaagcccugccccaagccccaccggcugaaccacauggggaucugcagcugcggccuguacaagcacccggggguccccgugaaguggaagcgcugaggacuaguuauaagacugacuagcccgaugggccucccaacgggcccuccuccccuccuugcaccgagauuaaucaaaggcucuuuucagagccaccaaaaaaaaaaaaaaaaaaaaaaaaaaaaaaaaaaaaaaaaaaaaaaaaaaaaaaaaaaaaaaaaaaaaaaaaaaaaaaaaaaaaaaaaaaaaaaaaaaaaa

SEQ ID NO: 32880 - RNA, 1686 nt, Artificial Sequence
  mRNA product Design i-3 (hSL-A100) comprising derived and/or modified sequence from LASV(Lassa virus/H.sapiens-wt/NGA/2016/ISTH_0009;Clade II)__AVO03571__GPCmut7 (opt1)
aggagaaagcuuaccaugggccagaucaucaccuucuuccaggaggugccccacgucaucgaggaggugaugaacaucgugcugaucgcccucagccugcuggccauccucaaggggaucuacaacgucgcgaccugcggccugcuggggcucguguccuuccugcugcucugcggccgcagcugcuccacgaccuacaaggggguguacgagcugcagacccuggagcucgacauggccagccugaacaugaccaugccgcuguccugcacgaagaacaacagccaccacuacaucauggucggcaacgagaccggccucgagcugacccugaccaacacguccaucaucaaccacaaguucugcaaccucagcgacgcccacaagaagaaccuguacgaccacgcccugauguccaucaucagcaccuuccaccucuccauccccaacuucaaccaguacgaggccaugagcugcgacuucaacgggggccggaucuccgugcaguacaaccugagccacuccuacgcgguggacgccgccaaccacugcgggaccaucgccaacggcguccugcagaccuucaugcgcauggcguggggcgggagcuacaucgcccucgacuccggcaaggggagcugggacugcaucaugacguccuaccaguaccugaucauccagaacaccaccugggaggaccacugccaguucagccggcccagccccaucggcuaccuggggcuccugucccagcgcacccgggacaucuacaucagccgccggcugcucggcacguucaccuggacccuguccgacagcgagggcaacgagacccccgggggcuacugccugacgcgcuggaugcucaucgaggccgagcugaagugcuucgggaacaccgccguggccaagugcaacgagaagcacgacgaggaguucugcgacaugcugcggcuguucgacuucaacaagcaggcgauccgccggcugaagacccccgcccagauguccauccagcugaucaacaaggccgugaacgcccucaucaacgaccagcugaucaugaagaaccaccuccgcgacaucaugggcaucccguacugcaacuacagcaaguacugcuaccucaaccacaccgucacggggaagaccucccugccccggugcugccuggugagcaacggcuccuaccucaacgagacccacuucagcgacgacaucgagcagcaggccgacaacaugaucaccgagcugcugcagaaggaguacaucgaccgccagggcaagacgccccucgggcugguggaccuguucgucuucuccaccagcuucuaccugaucuccaucuuccuccaccuggugaagaucccgacccaccggcacaucaccggcaagcccugccccaagccccaccgccugaaccacauggggaucugcagcugcggccucuacaaccacccgggggugcccgucaaguggaagcggugaggacuaguuauaagacugacuagcccgaugggccucccaacgggcccuccuccccuccuugcaccgagauuaaucaaaggcucuuuucagagccaccaaaaaaaaaaaaaaaaaaaaaaaaaaaaaaaaaaaaaaaaaaaaaaaaaaaaaaaaaaaaaaaaaaaaaaaaaaaaaaaaaaaaaaaaaaaaaaaaaaaaa

SEQ ID NO: 32881 - RNA, 1686 nt, Artificial Sequence
  mRNA product Design i-3 (hSL-A100) comprising derived and/or modified sequence from LASV(Lassa virus/H.sapiens-wt/NGA/2016/ISTH_0017;Clade II)__AVO03567__GPCmut7 (opt1)
aggagaaagcuuaccaugggccagaucaucaccuucuuccaggaggugccccacgucaucgaggaggugaugaacaucgugcugaucgcccucagccugcuggccauccucaaggggaucuacaacgucgcgaccugcggccuguucgggcugguguccuuccuccugcugugcggccgcagcugcuccacgaccuacaaggggguguacgagcuccagacccuggagcuggacauggccagccucaacaugaccaugccgcuguccugcacgaagaacaacagccaccacuacaucauggucggcaacgagaccggccuggagcucacccugaccaacacguccaucaucaaccacaaguucugcaaccugagcgacgcccacaagaagaaccucuacgaccacgcccugauguccaucaucagcaccuuccaccuguccauccccaacuucaaccaguacgaggccaugagcugcgacuucaacgggggcaagaucuccgugcaguacaaccucagccacaccuacgcgaucgacgccgccaaccacugcgggaccaucgccaacggcgugcugcagacguucaugcggauggcguggggcggguccuacaucgcccuggacagcggcaagggguccugggacugcaucaugaccagcuaccaguaccucaucauccagaacaccaccugggaggaccacugccaguucucccgccccagccccaucggcuaccuggggcugcucagccagcggacgcgcgacaucuacaucucccggcgccugcugggcaccuucaccuggacccucagcgacuccgagggcaacgagacgcccgggggcuacugccugacccgguggaugcugaucgaggccgagcucaagugcuucgggaacaccgccgucgccaagugcaacgagaagcacgacgaggaguucugcgacaugcugcgccuguucgacuucaacaagcaggcgauccggcgccucaagacccccgcccagaugagcauccagcugaucaacaaggccgugaacgcccugaucaacgaccagcucaucaugaagaaccaccuccgggacaucaugggcauccccuacugcaacuacuccaaguacugcuaccugaaccacacggugaccgggaagaccagccugccccgcugcugccuggucuccaacggcagcuaccugaacgagacccacuucuccgacgacaucgagcagcaggccgacaacaugaucacggagcuccugcagaaggaguacauggaccggcagggcaagaccccgcuggggcucguggaccuguucguguucagcaccuccuucuaccugaucagcaucuuccugcaccucguccgcaucccgacccaccggcacgugaucggcaagcccugccccaagccccaccgccugaaccacauggggaucugcuccugcggccuguacaagcacccgggggugcccgucaaguggaagcggugaggacuaguuauaagacugacuagcccgaugggccucccaacgggcccuccuccccuccuugcaccgagauuaaucaaaggcucuuuucagagccaccaaaaaaaaaaaaaaaaaaaaaaaaaaaaaaaaaaaaaaaaaaaaaaaaaaaaaaaaaaaaaaaaaaaaaaaaaaaaaaaaaaaaaaaaaaaaaaaaaaaaa

SEQ ID NO: 32882 - RNA, 1686 nt, Artificial Sequence
  mRNA product Design i-3 (hSL-A100) comprising derived and/or modified sequence from LASV(Lassa virus/H.sapiens-wt/NGA/2018/ISTH_0959;Clade II)__AVV65099__GPCmut7 (opt1)
aggagaaagcuuaccaugggccagaucaucaccuucuuccaggaggugccccacgucaucgaggaggugaugaacaucgugcugaucgcccucagccugcuggccauccucaaggggaucuacaacgucgugaccugcggccuguucgggcugguguccuuccuccugcugugcggccgcagcugcuccacgaccuacaagggggucuacgagcuccagacccuggagcuggacauggcgagccucaacaugaccaugccgcuguccugcacgaagaacaacagccaccacuacaucauggugggcaacgagaccggccuggagcucacccugaccaacacguccaucaucaaccacaaguucugcaaccugagcgacgcccacaagaagaaccucuacgaccacgcccugauguccaucaucagcaccuuccaccuguccauccccaacuucaaccaguacgaggccaugagcugcgacuucaacgggggcaagaucuccgugcaguacaaccucagccacgccuacgcgaucgacgccgccaaccacugcgggaccaucgccaacggcguccugcagaccuucaugcggauggcguggggcggguccuacaucgcccuggacagcggcaagggguccugggacugcaucaugacgagcuaccaguaccucaucauccagaacaccaccugggaggaccacugccaguucucccgccccagccccaucggcuaccuggggcugcucagccagcggacccgcgacaucuacaucucccggcgccugcugggcacguucaccuggacccucagcgacuccgagggcaacgagacccccgggggcuacugccugacgcgguggaugcugaucgaggccgagcucaagugcuucgggaacaccgccguggccaagugcaacgagaagcacgacgaggaguucugcgacaugcugcgccuguucgacuucaacaagcaggcgauccggcgccucaagacccccgcccagaugagcauccagcugaucaacaaggccgugaacgcccugaucaacgaccagcucaucaugaagaaccaccuccgggacaucaugggcaucccguacugcaacuacuccaaguacugcuaccugaaccacaccgucacggggaagaccagccugccccgcugcugccugguguccaacggcagcuaccugaacgagacccacuucuccgacgacaucgagcagcaggccgacaacaugaucaccgagcuccugcagaaggaguacaucgaccggcagggcaagacgccccuggggcucguggaccuguucgucuucagcaccuccuucuaccugaucagcaucuuccugcaccucgugaagaucccgacccaccgccacgugaucggcaagcccugccccaagccccaccggcugaaccacauggggaucugcuccugcggccuguacaagcacccggggguccccgugaaguggaagcgcugaggacuaguuauaagacugacuagcccgaugggccucccaacgggcccuccuccccuccuugcaccgagauuaaucaaaggcucuuuucagagccaccaaaaaaaaaaaaaaaaaaaaaaaaaaaaaaaaaaaaaaaaaaaaaaaaaaaaaaaaaaaaaaaaaaaaaaaaaaaaaaaaaaaaaaaaaaaaaaaaaaaaa

SEQ ID NO: 32883 - RNA, 1686 nt, Artificial Sequence
  mRNA product Design i-3 (hSL-A100) comprising derived and/or modified sequence from LASV(LASV003-NIG-2008;Clade II)__AIT17580__GPCmut7 (opt1)
aggagaaagcuuaccaugggccagaucaucaccuucuuccaggaggugccccacgucaucgaggaggugaugaacaucgugcugaucgcccucagccugcuggccauccucaaggggaucuacaacgucgcgaccugcggccuguucgggcugguguccuuccuccugcugugcggccgcagcugcuccacgaccuacaaggggguguacgagcuccagacccuggagcuggacauggccagccucaacaugaccaugccgcuguccugcacgaagaacaacagccaccacuacaucauggucggcaacgagaccggccuggagcucacccugaccaacacguccaucaucaaccacaaguucugcaaccugagcgacgcccacaagaagaaccucuacgaccacgcccugauguccaucaucagcaccuuccaccuguccauccccaacuucaaccaguacgaggccaugagcugcgacuucaacgggggcaagaucuccgugcaguacaaccucagccacaccuacgcgguggacgccgccaaccacugcgggaccaucgccaacggcguccugcagacguucaugcggauggcguggggcggguccuacaucgcccuggacagcggcaagggguccugggacugcaucaugaccagcuaccaguaccucaucauccagaacaccaccugggaggaccacugccaguucucccgccccagccccaucggcuaccuggggcugcucagccagcggacgcgcgacaucuacaucucccggcgccugcugggcaccuucaccuggacccucagcgacuccgagagcaacgagacgccgggcggguacugccugacccgguggaugcugaucgaggccgagcucaagugcuucggcaacaccgccguggccaagugcaacgagaagcacgacgaggaguucugcgacaugcugcgccuguucgacuucaacaagcaggcgauccggcgccucaaggcccccgcccagauguccauccagcugaucaacaaggccgugaacgcccugaucaacgaccagcucaucaugaagaaccaccuccgggacaucauggggauccccuacugcaacuacagcaaguacugcuaccugaaccacaccgucacgggccgcaccucccugccccggugcugccuggugagcaacggguccuaccugaacgagacccacuucagcgacgacaucgagcagcaggcggacaacaugaucaccgagcuccugcagaaggaguacauggaccgccagggcaagacgccccugggccucguggaccuguucgucuucuccaccagcuucuaccugaucuccaucuuccugcaccucgugaagaucccgacccaccggcacgugaucgggaagcccugccccaagccccaccgccugaaccacaugggcaucugcagcugcgggcuguacaagcacccgggcguccccgugaaguggaagcggugaggacuaguuauaagacugacuagcccgaugggccucccaacgggcccuccuccccuccuugcaccgagauuaaucaaaggcucuuuucagagccaccaaaaaaaaaaaaaaaaaaaaaaaaaaaaaaaaaaaaaaaaaaaaaaaaaaaaaaaaaaaaaaaaaaaaaaaaaaaaaaaaaaaaaaaaaaaaaaaaaaaaa

SEQ ID NO: 32884 - RNA, 1686 nt, Artificial Sequence
  mRNA product Design i-3 (hSL-A100) comprising derived and/or modified sequence from LASV(LASV035-NIG-2009;Clade II)__AIT17588__GPCmut7 (opt1)
aggagaaagcuuaccaugggccagaucaucaccuucuuccaggaggugccccacgucaucgaggaggugaugaacaucgugcugaucgcccucagccugcuggccauccucaaggggaucuacaacgucgcgaccugcggccuguucgggcugguguccuuccuccugcugugcggccgcagcugcuccacgaccuacaaggggguguacgagcuccagacccuggagcuggacauggccagccucaacaugaccaugccgcuguccugcacgaagaacaacagccaccacuacaucauggucggcaacgagaccggccuggagcucacccugaccaacacguccaucaucaaccacaaguucugcaaccugagcgacgcccacaagaagaaccucuacgaccacgcccugauguccaucaucagcaccuuccaccuguccauccccaacuucaaccaguacgaggccaugagcugcgacuucaacgggggcaagaucuccgugcaguacaaccucagccacgcguacgccguggacgccgccaaccacugcgggaccaucgcgaacggcguccugcagaccuucaugcggauggccuggggcggguccuacaucgcccuggacagcggcaagggguccugggacugcaucaugacgagcuaccaguaccucaucauccagaacaccaccugggaggaccacugccaguucucccgccccagccccaucggcuaccuggggcugcucagccagcggacccgcgacaucuacaucucccggcgccugcugggcacguucaccuggacccucagcgacuccgagggcaacgagacccccgggggcuacugccugacgcgguggaugcugaucgaggccgagcucaagugcuucgggaacaccgccguggcgaagugcaacgagaagcacgacgaggaguucugcgacaugcugcgccuguucgacuucaacaagcaggccauccggcgccucaaggcccccgcccagaugagcauccagcugaucaacaaggccgugaacgcgcugaucaacgaccagcucaucaugaagaaccaccuccgggacaucaugggcauccccuacugcaacuacuccaaguacugcuaccugaaccacaccgucaccgggaagacgagccugccccgcugcugccugguguccaacggcagcuaccugaacgagacccacuucuccgacgacaucgagcagcaggccgacaacaugaucaccgagcuccugcagaaggaguacaucgaccggcagggcaagaccccgcuggggcucguggaccuguucgucuucagcacguccuucuaccugaucagcaucuuccugcaccucgugaagaucccgacccaccgccacgugaucggcaagcccugccccaagccccaccggcugaaccacauggggaucugcuccugcggccuguacaagcacccggggguccccgugaaguggaagcgcugaggacuaguuauaagacugacuagcccgaugggccucccaacgggcccuccuccccuccuugcaccgagauuaaucaaaggcucuuuucagagccaccaaaaaaaaaaaaaaaaaaaaaaaaaaaaaaaaaaaaaaaaaaaaaaaaaaaaaaaaaaaaaaaaaaaaaaaaaaaaaaaaaaaaaaaaaaaaaaaaaaaaa

SEQ ID NO: 32885 - RNA, 1686 nt, Artificial Sequence
  mRNA product Design i-3 (hSL-A100) comprising derived and/or modified sequence from LASV(LASV1000-NIG-2009;Clade II)__AIT17782__GPCmut7 (opt1)
aggagaaagcuuaccaugggccagaucaucaccuucuuccaggaggugccccacgucaucgaggaggugaugaacaucgugcugaucgcccucagccugcuggccauccucaaggggaucuacaacgucgcgaccugcggccuguucgggcugguguccuuccuccugcugugcggccgcagcugcuccacgaccuacaaggggguguacgagcuccagacccuggagcuggacauggccagccucaacaugaccaugccgcuguccugcacgaagaacaacagccaccacuacaucauggucggcaacgagaccggccuggagcucacccugaccaacacguccaucaucaaccacaaguucugcaaccugagcgacgcccacaagaagaaccucuacgaccacgcccugauguccaucaucagcaccuuccaccuguccauccccaacuucaaccaguacgaggccaugagcugcgacuucaacgggggcaagaucuccgugcaguacaaccucagccacaccuacgcgguggacgccgccaaccacugcgggaccaucgccaacggcguccugcagacguucaugcggauggcguggggcggguccuacaucgcccuggacagcggcaagggguccugggacugcaucaugaccagcuaccaguaccucaucauccagaacaccaccugggaggaccacugccaguucucccgccccagccccaucggcuaccuggggcugcucagccagcggacgcgcgacaucuacaucucccggcgccugcugggcaccuucaccuggacccucagcgacuccgagggcaacgagacgcccgggggcuacugccugacccgguggaugcugaucgaggccgagcucaagugcuucgggaacaccgccguggccaagugcaacgagaagcacgacgaggaguucugcgacaugcugcgccuguucgacuucaacaagcaggcgaucaagcggcucaagacccccgcccagaugagcauccagcugaucaacaaggccgugaacgcccugaucaacgaccagcucaucaugaagaaccaccuccgcgacaucaugggcauccccuacugcaacuacuccaaguacugcuaccugaaccacacggucaccgggaagaccagccugccccggugcugccugguguccaacggcagcuaccugaacgagacccacuucuccgacgacaucgagcagcaggccgacaacaugaucacggagcuccugcagaaggaguacaucgaccgccagggcaagaccccgcuggggcucguggaccuguucgucuucagcaccuccuucuaccugaucagcaucuuccugcaccucgugaagaucccgacccaccggcacguggucggcaagcccugccccaagccccaccgccugaaccacauggggaucugcuccugcggccuguacaagcacccgggggugcccgugaaguggaagcggugaggacuaguuauaagacugacuagcccgaugggccucccaacgggcccuccuccccuccuugcaccgagauuaaucaaaggcucuuuucagagccaccaaaaaaaaaaaaaaaaaaaaaaaaaaaaaaaaaaaaaaaaaaaaaaaaaaaaaaaaaaaaaaaaaaaaaaaaaaaaaaaaaaaaaaaaaaaaaaaaaaaaa

SEQ ID NO: 32886 - RNA, 1686 nt, Artificial Sequence
  mRNA product Design i-3 (hSL-A100) comprising derived and/or modified sequence from LASV(LASV221-NIG-2010;Clade II)__AIT17624__GPCmut7 (opt1)
aggagaaagcuuaccaugggccagaucaucaccuucuuccaggaggugccccacgucaucgaggaggugaugaacaucgugcugaucgcccucagccugcuggccauccucaaggggaucuacaacgucgcgaccugcggccuguucgggcugguguccuuccuccugcugugcggccgcagcugcuccacgaccuacaaggggguguacgagcuccagacccuggagcuggacauggccagccucaacaugaccaugccgcuguccugcacgaagaacaacagccaccacuacaucauggucggcaacgagaccggccuggagcucacccugaccaacacguccaucaucaaccacaaguucugcaaccugagcgacgcccacaagaagaaccucuacgaccacgcccugauguccaucaucagcaccuuccaccuguccauccccaacuucaaccaguacgaggccaugagcugcgacuucaacgggggcaagaucuccgugcaguacaaccucagccacaccuacgcgaucgacgccgccaaccacugcgggaccaucgccaacggcgugcugcagacguucaugcggauggcguggggcggguccuacaucgcccuggacagcggcaagggguccugggacugcaucaugaccagcuaccaguaccucaucauccagaacaccaccugggaggaccacugccaguucucccgccccagccccaucggcuaccuggggcugcucagccagcggacgcgcgacaucuacaucucccggcgccugcugggcaccuucaccuggacccucagcgacuccgagggcaacgagacgcccgggggcuacugccugacccgguggaugcugaucgaggccgagcucaagugcuucgggaacaccgccgucgccaagugcaacgagaagcacgacgaggaguucugcgacaugcugcgccuguucgacuucaacaagcaggcgauccggcgccucaagacccccgcccagaugagcauccagcugaucaacaaggccgugaacgcccugaucaacgaccagcucaucaugaagaaccaccuccgggacaucaugggcauccccuacugcaacuacuccaaguacugcuaccugaaccacacggugaccgggaagaccagccugccccgcugcugccuggucuccaacggcagcuaccugaacgagacccacuucuccgacgacaucgagcagcaggccgacaacaugaucacggagaugcuccagaaggaguacauggaccggcagggcaagaccccgcuggggcugguggaccucuucguguucagcaccuccuucuaccugaucagcaucuuccugcaccuggucaagaucccgacccaccgccacgugaucggcaagcccugccccaagccccaccggcucaaccacauggggaucugcuccugcggccuguacaagcacccgggggugcccgucaaguggaagcgcugaggacuaguuauaagacugacuagcccgaugggccucccaacgggcccuccuccccuccuugcaccgagauuaaucaaaggcucuuuucagagccaccaaaaaaaaaaaaaaaaaaaaaaaaaaaaaaaaaaaaaaaaaaaaaaaaaaaaaaaaaaaaaaaaaaaaaaaaaaaaaaaaaaaaaaaaaaaaaaaaaaaaa

SEQ ID NO: 32887 - RNA, 1686 nt, Artificial Sequence
  mRNA product Design i-3 (hSL-A100) comprising derived and/or modified sequence from LASV(LASV237-NIG-2010;Clade II)__AIT17638__GPCmut7 (opt1)
aggagaaagcuuaccaugggccagaucaucaccuucuuccaggaggugccccacgucaucgaggaggugaugaacaucgugcugaucgcccucagccugcuggccauccucaaggggaucuacaacgucgcgaccugcggccuguucgggcugguguccuuccuccugcugugcggccgcagcugcuccacgaccuacaaggggguguacgagcuccagacccuggagcuggacauggccagccucaacaugaccaugccgcuguccugcacgaagaacaacagccaccacuacaucauggucggcaacgagaccggccuggagcucacccugaccaacacguccaucaucaaccacaaguucugcaaccugagcgacgcccacaagaaggaccucuacgaccacgcccugauguccaucaucagcaccuuccaccuguccauccccaacuucaaccaguacgaggccaugagcugcgacuucaacgggggcaagaucuccgugcaguacaaccucagccacaccuacgcgguggacgccgccaaccacugcgggaccaucgccaacggcguccugcagacguucaugcggauggcguggggcggguccuacaucgcccuggacagcggcaagggguccugggacugcaucaugaccagcuaccaguaccucaucauccagaacaccaccugggaggaccacugccaguucucccgccccagccccaucggcuaccuggggcugcucagccagcggacgcgcgacaucuacaucucccggcgccugcugggcaccuucaccuggacccucagcgacuccgagggcaacgagacgcccgggggcuacugccugacccgguggaugcugaucgaggccgagcucaagugcuucgggaacaccgccguggccaagugcaacgagaagcacgacgaggaguucugcgacaugcugcgccuguucgacuucaacaagcaggcgauccggcgccucaagacccccgcccagaugagcauccagcugaucaacaaggccgugaacgcccugaucaacgaccagcucaucaugaagaaccaccuccgggacaucaugggcauccccuacugcaacuacuccaaguacugcuaccugaaccacacggucaccgggaagaccagccugccccgcugcugccugguguccaacggcagcuaccugaacgagacccacuucuccgacgacaucgagcagcaggccgacaacaugaucacggagcuccugcagaaggaguacauggaccggcagggcaagaccccgcuggggcucguggaccuguucgucuucagcaccuccuucuaccugaucagcaucuuccugcaccucaucaagaucccgacccaccgccacaucacgggcaagcccugccccaagccccaccggcugaaccacauggggaucugcuccugcggccuguacaagcacccgggggugcccgugaaguggaagcgcugaggacuaguuauaagacugacuagcccgaugggccucccaacgggcccuccuccccuccuugcaccgagauuaaucaaaggcucuuuucagagccaccaaaaaaaaaaaaaaaaaaaaaaaaaaaaaaaaaaaaaaaaaaaaaaaaaaaaaaaaaaaaaaaaaaaaaaaaaaaaaaaaaaaaaaaaaaaaaaaaaaaaa

SEQ ID NO: 32888 - RNA, 1686 nt, Artificial Sequence
  mRNA product Design i-3 (hSL-A100) comprising derived and/or modified sequence from LASV(LASV253-NIG-2011;Clade II)__AIT17670__GPCmut7 (opt1)
aggagaaagcuuaccaugggccagaucaucaccuucuuccaggaggugccccacgucaucgaggaggugaugaacaucgugcugaucgcccucagccugcuggccauccucaaggggaucuacaacgucgcgaccugcggccuguucgggcugguguccuuccuccugcugugcggccgcagcugcuccacgaccuacaaggggguguacgagcuccagacccuggagcuggacauggccagccucaacaugaccaugccgcuguccugcacgaagaacaacagccaccacuacaucauggucggcaacgagaccggccuggagcucacccugaccaacacguccaucaucaaccacaaguucugcaaccugagcgacgcccacaagaagaaccucuacgaccacgcccugauguccaucaucagcaccuuccaccuguccauccccaacuucaaccaguacgaggccaugagcugcgacuucaacgggggcaagaucuccgugcaguacaaccucagccacaccuacgcgguggacgccgccaaccacugcgggaccaucgccaacggcguccugcagacguucaugcggauggcguggggcggguccuacaucgcccuggacagcggcaagggguccugggacugcaucaugaccagcuaccaguaccucaucauccagaacaccaccugggaggaccacugccaguucucccgccccagccccaucggcuaccuggggcugcucagccagcggacgcgcgacaucuacaucucccggcgccugcugggcaccuucaccuggacccucagcgacuccgagggcaacgagacgcccgggggcuacugccugacccgguggaugcugaucgaggccgagcucaagugcuucgggaacaccgccguggccaagugcaacgagaagcacgacgaggaguucugcgacaugcugcgccuguucgacuucaacaagcaggcgauccggcgccucaaggcccccgcccagaugagcauccagcugaucaacaaggccgugaacgcccugaucaacgaccagcucaucaugaagaaccaccuccgggacaucaugggcaucccguacugcaacuacuccaaguacugcuaccugaaccacaccgucacggggcgcaccagccugccccggugcugccugguguccaacggcagcuaccugaacgagacccacuucuccgacgacaucgagcagcaggcggacaacaugaucaccgagcuccugcagaaggaguacaucgaccgccagggcaagacgccccuggggcucguggaccuguucgucuucagcaccuccuucuaccugaucagcaucuuccugcaccucgugaagaucccgacccaccggcacaucaucggcaagcccugccccaagccccaccgccugaaccacauggggaucugcuccugcggccuguacaagcacccgggggugcccgucaaguggaagcggugaggacuaguuauaagacugacuagcccgaugggccucccaacgggcccuccuccccuccuugcaccgagauuaaucaaaggcucuuuucagagccaccaaaaaaaaaaaaaaaaaaaaaaaaaaaaaaaaaaaaaaaaaaaaaaaaaaaaaaaaaaaaaaaaaaaaaaaaaaaaaaaaaaaaaaaaaaaaaaaaaaaaa

SEQ ID NO: 32889 - RNA, 1686 nt, Artificial Sequence
  mRNA product Design i-3 (hSL-A100) comprising derived and/or modified sequence from LASV(LASV254-NIG-2011;Clade II)__AIT17674__GPCmut7 (opt1)
aggagaaagcuuaccaugggccagaucaucaccuucuuccaggaggugccccacgucaucgaggaggugaugaacaucgugcugaucgcccucagccugcuggccauccucaaggggaucuacaacgucgcgaccugcggccuguucgggcugguguccuuccuccugcugugcggccgcagcugcuccacgaccuacaaggggguguacgagcuccagacccuggagcuggacaugaccaaccucaacaugacgaugccgcugagcugcaccaagaacaacucccaccacuacaucauggucggcaacgagaccggccuggagcucacccugacgaacaccagcaucaucaaccacaaguucugcaaccuguccgacgcccacaagaagaaccucuacaaccacgcccugaugagcaucaucuccaccuuccaccugagcauccccaacuucaaccaguacgaggccauguccugcgacuucaacgggggcaagaucagcgugcaguacaaccucucccacagcuacgccguggacgcggccaaccacugcgggaccaucgccaacggcguccugcagacguucaugcggauggccuggggcggguccuacaucgcgcuggacagcggcaaggggaacugggacugcaucaugaccuccuaccaguaccucaucauccagaacaccaccugggaggaccacugccaguucagccgccccucccccaucggcuaccuggggcugcucagccagcggacgcgcgacaucuacaucagccggcgccugcugggcaccuucaccuggacccucuccgacagcgagggcaacgagacgcccgggggcuacugccugacccgguggaugcugaucgaggccgagcucaagugcuucgggaacaccgccguggccaagugcaacgagaagcacgacgaggaguucugcgacaugcugcgccuguucgacuucaacaagcaggccauccggcgccucaagacccccgcgcaggccaacauccagcugaucaacaaggccgugaacgcccugaucaacgaccagcucaucaugaagaaccaccuccgggacaucaugggcauccccuacugcaacuacuccaaguacugcuaccugaaccacacggucaccgggaagaccagccugccccgcugcugccugguguccaacggcagcuaccugaacgagacccacuucuccgacgacaucgagcagcaggccgacaacaugaucacggagcuccugcagaaggaguacauggaccggcagggcaagaccccgcuggggcucguggaccuguucgucuucagcaccuccuucuaccugaucagcaucuuccugcaccucgugaagaucccgacccaccgccacgugaucggcaagcccugccccaagccccaccggcugaaccacauggggaucugcuccugcggccuguacaagcacccggggguccccgugaaguggaagcgcugaggacuaguuauaagacugacuagcccgaugggccucccaacgggcccuccuccccuccuugcaccgagauuaaucaaaggcucuuuucagagccaccaaaaaaaaaaaaaaaaaaaaaaaaaaaaaaaaaaaaaaaaaaaaaaaaaaaaaaaaaaaaaaaaaaaaaaaaaaaaaaaaaaaaaaaaaaaaaaaaaaaaa

SEQ ID NO: 32890 - RNA, 1686 nt, Artificial Sequence
  mRNA product Design i-3 (hSL-A100) comprising derived and/or modified sequence from LASV(Nig08-A19;Clade III)__ADU56618__GPCmut7 (opt1)
aggagaaagcuuaccaugggccagaucgugaccuucuuccaggaggucccccacgugaucgaggaggugaugaacaucguccugaucgcccucagcauccuggccauccugaaggggcucuacaacaucgcgaccugcggccugaucgggcuggugacguuccuccugcuguccggccgcagcugcuccaugaccuacaaggggguguacgagcuccagacccuggagcugaacaugaacacccucaacaugacgaugccgcugagcugcaccaagaacaacucccaccacuacaucauggucggcaacgagaccggccuggagcucacccugacgaacaccagccugcuccaccacaaguucugcaaccuguccgacgcccacaagaagaaccuguacgaccacacccucaugagcaucaucuccaccuuccaccugagcauccccaacuucaaccaguacgaggccauguccugcgacuucaacgggggcaagaucacggugcaguacaaccugagccacuccuacgccaucgacgccgcgaaccacugcgggaccguggccaacggcguccuccagaccuucaugcggauggccuggggcgggagcuacaucgcccuggacuccggccgcgggaagugggacugcaucaugaccagcuaccaguaccugaucauccagaacacgaccugggaggaccacugccaguucucccggcccagccccaucggcuaccucgggcugcugucccagcgcacccgggacaucuacaucagccgccggcuccugggcaccuucacguggacccugagcgacuccgagggcaacgagacccccgggggcuacugccucacccgcuggaugcugaucgaggcggagcugaagugcuucgggaacacggccguggccaagugcaacgagaagcacgacgaggaguucugcgacaugcuccggcuguucgacuucaacaagcaggccauccgccggcugaaggcccccgcgcagaugagcauccagcucaucaacaaggccgugaacgcccugaucaacgaccagcugaucaugaagaaccaccuccgcgacaucaugggcauccccuacugcaacuacuccaaguacugcuaccugaaccacaccagcaccgggcggaccucccugccccgcugcugccucgucagcaacggcuccuaccugaacgagacgcacuucagcgacgacaucgagcagcaggccgacaacaugaucaccgagaugcugcagaaggaguaccucgaccggcagggcaagaccccgcuggggcugguggaccuguucguguucuccaccagcuucuaccucaucuccaucuuccugcaccuggucaagaucccgacgcaccgccacaucgugggcaagcccugccccaagccccaccggcucaaccacauggggaucugcagcugcggccuguacaagcagccgggggugcccguccgcuggaagcggugaggacuaguuauaagacugacuagcccgaugggccucccaacgggcccuccuccccuccuugcaccgagauuaaucaaaggcucuuuucagagccaccaaaaaaaaaaaaaaaaaaaaaaaaaaaaaaaaaaaaaaaaaaaaaaaaaaaaaaaaaaaaaaaaaaaaaaaaaaaaaaaaaaaaaaaaaaaaaaaaaaaaa

SEQ ID NO: 32891 - RNA, 1689 nt, Artificial Sequence
  mRNA product Design i-3 (hSL-A100) comprising derived and/or modified sequence from LASV(G1180-SLE-2010;Clade IV)__AIT17168__GPCmut7 (opt1)
aggagaaagcuuaccaugggccagaucgugaccuucuuccaggaggucccccacgugaucgaggaggugaugaacaucguccugaucgcccucagcauccuggccgugcugaaggggcucuacaacuucgcgaccugcggccugguggggcugcucaccuuccugcugcucugcggccgcuccugcaccgccagccgguacaagggggucuacgagcugcagacccuggagcucaacauggagacccugaacaugacgaugccgcuguccugcaccaagaacaacagccaccacuacaucauggugggcaacgagaccggccucgagcugacccugacgaacaccuccaucaucaaccacaaguucugcaaccucagcgacgcccacaagaagaaccuguacgaccacgcccugauguccaucaucagcaccuuccaccucuccauccccaacuucaaccaguacgaggccaugagcugcgacuucaacgggggcaagaucuccgugcaguacaaccugagccacuccuacgcgggggacgccgccaaccacugcggcaccgucgccaacggggugcugcagacguucaugcgcauggcguggggcggcagcuacaucgcccucgacuccgggcacggcagcugggacugcaucaugaccuccuaccaguaccugaucauccagaacaccaccugggaggaccacugccaguucagccggcccucccccaucggguaccugggccuccugagccagcgcacgcgggacaucuacaucagccgccggcugcucggcaccuucaccuggacccuguccgacagcgaggggaaggacacgccgggcggguacugccugacccgcuggaugcucaucgaggccgagcugaagugcuucggcaacaccgccguggccaagugcaacgagaagcacgacgaggaguucugcgacaugcugcggcuguucgacuucaacaagcaggcgauccagcgccugaaggcccccgcccagauguccauccagcugaucaacaaggccgucaacgcccucaucaacgaccagcugaucaugaagaaccaccuccgggacaucauggggauccccuacugcaacuacagcaaguacugcuaccucaaccacaccacgaccggcaagaccucccugcccaagugcugccuggugagcaacggcuccuaccucaacgagacccacuucagcgacgacaucgagcagcaggcggacaacaugaucacggagaugcugcagaaggaguacauggagcgccaggggaagacgccccugggccucguggaccuguucgucuucuccaccagcuucuaccugaucuccaucuuccugcaccucgugaagaucccgacccaccggcacaucgugggcaagagcugccccaagccccaccgccugaaccacauggggaucugcuccugcgggcuguacaagcagcccggcgucccggugaaguggaagcggugaggacuaguuauaagacugacuagcccgaugggccucccaacgggcccuccuccccuccuugcaccgagauuaaucaaaggcucuuuucagagccaccaaaaaaaaaaaaaaaaaaaaaaaaaaaaaaaaaaaaaaaaaaaaaaaaaaaaaaaaaaaaaaaaaaaaaaaaaaaaaaaaaaaaaaaaaaaaaaaaaaaaa

SEQ ID NO: 32892 - RNA, 1689 nt, Artificial Sequence
  mRNA product Design i-3 (hSL-A100) comprising derived and/or modified sequence from LASV(G1442-SLE-2011;Clade IV)__AIT17180__GPCmut7 (opt1)
aggagaaagcuuaccaugggccagaucgugaccuucuuccaggaggucccccacgugaucgaggaggugaugaacaucguccugaucgcccucagcauccuggccgugcugaaggggcucuacaacguggcgaccugcggccugaucgggcuggucacguuccuccugcugugcggccgcuccugcaccaccacccucuacaaggggguguacgagcugcagacgcuggagcucaacauggagacccugaacaugaccaugccgcugagcugcaccaagaacaacucccaccacuacauccgggugggcaacgagacgggccucgagcugacccugaccaacaccagcaucaucaaccacaaguucugcaaccucuccgacgcccacaagaagaaccuguacgaccacgcccugaugagcaucaucuccacguuccaccucagcauccccaacuucaaccaguacgaggccauguccugcgacuucaacgggggcaagaucagcguccaguacaaccugucccacagcuacgccggggacgcggccaaccacugcggcaccguggccaacggggugcugcagaccuucaugcgcauggccuggggcggcuccuacaucgcgcucgacagcgggcggggcaacugggacugcaucaugaccuccuaccaguaccugaucauccagaacacgaccugggacgaccacugccaguucagccgccccucccccaucggguaccugggccuccugagccagcggacccgcgacgucuacaucucccggcgccugcucggcaccuucacguggacccugagcgacagcgaggggaaggacaccccgggcggguacugccugacccgguggaugcucaucgaggccgagcugaagugcuucggcaacacggccguggccaagugcaacgagaagcacgacgaggaguucugcgacaugcugcgccucuucgacuucaacaagcaggccauccagcggcugaaggcgcccgcccagauguccauccagcugaucaacaaggccgugaacgcccucaucaacgaccagcugaucaugaagaaccaccuccgcgacaucauggggauccccuacugcaacuacagcaaguacugcuaccugaacaacaccgccaccggcaagaccucccugcccaagugcugccugaucagcaacggcuccuaccucaacgagacgcacuucagcgacgacaucgagcaggaggcggacaacaugaucaccgagaugcugcagaaggaguacauggagcggcaggggaagacgccccugggccucgucgaccuguucguguucuccaccagcuucuaccugaucuccaucuuccugcaccucgugaagaucccgacccaccgccacaucgucggcaagagcugccccaagccccaccggcugaaccacauggggaucugcuccugcgggcuguacaagcagcccggcgugccggugcgcuggaagcggugaggacuaguuauaagacugacuagcccgaugggccucccaacgggcccuccuccccuccuugcaccgagauuaaucaaaggcucuuuucagagccaccaaaaaaaaaaaaaaaaaaaaaaaaaaaaaaaaaaaaaaaaaaaaaaaaaaaaaaaaaaaaaaaaaaaaaaaaaaaaaaaaaaaaaaaaaaaaaaaaaaaaa

SEQ ID NO: 32893 - RNA, 1689 nt, Artificial Sequence
  mRNA product Design i-3 (hSL-A100) comprising derived and/or modified sequence from LASV(G3010-SLE-2013;Clade IV)__AIT17344__GPCmut7 (opt1)
aggagaaagcuuaccaugggccagaucgugaccuucuuccaggaggucccccacgugaucgaggaggugaugaacaucguccugaucgcccucagcauccuggccgugcugaaggggcucuacaacuucgcgaccugcggccugguggggcuggucacguuccuccugcugugcggccgcuccugcaccaccagccucuacaaggggguguacgagcugcagacccuggagcucaacauggagacgcugaacaugaccaugccgcuguccugcaccaagaacaacagccaccacuacaucauggugggcaacgagaccggccucgagcugacgcugaccaacaccuccaucaucaaccacaaguucugcaaccucagcgacgcccacaagaagaaccuguacaaccacgcccugauguccaucaucagcaccuuccaccucuccauccccaacuucaaccaguacgaggccaugagcugcgacuucaacgggggcaagaucuccguccaguacaaccugagccacuccuacgccggggacgcggccagccacugcggcacgguggccaacggggugcugcagaccuucaugcggauggccuggggcggcuccuacaucgcgcucgacagcggguacggcaagugggacugcaucaugaccuccuaccaguaccugaucauccagaacaccacgugggaggaccacugccaguucagccgccccucccccaucggguaccugggccuccugagccagcggacccgcgacaucuacaucagccggcgccugcucggcaccuucaccuggacgcuguccgacagcgaggggaaggacaccccgggcggguacugccugacccgguggaugcucaucgaggccgagcugaagugcuucggcaacaccgccgucgccaagugcaacgagaagcacgacgaggaguucugcgacaugcugcgccucuucgacuucaacaagcaggccauccagcggcugaagacgcccgcgcagauguccauccagcugaucaacaaggccgugaacgcccucaucaacgaccagcugaucaugaagaaccaccuccgcgacaucauggggauccccuacugcaacuacagcaaguacugcuaccugaaccacaccaccaccggcaagacgucccugcccaagugcugccuggugagcaacggcuccuaccucaacgagacccacuucagcgacgacaucgagcagcaggccgacaacaugaucaccgagaugcugcagaaggaguacauggagcggcaggggaagacgccccugggccucgucgaccuguucguguucuccaccagcuucuaccugaucuccaucuuccugcaccucgugaagaucccgacccaccgccacaucgucggcaagagcugccccaagccccaccggcugaaccacauggggaucugcuccugcgggcuguacaagcagcccggcgugccggugcgcuggaagcggugaggacuaguuauaagacugacuagcccgaugggccucccaacgggcccuccuccccuccuugcaccgagauuaaucaaaggcucuuuucagagccaccaaaaaaaaaaaaaaaaaaaaaaaaaaaaaaaaaaaaaaaaaaaaaaaaaaaaaaaaaaaaaaaaaaaaaaaaaaaaaaaaaaaaaaaaaaaaaaaaaaaaa

SEQ ID NO: 32894 - RNA, 1689 nt, Artificial Sequence
  mRNA product Design i-3 (hSL-A100) comprising derived and/or modified sequence from LASV(G502-SLE-2009;Clade IV)__AIT17126__GPCmut7 (opt1)
aggagaaagcuuaccaugggccagaucgugaccuucuuccaggaggucccccacgugaucgaggaggugaugaacaucguccugaucgcccucagcauccuggccgugcugaaggggcucuacaacuucgcgaccugcggccugguggggcugcucacguuccugcugcucugcggccgcuccugcaccaccgggcuguacaagggcgucuacgagcugcagacccucgagcugaacauggagacgcugaacaugaccaugccgcucagcugcaccaagaacaacucccaccacuacaucauggugggcaacgagaccgggcuggagcugacgcucaccaacaccagcaucaucaaccacaaguucugcaaccuguccgacgcccacaagaagaaccuguacgaccacgcccucaugagcaucaucuccaccuuccaccugagcauccccaacuucaaccaguacgaggccauguccugcgacuucaacggcgggaagaucagcgugcaguacaaccugucccacagcuacgccggcgacgcggccgaccacugcgggacggucgccaacggcgugcuccagaccuucaugcggauggccuggggcggguccuacaucgcgcuggacagcggccgcgggcggugggacugcaucaugaccuccuaccaguaccugaucauccagaacaccacgugggaggaccacugccaguucagccgccccucccccaucggcuaccucggccugcugagccagcggacccgcgacaucuacaucucccggcgccuccuggggaccuucaccuggacgcugagcgacagcgagggcaaggacacccccgggggcuacugccucacccgguggaugcugaucgaggccgagcugaagugcuucgggaacaccgccguggccaagugcaacgagaagcacgacgaggaguucugcgacaugcuccgccuguucgacuucaacaagcaggccauccagcggcugaaggcgcccgcccagauguccauccagcucaucaacaaggccgucaacgcccugaucaacgaccagcuggugaugaagaaccaccuccgcgacaucaugggcauccccuacugcaacuacagccgguacugcuaccugaaccacacgaccaccggccgcaccucccugcccaagugcugccucgugagcaacggguccuaccugaacgagacgcacuucagcgacgacaucgagcagcaggccgacaacaugaucaccgagaugcugcagaaggaguacauggagcggcagggcaagaccccgcucgggcuggucgaccuguucguguucuccaccagcuucuaccugaucuccaucuuccuccaccuggugaagaucccgacgcaccgccacaucgucggcaagagcugccccaagccccaccggcugaaccacauggggaucugcuccugcggccucuacaagcagcccggcgugccggugaaguggaagcgcugaggacuaguuauaagacugacuagcccgaugggccucccaacgggcccuccuccccuccuugcaccgagauuaaucaaaggcucuuuucagagccaccaaaaaaaaaaaaaaaaaaaaaaaaaaaaaaaaaaaaaaaaaaaaaaaaaaaaaaaaaaaaaaaaaaaaaaaaaaaaaaaaaaaaaaaaaaaaaaaaaaaaa

SEQ ID NO: 32895 - RNA, 1689 nt, Artificial Sequence
  mRNA product Design i-3 (hSL-A100) comprising derived and/or modified sequence from LASV(G733-SLE-2010;Clade IV)__AIT17154__GPCmut7 (opt1)
aggagaaagcuuaccaugggccagaucgugaccuucuuccaggaggucccccacgugaucgaggaggugaugaacaucguccugaucgcccucagcauccuggccgugcugaaggggcucuacaacuucgcgaccugcggcaucguggggcuggucuccuuccugcuccugugcggccgcagcugcacgaccucccuguacaaggggguguacgagcuccagacccuggagcugaacauggagacccucaacaugacgaugccgcugagcugcaccaagaacaacucccaccacuacaucauggugggcaacgagaccggccuggagcucacccugacgaacaccagcaucaucaaccacaaguucugcaaccuguccgacgcccacaagaagaaccucuacgaccacgcccugaugagcaucaucuccaccuuccaccugagcauccccaacuucaaccaguacgaggccauguccugcgacuucaacgggggcaagaucagcguccaguacaaccucucccacagcuacgccggggacgcggccaaccacugcggcaccaucgccaacggggugcugcagacguucaugcggauggccuggggcggcuccuacaucgcgcuggacagcgggcgcgaccggugggacugcaucaugaccuccuaccaguaccucaucauccagaacaccaccugggaggaccacugccaguucagccgccccucccccaucggcuaccuggggcugcucagccagcggacgcgcgacaucuacaucagccggcgccugcugggcaccuucaccuggacccucuccgacagcgagggcaaggacacgcccgggggcuacugccugacccgguggaugcugaucgaggccgagcucaagugcuucgggaacaccgccguggccaagugcaacgagaagcacgacgaggaguucugcgacaugcugcgccuguucgacuucaacaagcaggccauccagcggcucaaggcgcccgcccagauguccauccagcugaucaacaaggccgucaacgcccugaucaacgaccagcucaucaugaagaaccaccuccgcgacaucaugggcauccccuacugcaacuacagcaaguacugcuaccugaaccacaccacgaccgggaagaccucccugcccaagugcugccuggugagcaacggcuccuaccugaacgagacccacuucagcgacgacaucgagcagcaggccgacaacaugaucacggagaugcuccagaaggaguacauggagcggcagggcaagaccccgcuggggcugguggaccucuucgucuucuccaccagcuucuaccugaucuccaucuuccugcaccuggugaagaucccgacccaccgccacguggucggcaagagcugccccaagccccaccggcucaaccacauggggaucugcuccugcggccuguacgggcagcccggcgugccggugaaguggaagcgcugaggacuaguuauaagacugacuagcccgaugggccucccaacgggcccuccuccccuccuugcaccgagauuaaucaaaggcucuuuucagagccaccaaaaaaaaaaaaaaaaaaaaaaaaaaaaaaaaaaaaaaaaaaaaaaaaaaaaaaaaaaaaaaaaaaaaaaaaaaaaaaaaaaaaaaaaaaaaaaaaaaaaa

SEQ ID NO: 32896 - RNA, 1689 nt, Artificial Sequence
  mRNA product Design i-3 (hSL-A100) comprising derived and/or modified sequence from MOPV/LASV reassortant(IGS-1;Clade IV)__AFY05576__GPCmut7 (opt1)
aggagaaagcuuaccaugggccagaucgugaccuucuuccaggaggucccccacgugaucgaggaggugaugaacaucguccugaucgcccucagcgugcuggccgugcugaaggggcucuacaacuucgcgaccugcggccuggucgggcuggugacguuccuccugcugugcggccgcuccugcaccaccagccucuacaaggggguguacgagcugcagacccuggagcucaacauggagacgcugaacaugaccaugccgcuguccugcaccaagaacaacagccaccacuacaucauggucggcaacgagaccggccucgagcugacgcugaccaacaccuccaucaucaaccacaaguucugcaaccucagcgacgcccacaagaagaaccuguacgaccacgcccugauguccaucaucagcaccuuccaccucuccauccccaacuucaaccaguacgaggccaugagcugcgacuucaacgggggcaagaucuccgugcaguacaaccugagccacuccuacgccggggacgcggccaaccacugcggcacgguggccaacgggguccugcagaccuucaugcggauggccuggggcggcagcuacaucgcgcucgacuccgggcgcggcaacugggacugcaucaugaccagcuaccaguaccugaucauccagaacaccacgugggaggaccacugccaguucucccggcccagccccaucggguaccugggccuccugucccagcgcacccgggacaucuacaucagccgccggcugcucggcaccuucaccuggacgcugagcgacuccgagggggaggacaccccgggcggguacugccugacccgcuggaugcucaucgaggccgagcugaagugcuucggcaacaccgccguggccaagugcaacgagaagcacgacgaggaguucugcgacaugcugcggcuguucgacuucaacaagcaggccauccagcgccugaaggcgcccgcccagaugagcauccagcugaucaacaaggccgugaacgcccucaucaacgaccagcugaucaugaagaaccaccuccgggacaucauggggauccccuacugcaacuacuccaaguacugcuaccucaaccacacgaccaccggccgcaccagccugcccaagugcugccuggucuccaacggcagcuaccucaacgagacgcacuucuccgacgacaucgagcagcaggccgacaacaugaucaccgagaugcugcagaaggaguacauggagcggcaggggaagacgccccugggccucguggaccuguucguguucagcaccuccuucuaccugaucagcaucuuccugcaccucgucaagaucccgacccaccgccacaucguggggaaguccugccccaagccccaccggcugaaccacaugggcaucugcagcugcgggcuguacaagcagcccggcgugccggucaaguggaagcgcugaggacuaguuauaagacugacuagcccgaugggccucccaacgggcccuccuccccuccuugcaccgagauuaaucaaaggcucuuuucagagccaccaaaaaaaaaaaaaaaaaaaaaaaaaaaaaaaaaaaaaaaaaaaaaaaaaaaaaaaaaaaaaaaaaaaaaaaaaaaaaaaaaaaaaaaaaaaaaaaaaaaaa

SEQ ID NO: 32897 - RNA, 1689 nt, Artificial Sequence
  mRNA product Design i-3 (hSL-A100) comprising derived and/or modified sequence from LASV(LM765-SLE-2012;Clade IV)__AIT17814__GPCmut7 (opt1)
aggagaaagcuuaccaugggccagaucgugaccuucuuccaggaggucccccacgugaucgaggaggugaugaacaucguccugaucgcccucagcauccuggccgugcugaaggggcucuacaacuucgcgaccugcggccugguggggcuggucacguuccuccugcugugcggccgcuccugcaccaccagccucuacaaggggguguacgagcugcagacccuggagcucaacauggagacgcugaacaugaccaugccgcuguccugcaccaagaacaacagccaccacuacaucauggugggcaacgagaccggccucgagcugacgcugaccaacaccuccaucaucgaccacaaguucugcaaccucagcgacgcccaccggaagaaccuguacgaccacgcccugauguccaucaucagcaccuuccaccucuccauccccaacuucaaccaguacgaggccaugagcugcgacuucaacgggggcaagaucuccguccaguacaaccugagccacuccuacgccaaggacgcggccgaccacugcgggacgguggccaacggcgugcugcagaccuucaugcgcauggccuggggcgggagcuacaucgcgcucgacuccggccgggggcgcugggacugcaucaugaccagcuaccaguaccugaucauccagaacaccacgugggaggaccacugccaguucucccggcccagccccaucggcuaccuggggcuccugucccagcgcacccgggacaucuacaucagccgccggcugcucggcaccuucaccuggacgcugagcgacuccgagggcaaggacacccccgggggcuacugccugacccgcuggaugcucaucgaggccgagcugaagugcuucgggaacaccgccgucgccaagugcaacgagaagcacgacgaggaguucugcgacaugcugcggcuguucgacuucaacaagcaggccauccagcgccugaaggcgcccgcccagaugagcauccagcugaucaacaaggccgugaacgcccucaucaacgaccagcugaucaugaagaaccaccuccgggacaucaugggcauccccuacugcaacuacuccaaguacugcuaccucaaccacacgaccaccgggaagaccagccugcccaagugcugccugguguccaacggcagcuaccucaacgagacgcacuucuccgacgacaucgagcagcaggccgacaacaugaucaccgagaugcugcagaaggaguacauggagcgccagggcaagaccccgcuggggcucgucgaccuguucguguucagcaccuccuucuaccugaucagcaucuuccugcaccucgugaagaucccgacgcaccggcacaucgucggcaagcccugccccaagccccaccgccugaaccacauggggaucugcuccugcggccuguacaagcagccgggggugcccgugaaguggaagcggugaggacuaguuauaagacugacuagcccgaugggccucccaacgggcccuccuccccuccuugcaccgagauuaaucaaaggcucuuuucagagccaccaaaaaaaaaaaaaaaaaaaaaaaaaaaaaaaaaaaaaaaaaaaaaaaaaaaaaaaaaaaaaaaaaaaaaaaaaaaaaaaaaaaaaaaaaaaaaaaaaaaaa

SEQ ID NO: 32898 - RNA, 1689 nt, Artificial Sequence
  mRNA product Design i-3 (hSL-A100) comprising derived and/or modified sequence from LASV(LM776-SLE-2012;Clade IV)__AIT17824__GPCmut7 (opt1)
aggagaaagcuuaccaugggccagaucgugaccuucuuccaggaggucccccacgugaucgaggaggugaugaacaucguccugaucgcccucagcauccuggccgugcugaaggggcucuacaacuucgcgaccugcggccugguggggcuggucacguuccuccugcugugcggccgcuccugcaccaccagcguguacaaggggguguacgagcuccagacccuggagcugaacauggagacgcucaacaugaccaugccgcuguccugcaccaagaacaacagccaccacuacaucauggucggcaacgagaccggccuggagcucacgcugaccaacaccuccaucaucaaccacaaguucugcaaccugagcgacgcccacaagaagaaccucuacgaccacgcccugauguccaucaucagcaccuuccaccuguccauccccaacuucaaccaguacgaggccaugagcugcgacuucaacgggggcaagaucuccgugcaguacaaccucagccacuccuacgccggggacgcggccaaccacugcggcacgguggccaacgggguccugcagaccuucaugcggauggccuggggcggcagcuacaucgcgcuggacuccgggcacggcaagugggacugcaucaugaccagcuaccaguaccucaucauccagaacaccacgugggaggaccacugccaguucucccgccccagccccaucggguaccugggccugcucucccagcggacccgcgacaucuacaucagccggcgccugcugggcaccuucaccuggacgcucagcgacuccgaggggaaggacaccccgggcggguacugccugacccgguggaugcugaucgaggccgagcucaagugcuucggcaacaccgccguggccaagugcaacgagaagcacgacgaggaguucugcgacaugcugcgccuguucgacuucaacaagcaggccauccagcggcucaaggcgcccgcccagaugagcauccagcugaucaacaaggccgugaacgcccugaucaacgaccagcucaucaugaagaaccaccuccgcgacaucauggggauccccuacugcaacuacuccaaguacugcuaccugaaccacacgaccaccggcaagaccagccugcccaagugcugccuggucuccaacggcagcuaccugaacgagacgcacuucuccgacgacaucgagcagcaggccgacaacaugaucaccgagaugcuccagaaggaguacauggagcggcaggggaagacgccccugggccugguggaccucuucguguucagcaccuccuucuaccugaucagcaucuuccugcaccuggucaagaucccgacccaccgccacaucguggggaaguccugccccaagccccaccggcucaaccacaugggcaucugcagcugcgggcuguacaagcagcccggcgugccgguccgcuggaagcggugaggacuaguuauaagacugacuagcccgaugggccucccaacgggcccuccuccccuccuugcaccgagauuaaucaaaggcucuuuucagagccaccaaaaaaaaaaaaaaaaaaaaaaaaaaaaaaaaaaaaaaaaaaaaaaaaaaaaaaaaaaaaaaaaaaaaaaaaaaaaaaaaaaaaaaaaaaaaaaaaaaaaa

SEQ ID NO: 32899 - RNA, 1689 nt, Artificial Sequence
  mRNA product Design i-3 (hSL-A100) comprising derived and/or modified sequence from LASV(Mad39;Clade IV)__ANH09722__GPCmut7 (opt1)
aggagaaagcuuaccaugggccagaucgugaccuucuuccaggaggucccccacgugaucgaggaggugaugaacaucguccugaucgcccucagcauccuggccgugcugaaggggcucuacaacguggcgaccugcggccugaucgggcuggucacguuccuccugcugugcggccgcuccugcaccaccacccucuacaaggggguguacgagcugcaggcccuggagcucaacauggagacgcugaacaugaccaugccgcugagcugcaccaagaacaacucccaccacuacauccgggugggcaacgagaccggccucgagcugacgcugaccaacaccagccucaucaaccacaaguucugcaaccuguccgacgcccacaagaagaaccuguacgaccacgcccucaugagcaucaucuccaccuuccaccugagcauccccaacuucaaccaguacgaggccauguccugcgacuucaacgacgggaagaucagcguccaguacaaccugucccacacguacgcgggcgacaccgccaaccacugcgggaccguggccaacggcgugcuccagaccuucaugcgcauggccuggggcgggagcuacaucgcgcuggacuccggccgcgggggcugggacugcaucaugacgagcuaccaguaccugaucauccagaacaccaccugggaggaccacugccaguucucccggcccagccccaucggguaccucggccugcugucccagcggacccgcgacaucuacaucagccggcgccuccugggcacguucaccuggacccuguccgacagcgaggggaaggacaccccgggcggguacugccucacgcgguggaugcugaucgaggccgagcugaagugcuucggcaacaccgccgucgccaagugcaacgagaagcacgacgaggaguucugcgacaugcuccgccuguucgacuucaacaagcaggccauccagcggcugaaggcgcccgcccagaugagcauccagcucaucaacaaggccgugaacgcccugaucaacgaccagcugaucaugaagaaccaccuccgcgacaucauggggauccccuacugcaacuacuccaaguacugcuaccugaaccacaccgugaccggcaagacgagccugcccaagugcugccucgucuccaacggcagcuaccugaacgagacccacuucuccgacgacaucgagcagcaggccgacaacaugaucaccgagaugcugcagaaggaguacauggagcggcaggggaagacgccccucggccugguggaccuguucguguucagcaccuccuucuaccugaucagcaucuuccuccaccuggucaagaucccgacccaccgccacgugguggggaagcccugccccaagccccaccggcugaaccacaugggcaucugcuccugcggguucuacaagcagccgggcguccccgugcgcuggaagcggugaggacuaguuauaagacugacuagcccgaugggccucccaacgggcccuccuccccuccuugcaccgagauuaaucaaaggcucuuuucagagccaccaaaaaaaaaaaaaaaaaaaaaaaaaaaaaaaaaaaaaaaaaaaaaaaaaaaaaaaaaaaaaaaaaaaaaaaaaaaaaaaaaaaaaaaaaaaaaaaaaaaaa

SEQ ID NO: 32900 - RNA, 1689 nt, Artificial Sequence
  mRNA product Design i-3 (hSL-A100) comprising derived and/or modified sequence from LASV(Z0947-SLE-2011;Clade IV)__AIT17840__GPCmut7 (opt1)
aggagaaagcuuaccaugggccagaucgugaccuucuuccaggaggucccccacgugaucgaggaggugaugaacaucguccugaucgcccucagcauccuggccgugcugaaggggcucuacaacuucgcgaccugcggccugguggggcuggucacguuccuccugcugugcggccgcuccugcaccaucagccucuacaaggggguguacgagcugcagacccuggagcucaacauggagacccugaacaugacgaugccgcuguccugcaccaagaacaacagccaccacuacaucauggugggcaacgagaccggccucgagcugacccugacgaacaccuccaucaucaaccacaaguucugcaaccucagcgacgcccacaagaagaaccuguacgaccacgcccugauguccaucaucagcaccuuccaccucuccauccccaacuucaaccaguacgaggccaugagcugcgacuucaacgggggcaagaucuccguccaguacaaccugagccacuccuacgccggggacgcggccaaccacugcggcaccguggccaacggggugcugcagacguucaugcggauggccuggggcggcagcuacaucgcgcucgacuccgggcgcgaccggugggacugcaucaugaccagcuaccaguaccugaucauccagaacaccaccugggaggaccacugccaguucucccgccccagccccaucggcuaccuggggcuccugucccagcggacgcgcgacaucuacaucagccggcgccugcucggcaccuucaccuggacccugagcgacuccgagggcaaggacacgcccgggggcuacugccugacccgguggaugcucaucgaggccgagcugaagugcuucgggaacaccgccgucgccaagugcaacgagaagcacgacgaggaguucugcgacaugcugcgccucuucgacuucaacaagcaggccauccagcggcugaaggcgcccgcccagaugagcauccagcugaucaacaaggccgugaacgcccucaucaacgaccagcugaucaugaagaaccaccuccgcgacaucaugggcauccccuacugcaacuacuccaaguacugcuaccugaaccacaccacgaccgggaagaccagccugcccaagugcugccugguguccaacggcagcuaccucaacgagacccacuucuccgacgacaucgagcagcaggccgacaacaugaucacggagaugcugcagaaggaguacauggagcggcagggcaagaccccgcuggggcucgucgaccuguucguguucagcaccuccuucuaccugaucagcaucuuccugcaccucgugaagaucccgacccaccgccacaucgucggcaagcccugccccaagccccaccggcugaaccacauggggaucugcuccugcggccuguacaagcagccgggggugcccgugaaguggaagcgcugaggacuaguuauaagacugacuagcccgaugggccucccaacgggcccuccuccccuccuugcaccgagauuaaucaaaggcucuuuucagagccaccaaaaaaaaaaaaaaaaaaaaaaaaaaaaaaaaaaaaaaaaaaaaaaaaaaaaaaaaaaaaaaaaaaaaaaaaaaaaaaaaaaaaaaaaaaaaaaaaaaaaa

SEQ ID NO: 32901 - RNA, 1689 nt, Artificial Sequence
  mRNA product Design i-3 (hSL-A100) comprising derived and/or modified sequence from LASV(Josiah;Clade IV)__NP_694870__GPCmut7 (opt1)
aggagaaagcuuaccaugggccagaucgugaccuucuuccaggaggucccccacgugaucgaggaggugaugaacaucguccugaucgcccucagcgugcuggccgugcugaaggggcucuacaacuucgcgaccugcggccuggucgggcuggugacguuccuccugcugugcggccgcuccugcaccaccagccucuacaaggggguguacgagcugcagacccuggagcucaacauggagacgcugaacaugaccaugccgcuguccugcaccaagaacaacagccaccacuacaucauggucggcaacgagaccggccucgagcugacgcugaccaacaccuccaucaucaaccacaaguucugcaaccucagcgacgcccacaagaagaaccuguacgaccacgcccugauguccaucaucagcaccuuccaccucuccauccccaacuucaaccaguacgaggccaugagcugcgacuucaacgggggcaagaucuccgugcaguacaaccugagccacuccuacgccggggacgcggccaaccacugcggcacgguggccaacgggguccugcagaccuucaugcggauggccuggggcggcagcuacaucgcgcucgacuccgggcgcggcaacugggacugcaucaugaccagcuaccaguaccugaucauccagaacaccacgugggaggaccacugccaguucucccggcccagccccaucggguaccugggccuccugucccagcgcacccgggacaucuacaucagccgccggcugcucggcaccuucaccuggacgcugagcgacuccgaggggaaggacaccccgggcggguacugccugacccgcuggaugcucaucgaggccgagcugaagugcuucggcaacaccgccguggccaagugcaacgagaagcacgacgaggaguucugcgacaugcugcggcuguucgacuucaacaagcaggccauccagcgccugaaggcgcccgcccagaugagcauccagcugaucaacaaggccgugaacgcccucaucaacgaccagcugaucaugaagaaccaccuccgggacaucauggggauccccuacugcaacuacuccaaguacugcuaccucaaccacacgaccaccggccgcaccagccugcccaagugcugccuggucuccaacggcagcuaccucaacgagacgcacuucuccgacgacaucgagcagcaggccgacaacaugaucaccgagaugcugcagaaggaguacauggagcggcaggggaagaccccgcugggccugguggaccucuucguguucagcaccuccuucuaccugaucagcaucuuccugcaccucgucaagauccccacgcaccgccacaucguggggaaguccugccccaagccccaccggcugaaccacaugggcaucugcagcugcgggcuguacaagcagccgggcgugcccgucaaguggaagcgcugaggacuaguuauaagacugacuagcccgaugggccucccaacgggcccuccuccccuccuugcaccgagauuaaucaaaggcucuuuucagagccaccaaaaaaaaaaaaaaaaaaaaaaaaaaaaaaaaaaaaaaaaaaaaaaaaaaaaaaaaaaaaaaaaaaaaaaaaaaaaaaaaaaaaaaaaaaaaaaaaaaaaa

SEQ ID NO: 32902 - RNA, 1686 nt, Artificial Sequence
  mRNA product Design i-3 (hSL-A100) comprising derived and/or modified sequence from LASV(LP;Clade I)__AAF86701__GPCmut7 (opt1)
aggagaaagcuuaccaugggccagaucaucaccuucuuccaggaggugccccacgucaucgaggaggugaugaacaucgugcugaucgcccucagccugcuggccauccucaaggggcuguacaacaucgcgaccugcggcaucaucgggcuggucgccuuccucuuccugugcggcaaguccugcagccugacgcucaagggcggguacgagcugcagacccuggagcucaacauggagacccugaacaugaccaugccgcuguccugcacgaagaacagcucccaccacuacauccgcgugggcaacgagaccgggcucgagcugacccugaccaacacgagcaucaucaaccacaaguucugcaaccucuccgacgcccacaagaagaaccuguacgaccacgcccugaugagcaucaucuccaccuuccaccucagcauccccaacuucaaccaguacgaggccauguccugcgacuucaacggcgggaagaucagcgugcaguacaaccugucccacagcuacgcgggcgacgccgccgagcacugcgggaccgucgccaacggcgugcugcagaccuucaugcggauggcguggggcgggcgcuacaucgcccucgacuccggcaaggggaacugggacugcaucaugacgagcuaccaguaccugaucauccagaacaccaccugggaggaccacugccaguucucccggcccagccccaucggcuaccugggccuccugucccagcgcacccgggacaucuacaucagccgccggcugcucgggacguucaccuggacccugagcgacuccgagggcaacgagacccccgggggcuacugccugacgcgcuggaugcucaucgaggccgagcugaagugcuucgggaacaccgccguggccaagugcaacgagaagcacgacgaggaguucugcgacaugcugcggcuguucgacuucaacaagcaggcgauccgccggcugaaggccccggcccagaugagcauccagcugaucaacaaggccgucaacgcccucaucaacgaccagcugaucaugaagaaccaccuccgcgacaucaugggcauccccuacugcaacuacuccaaguacugcuaccucaaccacaccagcuccggccggaccagccugcccaagugcugccugaucuccaacgggagcuaccucaacgagacgcaguucuccgacgacaucgagcagcaggcggacaacaugaucaccgagaugcugcagaaggaguacaucgagcgccagggcaagaccccgcuggggcugguggacaucuucaucuucagcaccuccuucuaccucaucagcaucuuccugcaccugaucaagauccccacgcaccggcacaucgugggcaagcccugccccaagccgcaccgccucaaccacaugggggucugcuccugcggccuguacaagcaccccggcgugcccaccaaguggaagcggugaggacuaguuauaagacugacuagcccgaugggccucccaacgggcccuccuccccuccuugcaccgagauuaaucaaaggcucuuuucagagccaccaaaaaaaaaaaaaaaaaaaaaaaaaaaaaaaaaaaaaaaaaaaaaaaaaaaaaaaaaaaaaaaaaaaaaaaaaaaaaaaaaaaaaaaaaaaaaaaaaaaaa

SEQ ID NO: 32903 - RNA, 1686 nt, Artificial Sequence
  mRNA product Design i-3 (hSL-A100) comprising derived and/or modified sequence from LASV(803213;Clade II)__AAF86703__GPCmut7 (opt1)
aggagaaagcuuaccaugggccagaucaucaccuucuuccaggaggugccccacgucaucgaggaggugaugaacaucgugcugaucgcccucagccugcuggccauccucaaggggaucuacaacgucgcgaccugcggccuguucgggcugaucuccuuccuccugcugugcggccgcagcugcuccgugacguacaaggggguguacgagcuccagacccuggagcugaacauggccaaccucaacaugaccaugccgcugagcugcaccaagaacaacucccaccacuacaucauggucggcaacgagacgggccuggagcucacccugaccaacaccagcaucaucaaccacaaguucugcaaccuguccgacgcccacaagaagaaccucuacgaccacgcccugaugagcaucaucuccacguuccaccugagcauccccaacuucaaccaguacgaggccauguccugcgacuucaacgggggcaagaucagcgugcaguacaaccucucccacagcuucgcgguggacgccgccaaccacugcgggaccaucgccaacggcguccugcagaccuucaugcggauggcguggggcggguccuacaucgcccuggacagcggcaaggggaacugggacugcaucaugaccuccuaccaguaccucaucauccagaacacgaccugggaggaccacugccaguucagccgccccucccccaucggcuaccuggggcugcucagccagcggacccgcgacaucuacaucagccggcgccugcugggcaccuucacguggacccucuccgacagcgagggcaacgaggcccccgggggcuacugccugacccgguggaugcugaucgaggccgagcucaagugcuucgggaacaccgccguggcgaagugcaacgagaagcacgacgaggaguucugcgacaugcugcgccuguucgacuucaacaagcaggccaucaagcggcucaagacgccggcccagauguccauccagcugaucaacaaggccgugaacgcccugaucaacgaccagcucaucaugaagaaccaccuccgcgacaucaugggcauccccuacugcaacuacagccgguacugcuaccugaaccacaccgucaccgggaagaccucccugccccgcugcugccuggugagcaacggcuccuaccugaacgagacgcacuucagcgacgacaucgagcagcaggcggacaacaugaucaccgagaugcuccagaaggaguacauggaccggcagggcaagaccccgcuggggcugguggaccuguucgucuucuccaccagcuucuaccucaucuccaucuuccugcaccuggugaagauccccacgcaccgccacaucgugggcaagcccugccccaagccgcaccggcucaaccacauggggaucugcagcugcggccuguacaagcaccccgggguccccgugaaguggaagcgcugaggacuaguuauaagacugacuagcccgaugggccucccaacgggcccuccuccccuccuugcaccgagauuaaucaaaggcucuuuucagagccaccaaaaaaaaaaaaaaaaaaaaaaaaaaaaaaaaaaaaaaaaaaaaaaaaaaaaaaaaaaaaaaaaaaaaaaaaaaaaaaaaaaaaaaaaaaaaaaaaaaaaa

SEQ ID NO: 32904 - RNA, 1686 nt, Artificial Sequence
  mRNA product Design i-3 (hSL-A100) comprising derived and/or modified sequence from LASV(GA391;Clade III)__CAA36645__GPCmut7 (opt1)
aggagaaagcuuaccaugggccagaucgugaccuucuuccaggaggucccccacgugaucgaggaggugaugaacaucguccugaucgcccucagcauccuggccauccugaaggggcucuacaacguggcgaccugcggccugaucgggcuggugacguuccuccugcuguccggccgcagcugcucccucaucuacaaggggaccuacgagcugcagacccuggagcucaacauggagacccugaacaugacgaugccgcugagcugcaccaagaacaacucccaccacuacauccgggucggcaacgagaccggccucgagcugacccugacgaacaccagcauccucaaccacaaguucugcaaccuguccgacgcccacaagcgcaaccuguacgaccacagccucauguccaucaucagcaccuuccaccuguccauccccaacuucaaccaguacgaggccaugagcugcgacuucaacgggggcaagaucaccgugcaguacaaccugucccacagcuucgccguggacgccgcggggcacugcggcacgcucgccaacgggguccugcagaccuucaugcggauggccuggggcggcuccuacaucgcccuggacagcgggcgcggcaacugggacugcaucaugaccuccuaccaguaccucaucauccagaacaccacgugggacgaccacugccaguucagccggcccucccccaucggguaccugggccugcucagccagcgcacccgggacaucuacaucagccgccggcugcugggcaccuucaccuggacgcucuccgacagcgaggggaacgagaccccgggcggguacugccugacccgcuggaugcugaucgaggcggagcucaagugcuucggcaacaccgccguggccaagugcaacgagaagcacgacgaggaguucugcgacaugcugcggcuguucgacuucaacaagcaggccauccgccggcucaagacgcccgcccagauguccauccagcugaucaacaaggcggugaacgcccugaucaacgaccagcucaucaugaagaaccaccuccgcgacaucauggggauccccuacugcaacuacagccgguacugcuaccugaaccacaccuccaccggcaagaccagccugccccgcugcugccugaucuccaacggcagcuaccugaacgagacgaaguucuccgacgacaucgagcagcaggccgacaacaugaucaccgagaugcugcagaaggaguacaucgaccggcaggggaagaccccgcucggccuggucgaccuguucguguucagcaccuccuucuaccucaucagcaucuuccugcaccuggugaagauccccacgcaccgccacaucgucgggaagcccugccccaagccgcaccggcucaaccacaugggcaucugcuccugcgggcuguacaagcagcccggcgugcccgugcgcuggaagcggugaggacuaguuauaagacugacuagcccgaugggccucccaacgggcccuccuccccuccuugcaccgagauuaaucaaaggcucuuuucagagccaccaaaaaaaaaaaaaaaaaaaaaaaaaaaaaaaaaaaaaaaaaaaaaaaaaaaaaaaaaaaaaaaaaaaaaaaaaaaaaaaaaaaaaaaaaaaaaaaaaaaaa

SEQ ID NO: 32905 - RNA, 1689 nt, Artificial Sequence
  mRNA product Design i-3 (hSL-A100) comprising derived and/or modified sequence from LASV(AV;Clade V)__CCA30314__GPCmut7 (opt1)
aggagaaagcuuaccaugggccagaucgugaccuucuuccaggaggucccccacgugaucgaggaggugaugaacaucguccugaucgcccucagcauccuggccgugcugaaggggcucuacaacaucgcgaccugcggccugaucgggcugaucacguuccuccugcugugcggccgcuccugcagcuccaaccucuacaaggggguguacgagcugcagagccuggaccucaacauggagacccugaacaugaccaugccgcuguccugcaccaagaacaacagccaccacuacauccgggucggcaacgacacgggccucgagcugacccugaccaacaccuccauccucaaccacaaguucugcaaccugagcgacgcccacaagaaggaccuguacgaccacgcccucauguccaucaucagcacguuccaccuguccauccccaacuucaaccaguacgaggccaugagcugcgacuucaacgggggcaagaucuccgugcaguacaaccugagccacuccuacgccaucgacgcggccaaccacugcgggaccguggccaacggcauccuccagaccuucaugcgcauggccuggggcgggagcuacaucgcgcuggacuccggccgggggaacugggacugcaucaugaccagcuaccaguaccugaucauccagaacacgaccugggagaaccacugccaguucucccgccccagccccaucggcuaccucgggcugcugagccagcggacccgcgacaucuacaucucccggcgccuccugggcaccuucacguggacccugagcgacuccgagggcaacgccacccccgggggcuacugccucacccgguggaugcugaucgaggccgagcugaagugcuucgggaacacggccgucgccaagugcaacgagaagcacgacgaggaguucugcgacaugcuccgccuguucgacuucaacaagcaggcgaucagccggcugaaguccccggcccagaugagcauccagcucaucaacaaggccgugaacgcccugaucaacgaccagcugaucaugaagaaccaccuccgcgacaucaugggcauccccuacugcaacuacuccaaguacugcuaccugaaccacaccaucaccgggaagaccagccugcccaagugcugccucguguccaacggcagcuaccugaacgagacgcacuucuccgacgacaucgagcagcaggccgacaacaugaucaccgagaugcugcagaaggaguacauggagcggcagggcaagaccccgcuggggcucgucgaccuguucguguucagcaccuccuucuaccugaucagcaucuuccuccgccuggugaagauccccacgcaccggcacaucgucggcaagcccugccccaagccgcaccgccugaaccacauggggaucugcuccugcggccucuacaagcagcccggggugcccgugcgguggaagcgcugaggacuaguuauaagacugacuagcccgaugggccucccaacgggcccuccuccccuccuugcaccgagauuaaucaaaggcucuuuucagagccaccaaaaaaaaaaaaaaaaaaaaaaaaaaaaaaaaaaaaaaaaaaaaaaaaaaaaaaaaaaaaaaaaaaaaaaaaaaaaaaaaaaaaaaaaaaaaaaaaaaaaa

SEQ ID NO: 32906 - RNA, 1686 nt, Artificial Sequence
  mRNA product Design i-3 (hSL-A100) comprising derived and/or modified sequence from LASV(Togo/2016/7082;Clade VI)__AMR44577__GPCmut7 (opt1)
aggagaaagcuuaccaugggccagaucaucaccuucuuccaggaggugccccacgucaucgaggaggugaugaacaucgugcugaucgcccucagccugcuggccauccucaagggggucuacaacguggcgaccugcggcaucaucgggcuggugacguuccuguuccucugcggccgcuccugcagccugaucuacaagggguccuacgagcugcagacccucgagcugaacauggagacccugaacaugaccaugccgcucagcugcacgaagaacuccagccaccacuacauccgggucggcaacgagaccggccuggagcugacccucaccaacacguccaucaucaaccacaaguucugcaaccugagcgacgcccacaagcgcaaccuguacgaccacgcccucauguccauccugagcaccuuccaccuguccauccccaacuucaaccaguacgaggccaugagcugcgacuucaacgggggcaagaucuccgugcaguacaaccucagccacgccuacgcgguggacgccgccgagcacugcgggaccgucgccaacggcgugcugcagaccuucaugcggauggcguggggcggguccuacaucgcccuggacagcggccgcgggaacugggacugcaucaugacguccuaccaguaccucaucauccagaacaccaccugggaggaccacugccaguucagccggcccucccccaucggcuaccuggggcugcucagccagcgcacccgggacaucuacaucagccgccggcugcugggcacguucaccuggacccucuccgacagcgagggcaacgagacccccgggggcuacugccugacgcgcuggaugcugaucgaggccgagcucaagugcuucgggaacaccgccguggccaagugcaacgagaagcacgacgaggaguucugcgacaugcugcggcuguucgacuucaacaagcaggcgauccagcgccucaaguccccggcccagaugagcauccagcugaucaacaaggccgucaacgcccugaucaacgaccagcucaucaugaagaaccaccuccgggacaugaugggcauccccuacugcaacuacuccaaguacugcuaccugaaccacaccagcuccgggcgcaccagccugcccaagugcugccugguguccaacggcagcuaccugaacgagacgcacuucuccgacgacaucgagcagcaggccgacaacaugaucaccgagaugcuccagaaggaguacaucgaccggcagggcaagaccccgcuggggcugguggaccuguucgucuucagcaccuccuucuaccucaucagcaucuuccugcaccugaucaagauccccacgcaccgccacaucgugggcaagcccugccccaagccgcaccggcucaaccacauggggaucugcuccugcggccuguacaagcagcccggggugcccacccgcuggaagcggugaggacuaguuauaagacugacuagcccgaugggccucccaacgggcccuccuccccuccuugcaccgagauuaaucaaaggcucuuuucagagccaccaaaaaaaaaaaaaaaaaaaaaaaaaaaaaaaaaaaaaaaaaaaaaaaaaaaaaaaaaaaaaaaaaaaaaaaaaaaaaaaaaaaaaaaaaaaaaaaaaaaaa

SEQ ID NO: 32907 - RNA, 1686 nt, Artificial Sequence
  mRNA product Design i-3 (hSL-A100) comprising derived and/or modified sequence from LASV(KAK-428;Clade n.d. (VII))__ANH09740__GPCmut7 (opt1)
aggagaaagcuuaccaugggccagaucgugaccuucuuccaggaggucccccacgugaucgaggaggugaugaacaucguccugaucgcccucagccugcuggccauccucaaggggcuguacaacuucgcgaccugcggcgugaucgggcugaucacguuccuccugcugugcggccgcuccugcagcgccaccuacaaggggcaguacgagcuccagacccuggagcugaacauggagucccucaacaugaccaugccgcugagcugcacgaagaacaacucccaccacuacauccgggccggcaacaacaccggccuggagcucacccugaccaacacgagcaucaucucccacaaguucugcaaccugagcgacgcccacaagaagaaccucuacgaccacacccugauguccaucaucaccaccuuccaccugagcauccccaacuucaaccaguacgaggccauguccugcgacuucaacgggggcaagaucagcauccaguacaaccucucccacagcuacgcgggggacgccgcccagcacugcggcacgguggccaacgggguccugcagaccuucaugcgcauggcguggggcggcuccuaccuggcccucgacagcgggcggcgcggcugggacugcaucaucuccagcuaccaguaccugaucauccagaacaccaccugggacgaccacugccaguucucccggcccagccccaucggguaccugggcuucgugagccagaagacgcgcgacaucuacaucucccggcgccuccugggcaccuucaccuggacccugagcgacuccgaggggcacgacaugccgggcggguacugccucacgcgguggaugcugaucgaggccgaccugaagugcuucggcaacaccgccguggccaagugcaacgagaagcacgacgaggaguucugcgacauguggcgccucuucgacuucaacaagcaggcgauccagcggcugaaggcccccgcccagaugaacauccagcugaucaacaaggccgucaacgcccucaucaacgaccagcugaugaugaagaaccaccuccgcgacaucauggggauccccuacugcaacuacagcaaguucugcuaccugaacaacaccaccacgggccggaccucccugccccgcugcugccugaucagcaacggcuccuaccucaacgagacccacuucagcgacgacaucgagcagcaggcggacaacaugaucaccgagaugcugcagaaggaguacauggaccggcaggggaagacgccgcugggccucguggaccuguucguguucuccaccagcuucuaccugaucaccaucuuccugcaccucgucaagauccccacccaccgccacaucguggggaagcccugccccaagccgcaccggcugaaccacaugggcaucugcuccugcgggcuguacaagcagcccggcgugcccguccgcuggaagcggugaggacuaguuauaagacugacuagcccgaugggccucccaacgggcccuccuccccuccuugcaccgagauuaaucaaaggcucuuuucagagccaccaaaaaaaaaaaaaaaaaaaaaaaaaaaaaaaaaaaaaaaaaaaaaaaaaaaaaaaaaaaaaaaaaaaaaaaaaaaaaaaaaaaaaaaaaaaaaaaaaaaaa

SEQ ID NO: 32908 - RNA, 1686 nt, Artificial Sequence; identical to SEQ ID NO: 32902
  mRNA product Design i-3 (hSL-A100) comprising derived and/or modified sequence from LASV(Pinneo-NIG-1969;Clade I)__AIT17836__GPCmut7 (opt1)

SEQ ID NO: 32909 - RNA, 1686 nt, Artificial Sequence
  mRNA product Design i-3 (hSL-A100) comprising derived and/or modified sequence from LASV(ISTH0009-NIG-2011;Clade II)__AIT17404__GPCmut7 (opt1)
aggagaaagcuuaccaugggccagaucaucaccuucuuccaggaggugccccacgucaucgaggaggugaugaacaucgugcugaucgcccucagccugcuggccauccucaaggggaucuacaacgucgcgaccugcggccuguucgggcugguguccuuccuccugcugugcggccgcagcugcuccacgaccuacaaggggguguacgagcuccagacccuggagcuggacauggccagccucaacaugaccaugccgcuguccugcacgaagaacaacagccaccacuacaucauggucggcaacgagaccggccuggagcucacccugaccaacacguccaucaucaaccacaaguucugcaaccugagcgacgcccacaagaagaaccucuacgaccacgcccugauguccaucaucagcaccuuccaccuguccauccccaacuucaaccaguacgaggccaugagcugcgacuucaacgggggcaagaucuccgugcaguacaaccucagccacgcguacgccguggacgccgccaaccacugcgggaccaucgcgaacggcguccugcagaccuucaugcggauggccuggggcggguccuacaucgcccuggacagcggcaagggguccugggacugcaucaugacgagcuaccaguaccucaucauccagaacaccaccugggaggaccacugccaguucucccgccccagccccaucggcuaccuggggcugcucagccagcggacccgcgacaucuacaucucccggcgccugcugggcacguucaccuggacccucagcgacuccgagggcaacgagacccccgggggcuacugccugacgcgguggaugcugaucgaggccgagcucaagugcuucgggaacaccgccguggcgaagugcaacgagaagcacgacgaggaguucugcgacaugcugcgccuguucgacuucaacaagcaggccauccggcgccucaagaccccggcccagaugagcauccagcugaucaacaaggccgugaacgcccugaucaacgaccagcucaucaugaagaaccaccuccgggacaucaugggcauccccuacugcaacuacuccaaguacugcuaccugaaccacaccgucacggggaagaccagccugccccgcugcugccugguguccaacggcagcuaccugaacgagacccacuucuccgacgacaucgagcagcaggcggacaacaugaucaccgagcuccugcagaaggaguacauggaccggcagggcaagacgccgcuggggcugguggaccucuucgucuucagcaccuccuucuaccugaucagcaucuuccugcaccucaucaagauccccacccaccgccacaucaccggcaagcccugccccaagccgcaccggcugaaccacauggggaucugcuccugcggccuguacaagcaccccggggugcccgugaaguggaagcgcugaggacuaguuauaagacugacuagcccgaugggccucccaacgggcccuccuccccuccuugcaccgagauuaaucaaaggcucuuuucagagccaccaaaaaaaaaaaaaaaaaaaaaaaaaaaaaaaaaaaaaaaaaaaaaaaaaaaaaaaaaaaaaaaaaaaaaaaaaaaaaaaaaaaaaaaaaaaaaaaaaaaaa

SEQ ID NO: 32910 - RNA, 1686 nt, Artificial Sequence
  mRNA product Design i-3 (hSL-A100) comprising derived and/or modified sequence from LASV(ISTH2010-NIG-2012;Clade II)__AIT17482__GPCmut7 (opt1)
aggagaaagcuuaccaugggccagaucaucaccuucuuccaggaggugccccacgucaucgaggaggugaugaacaucgugcugaucgcccucagccugcuggccauccucaaggggaucuacaacgucgcgaccugcggccuguucgggcugguguccuuccuccugcugugcggccgcagcugcuccacgaccuacaaggggguguacgagcuccagacccuggagcuggacauggccagccucaacaugaccaugccgcuguccugcacgaagaacaacagccaccacuacaucauggucggcaacgagaccggccuggagcucacccugaccaacacguccaucaucaaccacaaguucugcaaccugagcgacgcccacaagaagaaccucuacgaccacgcccugauguccaucaucagcaccuuccaccuguccauccccaacuucaaccaguacgaggccaugagcugcgacuucaacgggggcaagaucuccgugcaguacaaccucagccacgcguacgccguggacgccgccaaccacugcgggaccaucgcgaacggcguccugcagaccuucaugcggauggccuggggcggguccuacaucgcccuggacagcggcaagggguccugggacugcaucaugacgagcuaccaguaccucaucauccagaacaucaccugggaggaccacugccaguucucccgccccagccccaucggcuaccuggggcugcucagccagcggacccgcgacaucuacaucucccggcgccugcugggcaccuucacguggacccucagcgacuccgagggcaacgagacccccgggggcuacugccugacccgguggaugcugaucgaggccgagcucaagugcuucgggaacacggccguggcgaagugcaacgagaagcacgacgaggaguucugcgacaugcugcgccuguucgacuucaacaagcaggccauccggcgccucaagaccccggcccagaugagcauccagcugaucaacaaggccgugaacgcccugaucaacgaccagcucaucaugaagaaccaccuccgggacaucaugggcauccccuacugcaacuacuccaaguacugcuaccugaaccacaccgucaccgggaagacgagccugccccgcugcugccugguguccaacggcagcuaccugaacgagacccacuucuccgacgacaucgagcagcaggcggacaacaugaucaccgagcuccugcagaaggaguacaucgaccggcagggcaagaccccgcuggggcugguggaccucuucgucuucagcacguccuucuaccugaucagcaucuuccugcaccucgugaagauccccacccaccgccacguggucggcaagcccugccccaagccgcaccggcugaaccacauggggaucugcuccugcggccuguacaagcaccccggggugcccgugaaguggaagcgcugaggacuaguuauaagacugacuagcccgaugggccucccaacgggcccuccuccccuccuugcaccgagauuaaucaaaggcucuuuucagagccaccaaaaaaaaaaaaaaaaaaaaaaaaaaaaaaaaaaaaaaaaaaaaaaaaaaaaaaaaaaaaaaaaaaaaaaaaaaaaaaaaaaaaaaaaaaaaaaaaaaaaa

SEQ ID NO: 32911 - RNA, 1686 nt, Artificial Sequence
  mRNA product Design i-3 (hSL-A100) comprising derived and/or modified sequence from LASV(Lassa virus/H.sapiens-wt/NGA/2015/ISTH_0543;Clade II)__AVO03639__GPCmut7 (opt1)
aggagaaagcuuaccaugggccagaucaucaccuucuuccaggaggugccccacgucaucgaggaggugaugaacaucgugcugaucgcccucagccugcuggccauccucaaggggaucuacaacgucgcgaccugcggccuguucgggcugguguccuuccuccugcugugcggccgcagcugcuccacgaccuacaaggggguguacgagcuccagacccuggagcuggacauggccaaccucaacaugaccaugccgcugagcugcacgaagaacaacucccaccacuacaucauggucggcaacgagaccggccuggagcucacccugaccaacacgagcaucaucaaccacaaguucugcaaccuguccgacgcccacaagaagaaccucuacgaccacgcccugaugagcaucaucuccaccuuccaccugagcauccccaacuucaaccaguacgaggccauguccugcgacuucaacgggggcaagaucagcgugcaguacaaccucucccacaccuacgcgguggacgccgccaaccacugcgggaccaucgccaacggcguccugcagacguucaugcggauggcguggggcgggagcuacaucgcccuggacuccggcaaggggagcugggacugcaucaugaccuccuaccaguaccucgugauccagaacaccaccugggaggaccacugccaguucagccgccccucccccaucggcuaccuggggcugcucagccagcggacgcgcgacaucuacaucagccggcgccugcugggcaccuucaccuggacccucuccgacagcgagggcaacgagacgcccgggggcuacugccugacccgguggaugcugaucgaggccgagcucaagugcuucgggaacaccgccguggccaagugcaacgagaagcacgacgaggaguucugcgacaugcugcgccuguucgacuucaacaagcaggcgauccggcgccucaagaccccggcccagauguccauccagcugaucaacaaggccgucaacgcccugaucaacgaccagcucaucaugaagaaccaccuccgggacaucaugggcauccccuacugcaacuacagcaaguacugcuaccugaaccacacggugaccgggaagaccucccugccccgcugcugccuggugagcaacggcuccuaccugaacgagacccacuucagcgacgacaucgagcagcaggccgacaacaugaucacggagcuccugcagaaggaguacaucgaccggcagggcaagaccccgcuggggcuggucgaccucuucguguucuccaccagcuucuaccugaucuccaucuuccugcaccucgugaagauccccacccaccgccacaucacgggcaagcccugccccaagccgcaccggcugaaccacauggggaucugcagcugcggccuguacaagcaccccgggguccccgugaaguggaagcgcugaggacuaguuauaagacugacuagcccgaugggccucccaacgggcccuccuccccuccuugcaccgagauuaaucaaaggcucuuuucagagccaccaaaaaaaaaaaaaaaaaaaaaaaaaaaaaaaaaaaaaaaaaaaaaaaaaaaaaaaaaaaaaaaaaaaaaaaaaaaaaaaaaaaaaaaaaaaaaaaaaaaaa

SEQ ID NO: 32912 - RNA, 1686 nt, Artificial Sequence
  mRNA product Design i-3 (hSL-A100) comprising derived and/or modified sequence from LASV(Lassa virus/H.sapiens-wt/NGA/2016/ISTH_0009;Clade II)__AVO03571__GPCmut7 (opt1)
aggagaaagcuuaccaugggccagaucaucaccuucuuccaggaggugccccacgucaucgaggaggugaugaacaucgugcugaucgcccucagccugcuggccauccucaaggggaucuacaacgucgcgaccugcggccugcuggggcucguguccuuccugcugcucugcggccgcagcugcuccacgaccuacaaggggguguacgagcugcagacccuggagcucgacauggccagccugaacaugaccaugccgcuguccugcacgaagaacaacagccaccacuacaucauggucggcaacgagaccggccucgagcugacccugaccaacacguccaucaucaaccacaaguucugcaaccucagcgacgcccacaagaagaaccuguacgaccacgcccugauguccaucaucagcaccuuccaccucuccauccccaacuucaaccaguacgaggccaugagcugcgacuucaacgggggccggaucuccgugcaguacaaccugagccacuccuacgcgguggacgccgccaaccacugcgggaccaucgccaacggcguccugcagaccuucaugcgcauggcguggggcgggagcuacaucgcccucgacuccggcaaggggagcugggacugcaucaugacguccuaccaguaccugaucauccagaacaccaccugggaggaccacugccaguucagccggcccagccccaucggcuaccuggggcuccugucccagcgcacccgggacaucuacaucagccgccggcugcucggcacguucaccuggacccuguccgacagcgagggcaacgagacccccgggggcuacugccugacgcgcuggaugcucaucgaggccgagcugaagugcuucgggaacaccgccguggccaagugcaacgagaagcacgacgaggaguucugcgacaugcugcggcuguucgacuucaacaagcaggcgauccgccggcugaagaccccggcccagauguccauccagcugaucaacaaggccgugaacgcccucaucaacgaccagcugaucaugaagaaccaccuccgcgacaucaugggcauccccuacugcaacuacagcaaguacugcuaccucaaccacaccgucacggggaagaccucccugccccggugcugccuggugagcaacggcuccuaccucaacgagacccacuucagcgacgacaucgagcagcaggccgacaacaugaucaccgagcugcugcagaaggaguacaucgaccgccagggcaagacgccgcuggggcucguggaccuguucgucuucuccaccagcuucuaccugaucuccaucuuccuccaccuggugaagauccccacccaccggcacaucaccggcaagcccugccccaagccgcaccgccugaaccacauggggaucugcagcugcggccucuacaaccaccccggggugcccgucaaguggaagcggugaggacuaguuauaagacugacuagcccgaugggccucccaacgggcccuccuccccuccuugcaccgagauuaaucaaaggcucuuuucagagccaccaaaaaaaaaaaaaaaaaaaaaaaaaaaaaaaaaaaaaaaaaaaaaaaaaaaaaaaaaaaaaaaaaaaaaaaaaaaaaaaaaaaaaaaaaaaaaaaaaaaaa

SEQ ID NO: 32913 - RNA, 1686 nt, Artificial Sequence
  mRNA product Design i-3 (hSL-A100) comprising derived and/or modified sequence from LASV(Lassa virus/H.sapiens-wt/NGA/2016/ISTH_0017;Clade II)__AVO03567__GPCmut7 (opt1)
aggagaaagcuuaccaugggccagaucaucaccuucuuccaggaggugccccacgucaucgaggaggugaugaacaucgugcugaucgcccucagccugcuggccauccucaaggggaucuacaacgucgcgaccugcggccuguucgggcugguguccuuccuccugcugugcggccgcagcugcuccacgaccuacaaggggguguacgagcuccagacccuggagcuggacauggccagccucaacaugaccaugccgcuguccugcacgaagaacaacagccaccacuacaucauggucggcaacgagaccggccuggagcucacccugaccaacacguccaucaucaaccacaaguucugcaaccugagcgacgcccacaagaagaaccucuacgaccacgcccugauguccaucaucagcaccuuccaccuguccauccccaacuucaaccaguacgaggccaugagcugcgacuucaacgggggcaagaucuccgugcaguacaaccucagccacaccuacgcgaucgacgccgccaaccacugcgggaccaucgccaacggcgugcugcagacguucaugcggauggcguggggcggguccuacaucgcccuggacagcggcaagggguccugggacugcaucaugaccagcuaccaguaccucaucauccagaacaccaccugggaggaccacugccaguucucccgccccagccccaucggcuaccuggggcugcucagccagcggacgcgcgacaucuacaucucccggcgccugcugggcaccuucaccuggacccucagcgacuccgagggcaacgagacgcccgggggcuacugccugacccgguggaugcugaucgaggccgagcucaagugcuucgggaacaccgccgucgccaagugcaacgagaagcacgacgaggaguucugcgacaugcugcgccuguucgacuucaacaagcaggcgauccggcgccucaagaccccggcccagaugagcauccagcugaucaacaaggccgugaacgcccugaucaacgaccagcucaucaugaagaaccaccuccgggacaucaugggcauccccuacugcaacuacuccaaguacugcuaccugaaccacacggugaccgggaagaccagccugccccgcugcugccuggucuccaacggcagcuaccugaacgagacccacuucuccgacgacaucgagcagcaggccgacaacaugaucacggagcuccugcagaaggaguacauggaccggcagggcaagaccccgcuggggcugguggaccucuucguguucagcaccuccuucuaccugaucagcaucuuccugcaccucguccgcauccccacccaccggcacgugaucggcaagcccugccccaagccgcaccgccugaaccacauggggaucugcuccugcggccuguacaagcaccccggggugcccgucaaguggaagcggugaggacuaguuauaagacugacuagcccgaugggccucccaacgggcccuccuccccuccuugcaccgagauuaaucaaaggcucuuuucagagccaccaaaaaaaaaaaaaaaaaaaaaaaaaaaaaaaaaaaaaaaaaaaaaaaaaaaaaaaaaaaaaaaaaaaaaaaaaaaaaaaaaaaaaaaaaaaaaaaaaaaaa

SEQ ID NO: 32914 - RNA, 1686 nt, Artificial Sequence
  mRNA product Design i-3 (hSL-A100) comprising derived and/or modified sequence from LASV(Lassa virus/H.sapiens-wt/NGA/2018/ISTH_0959;Clade II)__AVV65099__GPCmut7 (opt1)
aggagaaagcuuaccaugggccagaucaucaccuucuuccaggaggugccccacgucaucgaggaggugaugaacaucgugcugaucgcccucagccugcuggccauccucaaggggaucuacaacgucgugaccugcggccuguucgggcugguguccuuccuccugcugugcggccgcagcugcuccacgaccuacaagggggucuacgagcuccagacccuggagcuggacauggcgagccucaacaugaccaugccgcuguccugcacgaagaacaacagccaccacuacaucauggugggcaacgagaccggccuggagcucacccugaccaacacguccaucaucaaccacaaguucugcaaccugagcgacgcccacaagaagaaccucuacgaccacgcccugauguccaucaucagcaccuuccaccuguccauccccaacuucaaccaguacgaggccaugagcugcgacuucaacgggggcaagaucuccgugcaguacaaccucagccacgccuacgcgaucgacgccgccaaccacugcgggaccaucgccaacggcguccugcagaccuucaugcggauggcguggggcggguccuacaucgcccuggacagcggcaagggguccugggacugcaucaugacgagcuaccaguaccucaucauccagaacaccaccugggaggaccacugccaguucucccgccccagccccaucggcuaccuggggcugcucagccagcggacccgcgacaucuacaucucccggcgccugcugggcacguucaccuggacccucagcgacuccgagggcaacgagacccccgggggcuacugccugacgcgguggaugcugaucgaggccgagcucaagugcuucgggaacaccgccguggccaagugcaacgagaagcacgacgaggaguucugcgacaugcugcgccuguucgacuucaacaagcaggcgauccggcgccucaagaccccggcccagaugagcauccagcugaucaacaaggccgugaacgcccugaucaacgaccagcucaucaugaagaaccaccuccgggacaucaugggcauccccuacugcaacuacuccaaguacugcuaccugaaccacaccgucacggggaagaccagccugccccgcugcugccugguguccaacggcagcuaccugaacgagacccacuucuccgacgacaucgagcagcaggccgacaacaugaucaccgagcuccugcagaaggaguacaucgaccggcagggcaagacgccgcuggggcugguggaccucuucgucuucagcaccuccuucuaccugaucagcaucuuccugcaccucgugaagauccccacccaccgccacgugaucggcaagcccugccccaagccgcaccggcugaaccacauggggaucugcuccugcggccuguacaagcaccccgggguccccgugaaguggaagcgcugaggacuaguuauaagacugacuagcccgaugggccucccaacgggcccuccuccccuccuugcaccgagauuaaucaaaggcucuuuucagagccaccaaaaaaaaaaaaaaaaaaaaaaaaaaaaaaaaaaaaaaaaaaaaaaaaaaaaaaaaaaaaaaaaaaaaaaaaaaaaaaaaaaaaaaaaaaaaaaaaaaaaa

SEQ ID NO: 32915 - RNA, 1686 nt, Artificial Sequence
  mRNA product Design i-3 (hSL-A100) comprising derived and/or modified sequence from LASV(LASV003-NIG-2008;Clade II)__AIT17580__GPCmut7 (opt1)
aggagaaagcuuaccaugggccagaucaucaccuucuuccaggaggugccccacgucaucgaggaggugaugaacaucgugcugaucgcccucagccugcuggccauccucaaggggaucuacaacgucgcgaccugcggccuguucgggcugguguccuuccuccugcugugcggccgcagcugcuccacgaccuacaaggggguguacgagcuccagacccuggagcuggacauggccagccucaacaugaccaugccgcuguccugcacgaagaacaacagccaccacuacaucauggucggcaacgagaccggccuggagcucacccugaccaacacguccaucaucaaccacaaguucugcaaccugagcgacgcccacaagaagaaccucuacgaccacgcccugauguccaucaucagcaccuuccaccuguccauccccaacuucaaccaguacgaggccaugagcugcgacuucaacgggggcaagaucuccgugcaguacaaccucagccacaccuacgcgguggacgccgccaaccacugcgggaccaucgccaacggcguccugcagacguucaugcggauggcguggggcggguccuacaucgcccuggacagcggcaagggguccugggacugcaucaugaccagcuaccaguaccucaucauccagaacaccaccugggaggaccacugccaguucucccgccccagccccaucggcuaccuggggcugcucagccagcggacgcgcgacaucuacaucucccggcgccugcugggcaccuucaccuggacccucagcgacuccgagagcaacgagacgccgggcggguacugccugacccgguggaugcugaucgaggccgagcucaagugcuucggcaacaccgccguggccaagugcaacgagaagcacgacgaggaguucugcgacaugcugcgccuguucgacuucaacaagcaggcgauccggcgccucaaggcccccgcccagauguccauccagcugaucaacaaggccgugaacgcccugaucaacgaccagcucaucaugaagaaccaccuccgggacaucauggggauccccuacugcaacuacagcaaguacugcuaccugaaccacaccgucacgggccgcaccucccugccccggugcugccuggugagcaacggguccuaccugaacgagacccacuucagcgacgacaucgagcagcaggcggacaacaugaucaccgagcuccugcagaaggaguacauggaccgccagggcaagacgccgcugggccugguggaccucuucgucuucuccaccagcuucuaccugaucuccaucuuccugcaccucgugaagauccccacccaccggcacgugaucgggaagcccugccccaagccgcaccgccugaaccacaugggcaucugcagcugcgggcuguacaagcaccccggcguccccgugaaguggaagcggugaggacuaguuauaagacugacuagcccgaugggccucccaacgggcccuccuccccuccuugcaccgagauuaaucaaaggcucuuuucagagccaccaaaaaaaaaaaaaaaaaaaaaaaaaaaaaaaaaaaaaaaaaaaaaaaaaaaaaaaaaaaaaaaaaaaaaaaaaaaaaaaaaaaaaaaaaaaaaaaaaaaaa

SEQ ID NO: 32916 - RNA, 1686 nt, Artificial Sequence
  mRNA product Design i-3 (hSL-A100) comprising derived and/or modified sequence from LASV(LASV035-NIG-2009;Clade II)__AIT17588__GPCmut7 (opt1)
aggagaaagcuuaccaugggccagaucaucaccuucuuccaggaggugccccacgucaucgaggaggugaugaacaucgugcugaucgcccucagccugcuggccauccucaaggggaucuacaacgucgcgaccugcggccuguucgggcugguguccuuccuccugcugugcggccgcagcugcuccacgaccuacaaggggguguacgagcuccagacccuggagcuggacauggccagccucaacaugaccaugccgcuguccugcacgaagaacaacagccaccacuacaucauggucggcaacgagaccggccuggagcucacccugaccaacacguccaucaucaaccacaaguucugcaaccugagcgacgcccacaagaagaaccucuacgaccacgcccugauguccaucaucagcaccuuccaccuguccauccccaacuucaaccaguacgaggccaugagcugcgacuucaacgggggcaagaucuccgugcaguacaaccucagccacgcguacgccguggacgccgccaaccacugcgggaccaucgcgaacggcguccugcagaccuucaugcggauggccuggggcggguccuacaucgcccuggacagcggcaagggguccugggacugcaucaugacgagcuaccaguaccucaucauccagaacaccaccugggaggaccacugccaguucucccgccccagccccaucggcuaccuggggcugcucagccagcggacccgcgacaucuacaucucccggcgccugcugggcacguucaccuggacccucagcgacuccgagggcaacgagacccccgggggcuacugccugacgcgguggaugcugaucgaggccgagcucaagugcuucgggaacaccgccguggcgaagugcaacgagaagcacgacgaggaguucugcgacaugcugcgccuguucgacuucaacaagcaggccauccggcgccucaaggccccggcccagaugagcauccagcugaucaacaaggccgugaacgcgcugaucaacgaccagcucaucaugaagaaccaccuccgggacaucaugggcauccccuacugcaacuacuccaaguacugcuaccugaaccacaccgucaccgggaagacgagccugccccgcugcugccugguguccaacggcagcuaccugaacgagacccacuucuccgacgacaucgagcagcaggccgacaacaugaucaccgagcuccugcagaaggaguacaucgaccggcagggcaagaccccgcuggggcugguggaccucuucgucuucagcacguccuucuaccugaucagcaucuuccugcaccucgugaagauccccacccaccgccacgugaucggcaagcccugccccaagccgcaccggcugaaccacauggggaucugcuccugcggccuguacaagcaccccgggguccccgugaaguggaagcgcugaggacuaguuauaagacugacuagcccgaugggccucccaacgggcccuccuccccuccuugcaccgagauuaaucaaaggcucuuuucagagccaccaaaaaaaaaaaaaaaaaaaaaaaaaaaaaaaaaaaaaaaaaaaaaaaaaaaaaaaaaaaaaaaaaaaaaaaaaaaaaaaaaaaaaaaaaaaaaaaaaaaaa

SEQ ID NO: 32917 - RNA, 1686 nt, Artificial Sequence
  mRNA product Design i-3 (hSL-A100) comprising derived and/or modified sequence from LASV(LASV1000-NIG-2009;Clade II)__AIT17782__GPCmut7 (opt1)
aggagaaagcuuaccaugggccagaucaucaccuucuuccaggaggugccccacgucaucgaggaggugaugaacaucgugcugaucgcccucagccugcuggccauccucaaggggaucuacaacgucgcgaccugcggccuguucgggcugguguccuuccuccugcugugcggccgcagcugcuccacgaccuacaaggggguguacgagcuccagacccuggagcuggacauggccagccucaacaugaccaugccgcuguccugcacgaagaacaacagccaccacuacaucauggucggcaacgagaccggccuggagcucacccugaccaacacguccaucaucaaccacaaguucugcaaccugagcgacgcccacaagaagaaccucuacgaccacgcccugauguccaucaucagcaccuuccaccuguccauccccaacuucaaccaguacgaggccaugagcugcgacuucaacgggggcaagaucuccgugcaguacaaccucagccacaccuacgcgguggacgccgccaaccacugcgggaccaucgccaacggcguccugcagacguucaugcggauggcguggggcggguccuacaucgcccuggacagcggcaagggguccugggacugcaucaugaccagcuaccaguaccucaucauccagaacaccaccugggaggaccacugccaguucucccgccccagccccaucggcuaccuggggcugcucagccagcggacgcgcgacaucuacaucucccggcgccugcugggcaccuucaccuggacccucagcgacuccgagggcaacgagacgcccgggggcuacugccugacccgguggaugcugaucgaggccgagcucaagugcuucgggaacaccgccguggccaagugcaacgagaagcacgacgaggaguucugcgacaugcugcgccuguucgacuucaacaagcaggcgaucaagcggcucaagaccccggcccagaugagcauccagcugaucaacaaggccgugaacgcccugaucaacgaccagcucaucaugaagaaccaccuccgcgacaucaugggcauccccuacugcaacuacuccaaguacugcuaccugaaccacacggucaccgggaagaccagccugccccggugcugccugguguccaacggcagcuaccugaacgagacccacuucuccgacgacaucgagcagcaggccgacaacaugaucacggagcuccugcagaaggaguacaucgaccgccagggcaagaccccgcuggggcugguggaccucuucgucuucagcaccuccuucuaccugaucagcaucuuccugcaccucgugaagauccccacccaccggcacguggucggcaagcccugccccaagccgcaccgccugaaccacauggggaucugcuccugcggccuguacaagcaccccggggugcccgugaaguggaagcggugaggacuaguuauaagacugacuagcccgaugggccucccaacgggcccuccuccccuccuugcaccgagauuaaucaaaggcucuuuucagagccaccaaaaaaaaaaaaaaaaaaaaaaaaaaaaaaaaaaaaaaaaaaaaaaaaaaaaaaaaaaaaaaaaaaaaaaaaaaaaaaaaaaaaaaaaaaaaaaaaaaaaa

SEQ ID NO: 32918 - RNA, 1686 nt, Artificial Sequence
  mRNA product Design i-3 (hSL-A100) comprising derived and/or modified sequence from LASV(LASV221-NIG-2010;Clade II)__AIT17624__GPCmut7 (opt1)
aggagaaagcuuaccaugggccagaucaucaccuucuuccaggaggugccccacgucaucgaggaggugaugaacaucgugcugaucgcccucagccugcuggccauccucaaggggaucuacaacgucgcgaccugcggccuguucgggcugguguccuuccuccugcugugcggccgcagcugcuccacgaccuacaaggggguguacgagcuccagacccuggagcuggacauggccagccucaacaugaccaugccgcuguccugcacgaagaacaacagccaccacuacaucauggucggcaacgagaccggccuggagcucacccugaccaacacguccaucaucaaccacaaguucugcaaccugagcgacgcccacaagaagaaccucuacgaccacgcccugauguccaucaucagcaccuuccaccuguccauccccaacuucaaccaguacgaggccaugagcugcgacuucaacgggggcaagaucuccgugcaguacaaccucagccacaccuacgcgaucgacgccgccaaccacugcgggaccaucgccaacggcgugcugcagacguucaugcggauggcguggggcggguccuacaucgcccuggacagcggcaagggguccugggacugcaucaugaccagcuaccaguaccucaucauccagaacaccaccugggaggaccacugccaguucucccgccccagccccaucggcuaccuggggcugcucagccagcggacgcgcgacaucuacaucucccggcgccugcugggcaccuucaccuggacccucagcgacuccgagggcaacgagacgcccgggggcuacugccugacccgguggaugcugaucgaggccgagcucaagugcuucgggaacaccgccgucgccaagugcaacgagaagcacgacgaggaguucugcgacaugcugcgccuguucgacuucaacaagcaggcgauccggcgccucaagaccccggcccagaugagcauccagcugaucaacaaggccgugaacgcccugaucaacgaccagcucaucaugaagaaccaccuccgggacaucaugggcauccccuacugcaacuacuccaaguacugcuaccugaaccacacggugaccgggaagaccagccugccccgcugcugccuggucuccaacggcagcuaccugaacgagacccacuucuccgacgacaucgagcagcaggccgacaacaugaucacggagaugcuccagaaggaguacauggaccggcagggcaagaccccgcuggggcugguggaccuguucguguucagcaccuccuucuaccucaucagcaucuuccugcaccuggucaagauccccacccaccgccacgugaucggcaagcccugccccaagccgcaccggcucaaccacauggggaucugcuccugcggccuguacaagcaccccggggugcccgucaaguggaagcgcugaggacuaguuauaagacugacuagcccgaugggccucccaacgggcccuccuccccuccuugcaccgagauuaaucaaaggcucuuuucagagccaccaaaaaaaaaaaaaaaaaaaaaaaaaaaaaaaaaaaaaaaaaaaaaaaaaaaaaaaaaaaaaaaaaaaaaaaaaaaaaaaaaaaaaaaaaaaaaaaaaaaaa

SEQ ID NO: 32919 - RNA, 1686 nt, Artificial Sequence
  mRNA product Design i-3 (hSL-A100) comprising derived and/or modified sequence from LASV(LASV237-NIG-2010;Clade II)__AIT17638__GPCmut7 (opt1)
aggagaaagcuuaccaugggccagaucaucaccuucuuccaggaggugccccacgucaucgaggaggugaugaacaucgugcugaucgcccucagccugcuggccauccucaaggggaucuacaacgucgcgaccugcggccuguucgggcugguguccuuccuccugcugugcggccgcagcugcuccacgaccuacaaggggguguacgagcuccagacccuggagcuggacauggccagccucaacaugaccaugccgcuguccugcacgaagaacaacagccaccacuacaucauggucggcaacgagaccggccuggagcucacccugaccaacacguccaucaucaaccacaaguucugcaaccugagcgacgcccacaagaaggaccucuacgaccacgcccugauguccaucaucagcaccuuccaccuguccauccccaacuucaaccaguacgaggccaugagcugcgacuucaacgggggcaagaucuccgugcaguacaaccucagccacaccuacgcgguggacgccgccaaccacugcgggaccaucgccaacggcguccugcagacguucaugcggauggcguggggcggguccuacaucgcccuggacagcggcaagggguccugggacugcaucaugaccagcuaccaguaccucaucauccagaacaccaccugggaggaccacugccaguucucccgccccagccccaucggcuaccuggggcugcucagccagcggacgcgcgacaucuacaucucccggcgccugcugggcaccuucaccuggacccucagcgacuccgagggcaacgagacgcccgggggcuacugccugacccgguggaugcugaucgaggccgagcucaagugcuucgggaacaccgccguggccaagugcaacgagaagcacgacgaggaguucugcgacaugcugcgccuguucgacuucaacaagcaggcgauccggcgccucaagaccccggcccagaugagcauccagcugaucaacaaggccgugaacgcccugaucaacgaccagcucaucaugaagaaccaccuccgggacaucaugggcauccccuacugcaacuacuccaaguacugcuaccugaaccacacggucaccgggaagaccagccugccccgcugcugccugguguccaacggcagcuaccugaacgagacccacuucuccgacgacaucgagcagcaggccgacaacaugaucacggagcuccugcagaaggaguacauggaccggcagggcaagaccccgcuggggcugguggaccucuucgucuucagcaccuccuucuaccugaucagcaucuuccugcaccucaucaagauccccacccaccgccacaucacgggcaagcccugccccaagccgcaccggcugaaccacauggggaucugcuccugcggccuguacaagcaccccggggugcccgugaaguggaagcgcugaggacuaguuauaagacugacuagcccgaugggccucccaacgggcccuccuccccuccuugcaccgagauuaaucaaaggcucuuuucagagccaccaaaaaaaaaaaaaaaaaaaaaaaaaaaaaaaaaaaaaaaaaaaaaaaaaaaaaaaaaaaaaaaaaaaaaaaaaaaaaaaaaaaaaaaaaaaaaaaaaaaaa

SEQ ID NO: 32920 - RNA, 1686 nt, Artificial Sequence
  mRNA product Design i-3 (hSL-A100) comprising derived and/or modified sequence from LASV(LASV253-NIG-2011;Clade II)__AIT17670__GPCmut7 (opt1)
aggagaaagcuuaccaugggccagaucaucaccuucuuccaggaggugccccacgucaucgaggaggugaugaacaucgugcugaucgcccucagccugcuggccauccucaaggggaucuacaacgucgcgaccugcggccuguucgggcugguguccuuccuccugcugugcggccgcagcugcuccacgaccuacaaggggguguacgagcuccagacccuggagcuggacauggccagccucaacaugaccaugccgcuguccugcacgaagaacaacagccaccacuacaucauggucggcaacgagaccggccuggagcucacccugaccaacacguccaucaucaaccacaaguucugcaaccugagcgacgcccacaagaagaaccucuacgaccacgcccugauguccaucaucagcaccuuccaccuguccauccccaacuucaaccaguacgaggccaugagcugcgacuucaacgggggcaagaucuccgugcaguacaaccucagccacaccuacgcgguggacgccgccaaccacugcgggaccaucgccaacggcguccugcagacguucaugcggauggcguggggcggguccuacaucgcccuggacagcggcaagggguccugggacugcaucaugaccagcuaccaguaccucaucauccagaacaccaccugggaggaccacugccaguucucccgccccagccccaucggcuaccuggggcugcucagccagcggacgcgcgacaucuacaucucccggcgccugcugggcaccuucaccuggacccucagcgacuccgagggcaacgagacgcccgggggcuacugccugacccgguggaugcugaucgaggccgagcucaagugcuucgggaacaccgccguggccaagugcaacgagaagcacgacgaggaguucugcgacaugcugcgccuguucgacuucaacaagcaggcgauccggcgccucaaggccccggcccagaugagcauccagcugaucaacaaggccgugaacgcccugaucaacgaccagcucaucaugaagaaccaccuccgggacaucaugggcauccccuacugcaacuacuccaaguacugcuaccugaaccacaccgucacggggcgcaccagccugccccggugcugccugguguccaacggcagcuaccugaacgagacccacuucuccgacgacaucgagcagcaggcggacaacaugaucaccgagcuccugcagaaggaguacaucgaccgccagggcaagacgccgcuggggcugguggaccucuucgucuucagcaccuccuucuaccugaucagcaucuuccugcaccucgugaagauccccacccaccggcacaucaucggcaagcccugccccaagccgcaccgccugaaccacauggggaucugcuccugcggccuguacaagcaccccggggugcccgucaaguggaagcggugaggacuaguuauaagacugacuagcccgaugggccucccaacgggcccuccuccccuccuugcaccgagauuaaucaaaggcucuuuucagagccaccaaaaaaaaaaaaaaaaaaaaaaaaaaaaaaaaaaaaaaaaaaaaaaaaaaaaaaaaaaaaaaaaaaaaaaaaaaaaaaaaaaaaaaaaaaaaaaaaaaaaa

SEQ ID NO: 32921 - RNA, 1686 nt, Artificial Sequence
  mRNA product Design i-3 (hSL-A100) comprising derived and/or modified sequence from LASV(LASV254-NIG-2011;Clade II)__AIT17674__GPCmut7 (opt1)
aggagaaagcuuaccaugggccagaucaucaccuucuuccaggaggugccccacgucaucgaggaggugaugaacaucgugcugaucgcccucagccugcuggccauccucaaggggaucuacaacgucgcgaccugcggccuguucgggcugguguccuuccuccugcugugcggccgcagcugcuccacgaccuacaaggggguguacgagcuccagacccuggagcuggacaugaccaaccucaacaugacgaugccgcugagcugcaccaagaacaacucccaccacuacaucauggucggcaacgagaccggccuggagcucacccugacgaacaccagcaucaucaaccacaaguucugcaaccuguccgacgcccacaagaagaaccucuacaaccacgcccugaugagcaucaucuccaccuuccaccugagcauccccaacuucaaccaguacgaggccauguccugcgacuucaacgggggcaagaucagcgugcaguacaaccucucccacagcuacgccguggacgcggccaaccacugcgggaccaucgccaacggcguccugcagacguucaugcggauggccuggggcggguccuacaucgcgcuggacagcggcaaggggaacugggacugcaucaugaccuccuaccaguaccucaucauccagaacaccaccugggaggaccacugccaguucagccgccccucccccaucggcuaccuggggcugcucagccagcggacgcgcgacaucuacaucagccggcgccugcugggcaccuucaccuggacccucuccgacagcgagggcaacgagacgcccgggggcuacugccugacccgguggaugcugaucgaggccgagcucaagugcuucgggaacaccgccguggccaagugcaacgagaagcacgacgaggaguucugcgacaugcugcgccuguucgacuucaacaagcaggccauccggcgccucaagaccccggcgcaggccaacauccagcugaucaacaaggccgugaacgcccugaucaacgaccagcucaucaugaagaaccaccuccgggacaucaugggcauccccuacugcaacuacuccaaguacugcuaccugaaccacacggucaccgggaagaccagccugccccgcugcugccugguguccaacggcagcuaccugaacgagacccacuucuccgacgacaucgagcagcaggccgacaacaugaucacggagcuccugcagaaggaguacauggaccggcagggcaagaccccgcuggggcugguggaccucuucgucuucagcaccuccuucuaccugaucagcaucuuccugcaccucgugaagauccccacccaccgccacgugaucggcaagcccugccccaagccgcaccggcugaaccacauggggaucugcuccugcggccuguacaagcaccccgggguccccgugaaguggaagcgcugaggacuaguuauaagacugacuagcccgaugggccucccaacgggcccuccuccccuccuugcaccgagauuaaucaaaggcucuuuucagagccaccaaaaaaaaaaaaaaaaaaaaaaaaaaaaaaaaaaaaaaaaaaaaaaaaaaaaaaaaaaaaaaaaaaaaaaaaaaaaaaaaaaaaaaaaaaaaaaaaaaaaa

SEQ ID NO: 32922 - RNA, 1686 nt, Artificial Sequence
  mRNA product Design i-3 (hSL-A100) comprising derived and/or modified sequence from LASV(Nig08-A19;Clade III)__ADU56618__GPCmut7 (opt1)
aggagaaagcuuaccaugggccagaucgugaccuucuuccaggaggucccccacgugaucgaggaggugaugaacaucguccugaucgcccucagcauccuggccauccugaaggggcucuacaacaucgcgaccugcggccugaucgggcuggugacguuccuccugcuguccggccgcagcugcuccaugaccuacaaggggguguacgagcuccagacccuggagcugaacaugaacacccucaacaugacgaugccgcugagcugcaccaagaacaacucccaccacuacaucauggucggcaacgagaccggccuggagcucacccugacgaacaccagccugcuccaccacaaguucugcaaccuguccgacgcccacaagaagaaccuguacgaccacacccucaugagcaucaucuccaccuuccaccugagcauccccaacuucaaccaguacgaggccauguccugcgacuucaacgggggcaagaucacggugcaguacaaccugagccacuccuacgccaucgacgccgcgaaccacugcgggaccguggccaacggcguccuccagaccuucaugcggauggccuggggcgggagcuacaucgcccuggacuccggccgcgggaagugggacugcaucaugaccagcuaccaguaccugaucauccagaacacgaccugggaggaccacugccaguucucccggcccagccccaucggcuaccucgggcugcugucccagcgcacccgggacaucuacaucagccgccggcuccugggcaccuucacguggacccugagcgacuccgagggcaacgagacccccgggggcuacugccucacccgcuggaugcugaucgaggcggagcugaagugcuucgggaacacggccguggccaagugcaacgagaagcacgacgaggaguucugcgacaugcuccggcuguucgacuucaacaagcaggccauccgccggcugaaggccccggcgcagaugagcauccagcucaucaacaaggccgugaacgcccugaucaacgaccagcugaucaugaagaaccaccuccgcgacaucaugggcauccccuacugcaacuacuccaaguacugcuaccugaaccacaccagcaccgggcggaccucccugccccgcugcugccucgucagcaacggcuccuaccugaacgagacgcacuucagcgacgacaucgagcagcaggccgacaacaugaucaccgagaugcugcagaaggaguaccuggaccggcagggcaagaccccgcucgggcugguggaccuguucguguucuccaccagcuucuaccucaucuccaucuuccugcaccuggucaagauccccacgcaccgccacaucgugggcaagcccugccccaagccgcaccggcucaaccacauggggaucugcagcugcggccuguacaagcagcccggggugcccguccgcuggaagcggugaggacuaguuauaagacugacuagcccgaugggccucccaacgggcccuccuccccuccuugcaccgagauuaaucaaaggcucuuuucagagccaccaaaaaaaaaaaaaaaaaaaaaaaaaaaaaaaaaaaaaaaaaaaaaaaaaaaaaaaaaaaaaaaaaaaaaaaaaaaaaaaaaaaaaaaaaaaaaaaaaaaaa

SEQ ID NO: 32923 - RNA, 1689 nt, Artificial Sequence
  mRNA product Design i-3 (hSL-A100) comprising derived and/or modified sequence from LASV(G1180-SLE-2010;Clade IV)__AIT17168__GPCmut7 (opt1)
aggagaaagcuuaccaugggccagaucgugaccuucuuccaggaggucccccacgugaucgaggaggugaugaacaucguccugaucgcccucagcauccuggccgugcugaaggggcucuacaacuucgcgaccugcggccugguggggcugcucacguuccugcugcucugcggccgcuccugcaccgccagccgguacaagggggucuacgagcugcagacccuggagcucaacauggagacccugaacaugacgaugccgcuguccugcaccaagaacaacagccaccacuacaucauggugggcaacgagaccggccucgagcugacccugacgaacaccuccaucaucaaccacaaguucugcaaccucagcgacgcccacaagaagaaccuguacgaccacgcccugauguccaucaucagcaccuuccaccucuccauccccaacuucaaccaguacgaggccaugagcugcgacuucaacgggggcaagaucuccgugcaguacaaccugagccacuccuacgcgggggacgccgccaaccacugcggcaccgucgccaacggggugcugcagacguucaugcgcauggcguggggcggcagcuacaucgcccucgacuccgggcacggcagcugggacugcaucaugaccuccuaccaguaccugaucauccagaacaccaccugggaggaccacugccaguucagccggcccucccccaucggguaccugggccuccugagccagcgcacgcgggacaucuacaucagccgccggcugcucggcaccuucaccuggacccuguccgacagcgaggggaaggacacgccgggcggguacugccugacccgcuggaugcucaucgaggccgagcugaagugcuucggcaacaccgccguggccaagugcaacgagaagcacgacgaggaguucugcgacaugcugcggcuguucgacuucaacaagcaggcgauccagcgccugaaggcccccgcccagauguccauccagcugaucaacaaggccgucaacgcccucaucaacgaccagcugaucaugaagaaccaccuccgggacaucauggggauccccuacugcaacuacagcaaguacugcuaccucaaccacaccacgaccggcaagaccucccugcccaagugcugccuggugagcaacggcuccuaccucaacgagacccacuucagcgacgacaucgagcagcaggcggacaacaugaucacggagaugcugcagaaggaguacauggagcgccaggggaagaccccgcugggccugguggaccucuucgucuucuccaccagcuucuaccugaucuccaucuuccugcaccucgugaagauccccacccaccggcacaucgugggcaagagcugccccaagccccaccgccugaaccacauggggaucugcuccugcgggcuguacaagcagccgggcguccccgugaaguggaagcggugaggacuaguuauaagacugacuagcccgaugggccucccaacgggcccuccuccccuccuugcaccgagauuaaucaaaggcucuuuucagagccaccaaaaaaaaaaaaaaaaaaaaaaaaaaaaaaaaaaaaaaaaaaaaaaaaaaaaaaaaaaaaaaaaaaaaaaaaaaaaaaaaaaaaaaaaaaaaaaaaaaaaa

SEQ ID NO: 32924 - RNA, 1689 nt, Artificial Sequence
  mRNA product Design i-3 (hSL-A100) comprising derived and/or modified sequence from LASV(G1442-SLE-2011;Clade IV)__AIT17180__GPCmut7 (opt1)
aggagaaagcuuaccaugggccagaucgugaccuucuuccaggaggucccccacgugaucgaggaggugaugaacaucguccugaucgcccucagcauccuggccgugcugaaggggcucuacaacguggcgaccugcggccugaucgggcuggucacguuccuccugcugugcggccgcuccugcaccaccacccucuacaaggggguguacgagcugcagacgcuggagcucaacauggagacccugaacaugaccaugccgcugagcugcaccaagaacaacucccaccacuacauccgggugggcaacgagacgggccucgagcugacccugaccaacaccagcaucaucaaccacaaguucugcaaccucuccgacgcccacaagaagaaccuguacgaccacgcccugaugagcaucaucuccacguuccaccucagcauccccaacuucaaccaguacgaggccauguccugcgacuucaacgggggcaagaucagcguccaguacaaccugucccacagcuacgccggggacgcggccaaccacugcggcaccguggccaacggggugcugcagaccuucaugcgcauggccuggggcggcuccuacaucgcgcucgacagcgggcggggcaacugggacugcaucaugaccuccuaccaguaccugaucauccagaacacgaccugggacgaccacugccaguucagccgccccucccccaucggguaccugggccuccugagccagcggacccgcgacgucuacaucucccggcgccugcucggcaccuucacguggacccugagcgacagcgaggggaaggacaccccgggcggguacugccugacccgguggaugcucaucgaggccgagcugaagugcuucggcaacacggccguggccaagugcaacgagaagcacgacgaggaguucugcgacaugcugcgccucuucgacuucaacaagcaggccauccagcggcugaaggcgcccgcccagauguccauccagcugaucaacaaggccgugaacgcccucaucaacgaccagcugaucaugaagaaccaccuccgcgacaucauggggauccccuacugcaacuacagcaaguacugcuaccugaacaacaccgccaccggcaagaccucccugcccaagugcugccugaucagcaacggcuccuaccucaacgagacgcacuucagcgacgacaucgagcaggaggcggacaacaugaucaccgagaugcugcagaaggaguacauggagcggcaggggaagaccccgcugggccuggucgaccucuucguguucuccaccagcuucuaccugaucuccaucuuccugcaccucgugaagauccccacgcaccgccacaucgucggcaagagcugccccaagccccaccggcugaaccacauggggaucugcuccugcgggcuguacaagcagccgggcgugcccgugcgcuggaagcggugaggacuaguuauaagacugacuagcccgaugggccucccaacgggcccuccuccccuccuugcaccgagauuaaucaaaggcucuuuucagagccaccaaaaaaaaaaaaaaaaaaaaaaaaaaaaaaaaaaaaaaaaaaaaaaaaaaaaaaaaaaaaaaaaaaaaaaaaaaaaaaaaaaaaaaaaaaaaaaaaaaaaa

SEQ ID NO: 32925 - RNA, 1689 nt, Artificial Sequence
  mRNA product Design i-3 (hSL-A100) comprising derived and/or modified sequence from LASV(G3010-SLE-2013;Clade IV)__AIT17344__GPCmut7 (opt1)
aggagaaagcuuaccaugggccagaucgugaccuucuuccaggaggucccccacgugaucgaggaggugaugaacaucguccugaucgcccucagcauccuggccgugcugaaggggcucuacaacuucgcgaccugcggccugguggggcuggucacguuccuccugcugugcggccgcuccugcaccaccagccucuacaaggggguguacgagcugcagacccuggagcucaacauggagacgcugaacaugaccaugccgcuguccugcaccaagaacaacagccaccacuacaucauggugggcaacgagaccggccucgagcugacgcugaccaacaccuccaucaucaaccacaaguucugcaaccucagcgacgcccacaagaagaaccuguacaaccacgcccugauguccaucaucagcaccuuccaccucuccauccccaacuucaaccaguacgaggccaugagcugcgacuucaacgggggcaagaucuccguccaguacaaccugagccacuccuacgccggggacgcggccagccacugcggcacgguggccaacggggugcugcagaccuucaugcggauggccuggggcggcuccuacaucgcgcucgacagcggguacggcaagugggacugcaucaugaccuccuaccaguaccugaucauccagaacaccacgugggaggaccacugccaguucagccgccccucccccaucggguaccugggccuccugagccagcggacccgcgacaucuacaucagccggcgccugcucggcaccuucaccuggacgcuguccgacagcgaggggaaggacaccccgggcggguacugccugacccgguggaugcucaucgaggccgagcugaagugcuucggcaacaccgccgucgccaagugcaacgagaagcacgacgaggaguucugcgacaugcugcgccucuucgacuucaacaagcaggccauccagcggcugaagacgcccgcgcagauguccauccagcugaucaacaaggccgugaacgcccucaucaacgaccagcugaucaugaagaaccaccuccgcgacaucauggggauccccuacugcaacuacagcaaguacugcuaccugaaccacaccaccaccggcaagacgucccugcccaagugcugccuggugagcaacggcuccuaccucaacgagacccacuucagcgacgacaucgagcagcaggccgacaacaugaucaccgagaugcugcagaaggaguacauggagcggcaggggaagaccccgcugggccuggucgaccucuucguguucuccacgagcuucuaccugaucuccaucuuccugcaccucgugaagauccccacccaccgccacaucgucggcaagagcugccccaagccccaccggcugaaccacauggggaucugcuccugcgggcuguacaagcagccgggcgugcccgugcgcuggaagcggugaggacuaguuauaagacugacuagcccgaugggccucccaacgggcccuccuccccuccuugcaccgagauuaaucaaaggcucuuuucagagccaccaaaaaaaaaaaaaaaaaaaaaaaaaaaaaaaaaaaaaaaaaaaaaaaaaaaaaaaaaaaaaaaaaaaaaaaaaaaaaaaaaaaaaaaaaaaaaaaaaaaaa

SEQ ID NO: 32926 - RNA, 1689 nt, Artificial Sequence
  mRNA product Design i-3 (hSL-A100) comprising derived and/or modified sequence from LASV(G502-SLE-2009;Clade IV)__AIT17126__GPCmut7 (opt1)
aggagaaagcuuaccaugggccagaucgugaccuucuuccaggaggucccccacgugaucgaggaggugaugaacaucguccugaucgcccucagcauccuggccgugcugaaggggcucuacaacuucgcgaccugcggccugguggggcugcucacguuccugcugcucugcggccgcuccugcaccaccgggcuguacaagggcgucuacgagcugcagacccucgagcugaacauggagacgcugaacaugaccaugccgcucagcugcaccaagaacaacucccaccacuacaucauggugggcaacgagaccgggcuggagcugacgcucaccaacaccagcaucaucaaccacaaguucugcaaccuguccgacgcccacaagaagaaccuguacgaccacgcccucaugagcaucaucuccaccuuccaccugagcauccccaacuucaaccaguacgaggccauguccugcgacuucaacggcgggaagaucagcgugcaguacaaccugucccacagcuacgccggcgacgcggccgaccacugcgggacggucgccaacggcgugcuccagaccuucaugcggauggccuggggcggguccuacaucgcgcuggacagcggccgcgggcggugggacugcaucaugaccuccuaccaguaccugaucauccagaacaccacgugggaggaccacugccaguucagccgccccucccccaucggcuaccucggccugcugagccagcggacccgcgacaucuacaucucccggcgccuccuggggaccuucaccuggacgcugagcgacagcgagggcaaggacacccccgggggcuacugccucacccgguggaugcugaucgaggccgagcugaagugcuucgggaacaccgccguggccaagugcaacgagaagcacgacgaggaguucugcgacaugcuccgccuguucgacuucaacaagcaggccauccagcggcugaaggcgccggcccagauguccauccagcucaucaacaaggccgucaacgcccugaucaacgaccagcuggugaugaagaaccaccuccgcgacaucaugggcauccccuacugcaacuacagccgguacugcuaccugaaccacacgaccaccggccgcaccucccugcccaagugcugccucgugagcaacggguccuaccugaacgagacgcacuucagcgacgacaucgagcagcaggccgacaacaugaucaccgagaugcugcagaaggaguacauggagcggcagggcaagaccccgcuggggcucgucgaccuguucguguucuccaccagcuucuaccugaucuccaucuuccuccaccuggugaagauccccacgcaccgccacaucgucggcaagagcugccccaagccccaccggcugaaccacauggggaucugcuccugcggccucuacaagcagccgggcgugcccgugaaguggaagcgcugaggacuaguuauaagacugacuagcccgaugggccucccaacgggcccuccuccccuccuugcaccgagauuaaucaaaggcucuuuucagagccaccaaaaaaaaaaaaaaaaaaaaaaaaaaaaaaaaaaaaaaaaaaaaaaaaaaaaaaaaaaaaaaaaaaaaaaaaaaaaaaaaaaaaaaaaaaaaaaaaaaaaa

SEQ ID NO: 32927 - RNA, 1689 nt, Artificial Sequence
  mRNA product Design i-3 (hSL-A100) comprising derived and/or modified sequence from LASV(G733-SLE-2010;Clade IV)__AIT17154__GPCmut7 (opt1)
aggagaaagcuuaccaugggccagaucgugaccuucuuccaggaggucccccacgugaucgaggaggugaugaacaucguccugaucgcccucagcauccuggccgugcugaaggggcucuacaacuucgcgaccugcggcaucguggggcuggucuccuuccugcuccugugcggccgcagcugcacgaccucccuguacaaggggguguacgagcuccagacccuggagcugaacauggagacccucaacaugacgaugccgcugagcugcaccaagaacaacucccaccacuacaucauggugggcaacgagaccggccuggagcucacccugacgaacaccagcaucaucaaccacaaguucugcaaccuguccgacgcccacaagaagaaccucuacgaccacgcccugaugagcaucaucuccaccuuccaccugagcauccccaacuucaaccaguacgaggccauguccugcgacuucaacgggggcaagaucagcguccaguacaaccucucccacagcuacgccggggacgcggccaaccacugcggcaccaucgccaacggggugcugcagacguucaugcggauggccuggggcggcuccuacaucgcgcuggacagcgggcgcgaccggugggacugcaucaugaccuccuaccaguaccucaucauccagaacaccaccugggaggaccacugccaguucagccgccccucccccaucggcuaccuggggcugcucagccagcggacgcgcgacaucuacaucagccggcgccugcugggcaccuucaccuggacccucuccgacagcgagggcaaggacacgcccgggggcuacugccugacccgguggaugcugaucgaggccgagcucaagugcuucgggaacaccgccguggccaagugcaacgagaagcacgacgaggaguucugcgacaugcugcgccuguucgacuucaacaagcaggccauccagcggcucaaggcgccggcccagauguccauccagcugaucaacaaggccgucaacgcccugaucaacgaccagcucaucaugaagaaccaccuccgcgacaucaugggcauccccuacugcaacuacagcaaguacugcuaccugaaccacaccacgaccgggaagaccucccugcccaagugcugccuggugagcaacggcuccuaccugaacgagacccacuucagcgacgacaucgagcagcaggccgacaacaugaucacggagaugcuccagaaggaguacauggagcggcagggcaagaccccgcuggggcugguggaccuguucgucuucuccaccagcuucuaccucaucuccaucuuccugcaccuggugaagauccccacccaccgccacguggucggcaagagcugccccaagccccaccggcucaaccacauggggaucugcuccugcggccuguacgggcagccgggcgugcccgugaaguggaagcgcugaggacuaguuauaagacugacuagcccgaugggccucccaacgggcccuccuccccuccuugcaccgagauuaaucaaaggcucuuuucagagccaccaaaaaaaaaaaaaaaaaaaaaaaaaaaaaaaaaaaaaaaaaaaaaaaaaaaaaaaaaaaaaaaaaaaaaaaaaaaaaaaaaaaaaaaaaaaaaaaaaaaaa

SEQ ID NO: 32928 - RNA, 1689 nt, Artificial Sequence
  mRNA product Design i-3 (hSL-A100) comprising derived and/or modified sequence from MOPV/LASV reassortant(IGS-1;Clade IV)__AFY05576__GPCmut7 (opt1)
aggagaaagcuuaccaugggccagaucgugaccuucuuccaggaggucccccacgugaucgaggaggugaugaacaucguccugaucgcccucagcgugcuggccgugcugaaggggcucuacaacuucgcgaccugcggccuggucgggcuggugacguuccuccugcugugcggccgcuccugcaccaccagccucuacaaggggguguacgagcugcagacccuggagcucaacauggagacgcugaacaugaccaugccgcuguccugcaccaagaacaacagccaccacuacaucauggucggcaacgagaccggccucgagcugacgcugaccaacaccuccaucaucaaccacaaguucugcaaccucagcgacgcccacaagaagaaccuguacgaccacgcccugauguccaucaucagcaccuuccaccucuccauccccaacuucaaccaguacgaggccaugagcugcgacuucaacgggggcaagaucuccgugcaguacaaccugagccacuccuacgccggggacgcggccaaccacugcggcacgguggccaacgggguccugcagaccuucaugcggauggccuggggcggcagcuacaucgcgcucgacuccgggcgcggcaacugggacugcaucaugaccagcuaccaguaccugaucauccagaacaccacgugggaggaccacugccaguucucccggcccagccccaucggguaccugggccuccugucccagcgcacccgggacaucuacaucagccgccggcugcucggcaccuucaccuggacgcugagcgacuccgagggggaggacaccccgggcggguacugccugacccgcuggaugcucaucgaggccgagcugaagugcuucggcaacaccgccguggccaagugcaacgagaagcacgacgaggaguucugcgacaugcugcggcuguucgacuucaacaagcaggccauccagcgccugaaggcgcccgcccagaugagcauccagcugaucaacaaggccgugaacgcccucaucaacgaccagcugaucaugaagaaccaccuccgggacaucauggggauccccuacugcaacuacuccaaguacugcuaccucaaccacacgaccaccggccgcaccagccugcccaagugcugccuggucuccaacggcagcuaccucaacgagacgcacuucuccgacgacaucgagcagcaggccgacaacaugaucaccgagaugcugcagaaggaguacauggagcggcaggggaagaccccgcugggccugguggaccucuucguguucagcaccuccuucuaccugaucagcaucuuccugcaccucgucaagauccccacgcaccgccacaucguggggaaguccugccccaagccccaccggcugaaccacaugggcaucugcagcugcgggcuguacaagcagccgggcgugcccgucaaguggaagcgcugaggacuaguuauaagacugacuagcccgaugggccucccaacgggcccuccuccccuccuugcaccgagauuaaucaaaggcucuuuucagagccaccaaaaaaaaaaaaaaaaaaaaaaaaaaaaaaaaaaaaaaaaaaaaaaaaaaaaaaaaaaaaaaaaaaaaaaaaaaaaaaaaaaaaaaaaaaaaaaaaaaaaa

SEQ ID NO: 32929 - RNA, 1689 nt, Artificial Sequence
  mRNA product Design i-3 (hSL-A100) comprising derived and/or modified sequence from LASV(LM765-SLE-2012;Clade IV)__AIT17814__GPCmut7 (opt1)
aggagaaagcuuaccaugggccagaucgugaccuucuuccaggaggucccccacgugaucgaggaggugaugaacaucguccugaucgcccucagcauccuggccgugcugaaggggcucuacaacuucgcgaccugcggccugguggggcuggucacguuccuccugcugugcggccgcuccugcaccaccagccucuacaaggggguguacgagcugcagacccuggagcucaacauggagacgcugaacaugaccaugccgcuguccugcaccaagaacaacagccaccacuacaucauggugggcaacgagaccggccucgagcugacgcugaccaacaccuccaucaucgaccacaaguucugcaaccucagcgacgcccaccggaagaaccuguacgaccacgcccugauguccaucaucagcaccuuccaccucuccauccccaacuucaaccaguacgaggccaugagcugcgacuucaacgggggcaagaucuccguccaguacaaccugagccacuccuacgccaaggacgcggccgaccacugcgggacgguggccaacggcgugcugcagaccuucaugcgcauggccuggggcgggagcuacaucgcgcucgacuccggccgggggcgcugggacugcaucaugaccagcuaccaguaccugaucauccagaacaccacgugggaggaccacugccaguucucccggcccagccccaucggcuaccuggggcuccugucccagcgcacccgggacaucuacaucagccgccggcugcucggcaccuucaccuggacgcugagcgacuccgagggcaaggacacccccgggggcuacugccugacccgcuggaugcucaucgaggccgagcugaagugcuucgggaacaccgccgucgccaagugcaacgagaagcacgacgaggaguucugcgacaugcugcggcuguucgacuucaacaagcaggccauccagcgccugaaggcgccggcccagaugagcauccagcugaucaacaaggccgugaacgcccucaucaacgaccagcugaucaugaagaaccaccuccgggacaucaugggcauccccuacugcaacuacuccaaguacugcuaccucaaccacacgaccaccgggaagaccagccugcccaagugcugccugguguccaacggcagcuaccucaacgagacgcacuucuccgacgacaucgagcagcaggccgacaacaugaucaccgagaugcugcagaaggaguacauggagcgccagggcaagaccccgcuggggcuggucgaccucuucguguucagcaccuccuucuaccugaucagcaucuuccugcaccucgugaagauccccacgcaccggcacaucgucggcaagcccugccccaagccgcaccgccugaaccacauggggaucugcuccugcggccuguacaagcagcccggggugcccgugaaguggaagcggugaggacuaguuauaagacugacuagcccgaugggccucccaacgggcccuccuccccuccuugcaccgagauuaaucaaaggcucuuuucagagccaccaaaaaaaaaaaaaaaaaaaaaaaaaaaaaaaaaaaaaaaaaaaaaaaaaaaaaaaaaaaaaaaaaaaaaaaaaaaaaaaaaaaaaaaaaaaaaaaaaaaaa

SEQ ID NO: 32930 - RNA, 1689 nt, Artificial Sequence
  mRNA product Design i-3 (hSL-A100) comprising derived and/or modified sequence from LASV(LM776-SLE-2012;Clade IV)__AIT17824__GPCmut7 (opt1)
aggagaaagcuuaccaugggccagaucgugaccuucuuccaggaggucccccacgugaucgaggaggugaugaacaucguccugaucgcccucagcauccuggccgugcugaaggggcucuacaacuucgcgaccugcggccugguggggcuggucacguuccuccugcugugcggccgcuccugcaccaccagcguguacaaggggguguacgagcuccagacccuggagcugaacauggagacgcucaacaugaccaugccgcuguccugcaccaagaacaacagccaccacuacaucauggucggcaacgagaccggccuggagcucacgcugaccaacaccuccaucaucaaccacaaguucugcaaccugagcgacgcccacaagaagaaccucuacgaccacgcccugauguccaucaucagcaccuuccaccuguccauccccaacuucaaccaguacgaggccaugagcugcgacuucaacgggggcaagaucuccgugcaguacaaccucagccacuccuacgccggggacgcggccaaccacugcggcacgguggccaacgggguccugcagaccuucaugcggauggccuggggcggcagcuacaucgcgcuggacuccgggcacggcaagugggacugcaucaugaccagcuaccaguaccucaucauccagaacaccacgugggaggaccacugccaguucucccgccccagccccaucggguaccugggccugcucucccagcggacccgcgacaucuacaucagccggcgccugcugggcaccuucaccuggacgcucagcgacuccgaggggaaggacaccccgggcggguacugccugacccgguggaugcugaucgaggccgagcucaagugcuucggcaacaccgccguggccaagugcaacgagaagcacgacgaggaguucugcgacaugcugcgccuguucgacuucaacaagcaggccauccagcggcucaaggcgcccgcccagaugagcauccagcugaucaacaaggccgugaacgcccugaucaacgaccagcucaucaugaagaaccaccuccgcgacaucauggggauccccuacugcaacuacuccaaguacugcuaccugaaccacacgaccaccggcaagaccagccugcccaagugcugccuggucuccaacggcagcuaccugaacgagacgcacuucuccgacgacaucgagcagcaggccgacaacaugaucaccgagaugcuccagaaggaguacauggagcggcaggggaagaccccgcugggccugguggaccuguucguguucagcaccuccuucuaccucaucagcaucuuccugcaccuggucaagauccccacgcaccgccacaucguggggaaguccugccccaagccccaccggcucaaccacaugggcaucugcagcugcgggcuguacaagcagccgggcgugcccguccgcuggaagcggugaggacuaguuauaagacugacuagcccgaugggccucccaacgggcccuccuccccuccuugcaccgagauuaaucaaaggcucuuuucagagccaccaaaaaaaaaaaaaaaaaaaaaaaaaaaaaaaaaaaaaaaaaaaaaaaaaaaaaaaaaaaaaaaaaaaaaaaaaaaaaaaaaaaaaaaaaaaaaaaaaaaaa

SEQ ID NO: 32931 - RNA, 1689 nt, Artificial Sequence
  mRNA product Design i-3 (hSL-A100) comprising derived and/or modified sequence from LASV(Mad39;Clade IV)__ANH09722__GPCmut7 (opt1)
aggagaaagcuuaccaugggccagaucgugaccuucuuccaggaggucccccacgugaucgaggaggugaugaacaucguccugaucgcccucagcauccuggccgugcugaaggggcucuacaacguggcgaccugcggccugaucgggcuggucacguuccuccugcugugcggccgcuccugcaccaccacccucuacaaggggguguacgagcugcaggcccuggagcucaacauggagacgcugaacaugaccaugccgcugagcugcaccaagaacaacucccaccacuacauccgggugggcaacgagaccggccucgagcugacgcugaccaacaccagccucaucaaccacaaguucugcaaccuguccgacgcccacaagaagaaccuguacgaccacgcccucaugagcaucaucuccaccuuccaccugagcauccccaacuucaaccaguacgaggccauguccugcgacuucaacgacgggaagaucagcguccaguacaaccugucccacacguacgcgggcgacaccgccaaccacugcgggaccguggccaacggcgugcuccagaccuucaugcgcauggccuggggcgggagcuacaucgcgcuggacuccggccgcgggggcugggacugcaucaugacgagcuaccaguaccugaucauccagaacaccaccugggaggaccacugccaguucucccggcccagccccaucggguaccucggccugcugucccagcggacccgcgacaucuacaucagccggcgccuccugggcacguucaccuggacccuguccgacagcgaggggaaggacaccccgggcggguacugccucacgcgguggaugcugaucgaggccgagcugaagugcuucggcaacaccgccgucgccaagugcaacgagaagcacgacgaggaguucugcgacaugcuccgccuguucgacuucaacaagcaggccauccagcggcugaaggcgcccgcccagaugagcauccagcucaucaacaaggccgugaacgcccugaucaacgaccagcugaucaugaagaaccaccuccgcgacaucauggggauccccuacugcaacuacuccaaguacugcuaccugaaccacaccgugaccggcaagacgagccugcccaagugcugccucgucuccaacggcagcuaccugaacgagacccacuucuccgacgacaucgagcagcaggccgacaacaugaucaccgagaugcugcagaaggaguacauggagcggcaggggaagaccccgcugggccucguggaccuguucguguucagcacguccuucuaccugaucagcaucuuccuccaccuggucaagauccccacccaccgccacgugguggggaagcccugccccaagccgcaccggcugaaccacaugggcaucugcuccugcggguucuacaagcagcccggcguccccgugcgcuggaagcggugaggacuaguuauaagacugacuagcccgaugggccucccaacgggcccuccuccccuccuugcaccgagauuaaucaaaggcucuuuucagagccaccaaaaaaaaaaaaaaaaaaaaaaaaaaaaaaaaaaaaaaaaaaaaaaaaaaaaaaaaaaaaaaaaaaaaaaaaaaaaaaaaaaaaaaaaaaaaaaaaaaaaa

SEQ ID NO: 32932 - RNA, 1689 nt, Artificial Sequence
  mRNA product Design i-3 (hSL-A100) comprising derived and/or modified sequence from LASV(Z0947-SLE-2011;Clade IV)__AIT17840__GPCmut7 (opt1)
aggagaaagcuuaccaugggccagaucgugaccuucuuccaggaggucccccacgugaucgaggaggugaugaacaucguccugaucgcccucagcauccuggccgugcugaaggggcucuacaacuucgcgaccugcggccugguggggcuggucacguuccuccugcugugcggccgcuccugcaccaucagccucuacaaggggguguacgagcugcagacccuggagcucaacauggagacccugaacaugacgaugccgcuguccugcaccaagaacaacagccaccacuacaucauggugggcaacgagaccggccucgagcugacccugacgaacaccuccaucaucaaccacaaguucugcaaccucagcgacgcccacaagaagaaccuguacgaccacgcccugauguccaucaucagcaccuuccaccucuccauccccaacuucaaccaguacgaggccaugagcugcgacuucaacgggggcaagaucuccguccaguacaaccugagccacuccuacgccggggacgcggccaaccacugcggcaccguggccaacggggugcugcagacguucaugcggauggccuggggcggcagcuacaucgcgcucgacuccgggcgcgaccggugggacugcaucaugaccagcuaccaguaccugaucauccagaacaccaccugggaggaccacugccaguucucccgccccagccccaucggcuaccuggggcuccugucccagcggacgcgcgacaucuacaucagccggcgccugcucggcaccuucaccuggacccugagcgacuccgagggcaaggacacgcccgggggcuacugccugacccgguggaugcucaucgaggccgagcugaagugcuucgggaacaccgccgucgccaagugcaacgagaagcacgacgaggaguucugcgacaugcugcgccucuucgacuucaacaagcaggccauccagcggcugaaggcgccggcccagaugagcauccagcugaucaacaaggccgugaacgcccucaucaacgaccagcugaucaugaagaaccaccuccgcgacaucaugggcauccccuacugcaacuacuccaaguacugcuaccugaaccacaccacgaccgggaagaccagccugcccaagugcugccugguguccaacggcagcuaccucaacgagacccacuucuccgacgacaucgagcagcaggccgacaacaugaucacggagaugcugcagaaggaguacauggagcggcagggcaagaccccgcuggggcuggucgaccucuucguguucagcaccuccuucuaccugaucagcaucuuccugcaccucgugaagauccccacccaccgccacaucgucggcaagcccugccccaagccgcaccggcugaaccacauggggaucugcuccugcggccuguacaagcagcccggggugcccgugaaguggaagcgcugaggacuaguuauaagacugacuagcccgaugggccucccaacgggcccuccuccccuccuugcaccgagauuaaucaaaggcucuuuucagagccaccaaaaaaaaaaaaaaaaaaaaaaaaaaaaaaaaaaaaaaaaaaaaaaaaaaaaaaaaaaaaaaaaaaaaaaaaaaaaaaaaaaaaaaaaaaaaaaaaaaaaa

SEQ ID NO: 32933 - RNA, 1689 nt, Artificial Sequence
  mRNA product Design i-3 (hSL-A100) comprising derived and/or modified sequence from LASV(Josiah;Clade IV)__NP_694870__GPCmut7 (opt4)
aggagaaagcuuaccaugggccagaucgugaccuucuuccaggaggugccccacgugaucgaggaggugaugaacaucgugcugaucgcccugagcgugcuggccgugcugaagggccuguacaacuucgccaccugcggccuggugggccuggugaccuuccugcugcugugcggcagaagcugcaccaccagccuguacaagggcguguacgagcugcagacccuggagcugaacauggagacccugaacaugaccaugccccugagcugcaccaagaacaacagccaccacuacaucauggugggcaacgagaccggccuggagcugacccugaccaacaccagcaucaucaaccacaaguucugcaaccugagcgacgcccacaagaagaaccuguacgaccacgcccugaugagcaucaucagcaccuuccaccugagcauccccaacuucaaccaguacgaggccaugagcugcgacuucaacggcggcaagaucagcgugcaguacaaccugagccacagcuacgccggcgacgccgccaaccacugcggcaccguggccaacggcgugcugcagaccuucaugagaauggccuggggcggcagcuacaucgcccuggacagcggcagaggcaacugggacugcaucaugaccagcuaccaguaccugaucauccagaacaccaccugggaggaccacugccaguucagcagacccagccccaucggcuaccugggccugcugagccagagaaccagagacaucuacaucagcagaagacugcugggcaccuucaccuggacccugagcgacagcgagggcaaggacacccccggcggcuacugccugaccagauggaugcugaucgaggccgagcugaagugcuucggcaacaccgccguggccaagugcaacgagaagcacgacgaggaguucugcgacaugcugagacuguucgacuucaacaagcaggccauccagagacugaaggcccccgcccagaugagcauccagcugaucaacaaggccgugaacgcccugaucaacgaccagcugaucaugaagaaccaccugagagacaucaugggcauccccuacugcaacuacagcaaguacugcuaccugaaccacaccaccaccggcagaaccagccugcccaagugcugccuggugagcaacggcagcuaccugaacgagacccacuucagcgacgacaucgagcagcaggccgacaacaugaucaccgagaugcugcagaaggaguacauggagagacagggcaagaccccccugggccugguggaccuguucguguucagcaccagcuucuaccugaucagcaucuuccugcaccuggugaagauccccacccacagacacaucgugggcaagagcugccccaagccccacagacugaaccacaugggcaucugcagcugcggccuguacaagcagcccggcgugcccgugaaguggaagagaugaggacuaguuauaagacugacuagcccgaugggccucccaacgggcccuccuccccuccuugcaccgagauuaaucaaaggcucuuuucagagccaccaaaaaaaaaaaaaaaaaaaaaaaaaaaaaaaaaaaaaaaaaaaaaaaaaaaaaaaaaaaaaaaaaaaaaaaaaaaaaaaaaaaaaaaaaaaaaaaaaaaaa

SEQ ID NO: 32934 - RNA, 1686 nt, Artificial Sequence
  mRNA product Design i-3 (hSL-A100) comprising derived and/or modified sequence from LASV(LP;Clade I)__AAF86701__GPCmut7 (opt4)
aggagaaagcuuaccaugggccagaucaucaccuucuuccaggaggugccccacgugaucgaggaggugaugaacaucgugcugaucgcccugagccugcuggccauccugaagggccuguacaacaucgccaccugcggcaucaucggccugguggccuuccuguuccugugcggcaagagcugcagccugacccugaagggcggcuacgagcugcagacccuggagcugaacauggagacccugaacaugaccaugccccugagcugcaccaagaacagcagccaccacuacaucagagugggcaacgagaccggccuggagcugacccugaccaacaccagcaucaucaaccacaaguucugcaaccugagcgacgcccacaagaagaaccuguacgaccacgcccugaugagcaucaucagcaccuuccaccugagcauccccaacuucaaccaguacgaggccaugagcugcgacuucaacggcggcaagaucagcgugcaguacaaccugagccacagcuacgccggcgacgccgccgagcacugcggcaccguggccaacggcgugcugcagaccuucaugagaauggccuggggcggcagauacaucgcccuggacagcggcaagggcaacugggacugcaucaugaccagcuaccaguaccugaucauccagaacaccaccugggaggaccacugccaguucagcagacccagccccaucggcuaccugggccugcugagccagagaaccagagacaucuacaucagcagaagacugcugggcaccuucaccuggacccugagcgacagcgagggcaacgagacccccggcggcuacugccugaccagauggaugcugaucgaggccgagcugaagugcuucggcaacaccgccguggccaagugcaacgagaagcacgacgaggaguucugcgacaugcugagacuguucgacuucaacaagcaggccaucagaagacugaaggcccccgcccagaugagcauccagcugaucaacaaggccgugaacgcccugaucaacgaccagcugaucaugaagaaccaccugagagacaucaugggcauccccuacugcaacuacagcaaguacugcuaccugaaccacaccagcagcggcagaaccagccugcccaagugcugccugaucagcaacggcagcuaccugaacgagacccaguucagcgacgacaucgagcagcaggccgacaacaugaucaccgagaugcugcagaaggaguacaucgagagacagggcaagaccccccugggccugguggacaucuucaucuucagcaccagcuucuaccugaucagcaucuuccugcaccugaucaagauccccacccacagacacaucgugggcaagcccugccccaagccccacagacugaaccacaugggcgugugcagcugcggccuguacaagcaccccggcgugcccaccaaguggaagagaugaggacuaguuauaagacugacuagcccgaugggccucccaacgggcccuccuccccuccuugcaccgagauuaaucaaaggcucuuuucagagccaccaaaaaaaaaaaaaaaaaaaaaaaaaaaaaaaaaaaaaaaaaaaaaaaaaaaaaaaaaaaaaaaaaaaaaaaaaaaaaaaaaaaaaaaaaaaaaaaaaaaaa

SEQ ID NO: 32935 - RNA, 1686 nt, Artificial Sequence
  mRNA product Design i-3 (hSL-A100) comprising derived and/or modified sequence from LASV(803213;Clade II)__AAF86703__GPCmut7 (opt4)
aggagaaagcuuaccaugggccagaucaucaccuucuuccaggaggugccccacgugaucgaggaggugaugaacaucgugcugaucgcccugagccugcuggccauccugaagggcaucuacaacguggccaccugcggccuguucggccugaucagcuuccugcugcugugcggcagaagcugcagcgugaccuacaagggcguguacgagcugcagacccuggagcugaacauggccaaccugaacaugaccaugccccugagcugcaccaagaacaacagccaccacuacaucauggugggcaacgagaccggccuggagcugacccugaccaacaccagcaucaucaaccacaaguucugcaaccugagcgacgcccacaagaagaaccuguacgaccacgcccugaugagcaucaucagcaccuuccaccugagcauccccaacuucaaccaguacgaggccaugagcugcgacuucaacggcggcaagaucagcgugcaguacaaccugagccacagcuucgccguggacgccgccaaccacugcggcaccaucgccaacggcgugcugcagaccuucaugagaauggccuggggcggcagcuacaucgcccuggacagcggcaagggcaacugggacugcaucaugaccagcuaccaguaccugaucauccagaacaccaccugggaggaccacugccaguucagcagacccagccccaucggcuaccugggccugcugagccagagaaccagagacaucuacaucagcagaagacugcugggcaccuucaccuggacccugagcgacagcgagggcaacgaggcccccggcggcuacugccugaccagauggaugcugaucgaggccgagcugaagugcuucggcaacaccgccguggccaagugcaacgagaagcacgacgaggaguucugcgacaugcugagacuguucgacuucaacaagcaggccaucaagagacugaagacccccgcccagaugagcauccagcugaucaacaaggccgugaacgcccugaucaacgaccagcugaucaugaagaaccaccugagagacaucaugggcauccccuacugcaacuacagcagauacugcuaccugaaccacaccgugaccggcaagaccagccugcccagaugcugccuggugagcaacggcagcuaccugaacgagacccacuucagcgacgacaucgagcagcaggccgacaacaugaucaccgagaugcugcagaaggaguacauggacagacagggcaagaccccccugggccugguggaccuguucguguucagcaccagcuucuaccugaucagcaucuuccugcaccuggugaagauccccacccacagacacaucgugggcaagcccugccccaagccccacagacugaaccacaugggcaucugcagcugcggccuguacaagcaccccggcgugcccgugaaguggaagagaugaggacuaguuauaagacugacuagcccgaugggccucccaacgggcccuccuccccuccuugcaccgagauuaaucaaaggcucuuuucagagccaccaaaaaaaaaaaaaaaaaaaaaaaaaaaaaaaaaaaaaaaaaaaaaaaaaaaaaaaaaaaaaaaaaaaaaaaaaaaaaaaaaaaaaaaaaaaaaaaaaaaaa

SEQ ID NO: 32936 - RNA, 1686 nt, Artificial Sequence
  mRNA product Design i-3 (hSL-A100) comprising derived and/or modified sequence from LASV(GA391;Clade III)__CAA36645__GPCmut7 (opt4)
aggagaaagcuuaccaugggccagaucgugaccuucuuccaggaggugccccacgugaucgaggaggugaugaacaucgugcugaucgcccugagcauccuggccauccugaagggccuguacaacguggccaccugcggccugaucggccuggugaccuuccugcugcugagcggcagaagcugcagccugaucuacaagggcaccuacgagcugcagacccuggagcugaacauggagacccugaacaugaccaugccccugagcugcaccaagaacaacagccaccacuacaucagagugggcaacgagaccggccuggagcugacccugaccaacaccagcauccugaaccacaaguucugcaaccugagcgacgcccacaagagaaaccuguacgaccacagccugaugagcaucaucagcaccuuccaccugagcauccccaacuucaaccaguacgaggccaugagcugcgacuucaacggcggcaagaucaccgugcaguacaaccugagccacagcuucgccguggacgccgccggccacugcggcacccuggccaacggcgugcugcagaccuucaugagaauggccuggggcggcagcuacaucgcccuggacagcggcagaggcaacugggacugcaucaugaccagcuaccaguaccugaucauccagaacaccaccugggacgaccacugccaguucagcagacccagccccaucggcuaccugggccugcugagccagagaaccagagacaucuacaucagcagaagacugcugggcaccuucaccuggacccugagcgacagcgagggcaacgagacccccggcggcuacugccugaccagauggaugcugaucgaggccgagcugaagugcuucggcaacaccgccguggccaagugcaacgagaagcacgacgaggaguucugcgacaugcugagacuguucgacuucaacaagcaggccaucagaagacugaagacccccgcccagaugagcauccagcugaucaacaaggccgugaacgcccugaucaacgaccagcugaucaugaagaaccaccugagagacaucaugggcauccccuacugcaacuacagcagauacugcuaccugaaccacaccagcaccggcaagaccagccugcccagaugcugccugaucagcaacggcagcuaccugaacgagaccaaguucagcgacgacaucgagcagcaggccgacaacaugaucaccgagaugcugcagaaggaguacaucgacagacagggcaagaccccccugggccugguggaccuguucguguucagcaccagcuucuaccugaucagcaucuuccugcaccuggugaagauccccacccacagacacaucgugggcaagcccugccccaagccccacagacugaaccacaugggcaucugcagcugcggccuguacaagcagcccggcgugcccgugagauggaagagaugaggacuaguuauaagacugacuagcccgaugggccucccaacgggcccuccuccccuccuugcaccgagauuaaucaaaggcucuuuucagagccaccaaaaaaaaaaaaaaaaaaaaaaaaaaaaaaaaaaaaaaaaaaaaaaaaaaaaaaaaaaaaaaaaaaaaaaaaaaaaaaaaaaaaaaaaaaaaaaaaaaaaa

SEQ ID NO: 32937 - RNA, 1689 nt, Artificial Sequence
  mRNA product Design i-3 (hSL-A100) comprising derived and/or modified sequence from LASV(AV;Clade V)__CCA30314__GPCmut7 (opt4)
aggagaaagcuuaccaugggccagaucgugaccuucuuccaggaggugccccacgugaucgaggaggugaugaacaucgugcugaucgcccugagcauccuggccgugcugaagggccuguacaacaucgccaccugcggccugaucggccugaucaccuuccugcugcugugcggcagaagcugcagcagcaaccuguacaagggcguguacgagcugcagagccuggaccugaacauggagacccugaacaugaccaugccccugagcugcaccaagaacaacagccaccacuacaucagagugggcaacgacaccggccuggagcugacccugaccaacaccagcauccugaaccacaaguucugcaaccugagcgacgcccacaagaaggaccuguacgaccacgcccugaugagcaucaucagcaccuuccaccugagcauccccaacuucaaccaguacgaggccaugagcugcgacuucaacggcggcaagaucagcgugcaguacaaccugagccacagcuacgccaucgacgccgccaaccacugcggcaccguggccaacggcauccugcagaccuucaugagaauggccuggggcggcagcuacaucgcccuggacagcggcagaggcaacugggacugcaucaugaccagcuaccaguaccugaucauccagaacaccaccugggagaaccacugccaguucagcagacccagccccaucggcuaccugggccugcugagccagagaaccagagacaucuacaucagcagaagacugcugggcaccuucaccuggacccugagcgacagcgagggcaacgccacccccggcggcuacugccugaccagauggaugcugaucgaggccgagcugaagugcuucggcaacaccgccguggccaagugcaacgagaagcacgacgaggaguucugcgacaugcugagacuguucgacuucaacaagcaggccaucagcagacugaagagccccgcccagaugagcauccagcugaucaacaaggccgugaacgcccugaucaacgaccagcugaucaugaagaaccaccugagagacaucaugggcauccccuacugcaacuacagcaaguacugcuaccugaaccacaccaucaccggcaagaccagccugcccaagugcugccuggugagcaacggcagcuaccugaacgagacccacuucagcgacgacaucgagcagcaggccgacaacaugaucaccgagaugcugcagaaggaguacauggagagacagggcaagaccccccugggccugguggaccuguucguguucagcaccagcuucuaccugaucagcaucuuccugagacuggugaagauccccacccacagacacaucgugggcaagcccugccccaagccccacagacugaaccacaugggcaucugcagcugcggccuguacaagcagcccggcgugcccgugagauggaagagaugaggacuaguuauaagacugacuagcccgaugggccucccaacgggcccuccuccccuccuugcaccgagauuaaucaaaggcucuuuucagagccaccaaaaaaaaaaaaaaaaaaaaaaaaaaaaaaaaaaaaaaaaaaaaaaaaaaaaaaaaaaaaaaaaaaaaaaaaaaaaaaaaaaaaaaaaaaaaaaaaaaaaa

SEQ ID NO: 32938 - RNA, 1686 nt, Artificial Sequence
  mRNA product Design i-3 (hSL-A100) comprising derived and/or modified sequence from LASV(Togo/2016/7082;Clade VI)__AMR44577__GPCmut7 (opt4)
aggagaaagcuuaccaugggccagaucaucaccuucuuccaggaggugccccacgugaucgaggaggugaugaacaucgugcugaucgcccugagccugcuggccauccugaagggcguguacaacguggccaccugcggcaucaucggccuggugaccuuccuguuccugugcggcagaagcugcagccugaucuacaagggcagcuacgagcugcagacccuggagcugaacauggagacccugaacaugaccaugccccugagcugcaccaagaacagcagccaccacuacaucagagugggcaacgagaccggccuggagcugacccugaccaacaccagcaucaucaaccacaaguucugcaaccugagcgacgcccacaagagaaaccuguacgaccacgcccugaugagcauccugagcaccuuccaccugagcauccccaacuucaaccaguacgaggccaugagcugcgacuucaacggcggcaagaucagcgugcaguacaaccugagccacgccuacgccguggacgccgccgagcacugcggcaccguggccaacggcgugcugcagaccuucaugagaauggccuggggcggcagcuacaucgcccuggacagcggcagaggcaacugggacugcaucaugaccagcuaccaguaccugaucauccagaacaccaccugggaggaccacugccaguucagcagacccagccccaucggcuaccugggccugcugagccagagaaccagagacaucuacaucagcagaagacugcugggcaccuucaccuggacccugagcgacagcgagggcaacgagacccccggcggcuacugccugaccagauggaugcugaucgaggccgagcugaagugcuucggcaacaccgccguggccaagugcaacgagaagcacgacgaggaguucugcgacaugcugagacuguucgacuucaacaagcaggccauccagagacugaagagccccgcccagaugagcauccagcugaucaacaaggccgugaacgcccugaucaacgaccagcugaucaugaagaaccaccugagagacaugaugggcauccccuacugcaacuacagcaaguacugcuaccugaaccacaccagcagcggcagaaccagccugcccaagugcugccuggugagcaacggcagcuaccugaacgagacccacuucagcgacgacaucgagcagcaggccgacaacaugaucaccgagaugcugcagaaggaguacaucgacagacagggcaagaccccccugggccugguggaccuguucguguucagcaccagcuucuaccugaucagcaucuuccugcaccugaucaagauccccacccacagacacaucgugggcaagcccugccccaagccccacagacugaaccacaugggcaucugcagcugcggccuguacaagcagcccggcgugcccaccagauggaagagaugaggacuaguuauaagacugacuagcccgaugggccucccaacgggcccuccuccccuccuugcaccgagauuaaucaaaggcucuuuucagagccaccaaaaaaaaaaaaaaaaaaaaaaaaaaaaaaaaaaaaaaaaaaaaaaaaaaaaaaaaaaaaaaaaaaaaaaaaaaaaaaaaaaaaaaaaaaaaaaaaaaaaa

SEQ ID NO: 32939 - RNA, 1686 nt, Artificial Sequence
  mRNA product Design i-3 (hSL-A100) comprising derived and/or modified sequence from LASV(KAK-428;Clade n.d. (VII))__ANH09740__GPCmut7 (opt4)
aggagaaagcuuaccaugggccagaucgugaccuucuuccaggaggugccccacgugaucgaggaggugaugaacaucgugcugaucgcccugagccugcuggccauccugaagggccuguacaacuucgccaccugcggcgugaucggccugaucaccuuccugcugcugugcggcagaagcugcagcgccaccuacaagggccaguacgagcugcagacccuggagcugaacauggagagccugaacaugaccaugccccugagcugcaccaagaacaacagccaccacuacaucagagccggcaacaacaccggccuggagcugacccugaccaacaccagcaucaucagccacaaguucugcaaccugagcgacgcccacaagaagaaccuguacgaccacacccugaugagcaucaucaccaccuuccaccugagcauccccaacuucaaccaguacgaggccaugagcugcgacuucaacggcggcaagaucagcauccaguacaaccugagccacagcuacgccggcgacgccgcccagcacugcggcaccguggccaacggcgugcugcagaccuucaugagaauggccuggggcggcagcuaccuggcccuggacagcggcagaagaggcugggacugcaucaucagcagcuaccaguaccugaucauccagaacaccaccugggacgaccacugccaguucagcagacccagccccaucggcuaccugggcuucgugagccagaagaccagagacaucuacaucagcagaagacugcugggcaccuucaccuggacccugagcgacagcgagggccacgacaugcccggcggcuacugccugaccagauggaugcugaucgaggccgaccugaagugcuucggcaacaccgccguggccaagugcaacgagaagcacgacgaggaguucugcgacauguggagacuguucgacuucaacaagcaggccauccagagacugaaggcccccgcccagaugaacauccagcugaucaacaaggccgugaacgcccugaucaacgaccagcugaugaugaagaaccaccugagagacaucaugggcauccccuacugcaacuacagcaaguucugcuaccugaacaacaccaccaccggcagaaccagccugcccagaugcugccugaucagcaacggcagcuaccugaacgagacccacuucagcgacgacaucgagcagcaggccgacaacaugaucaccgagaugcugcagaaggaguacauggacagacagggcaagaccccccugggccugguggaccuguucguguucagcaccagcuucuaccugaucaccaucuuccugcaccuggugaagauccccacccacagacacaucgugggcaagcccugccccaagccccacagacugaaccacaugggcaucugcagcugcggccuguacaagcagcccggcgugcccgugagauggaagagaugaggacuaguuauaagacugacuagcccgaugggccucccaacgggcccuccuccccuccuugcaccgagauuaaucaaaggcucuuuucagagccaccaaaaaaaaaaaaaaaaaaaaaaaaaaaaaaaaaaaaaaaaaaaaaaaaaaaaaaaaaaaaaaaaaaaaaaaaaaaaaaaaaaaaaaaaaaaaaaaaaaaaa

SEQ ID NO: 32940 - RNA, 1686 nt, Artificial Sequence; identical to SEQ ID NO: 32934
  mRNA product Design i-3 (hSL-A100) comprising derived and/or modified sequence from LASV(Pinneo-NIG-1969;Clade I)__AIT17836__GPCmut7 (opt4)

SEQ ID NO: 32941 - RNA, 1686 nt, Artificial Sequence
  mRNA product Design i-3 (hSL-A100) comprising derived and/or modified sequence from LASV(ISTH0009-NIG-2011;Clade II)__AIT17404__GPCmut7 (opt4)
aggagaaagcuuaccaugggccagaucaucaccuucuuccaggaggugccccacgugaucgaggaggugaugaacaucgugcugaucgcccugagccugcuggccauccugaagggcaucuacaacguggccaccugcggccuguucggccuggugagcuuccugcugcugugcggcagaagcugcagcaccaccuacaagggcguguacgagcugcagacccuggagcuggacauggccagccugaacaugaccaugccccugagcugcaccaagaacaacagccaccacuacaucauggugggcaacgagaccggccuggagcugacccugaccaacaccagcaucaucaaccacaaguucugcaaccugagcgacgcccacaagaagaaccuguacgaccacgcccugaugagcaucaucagcaccuuccaccugagcauccccaacuucaaccaguacgaggccaugagcugcgacuucaacggcggcaagaucagcgugcaguacaaccugagccacgccuacgccguggacgccgccaaccacugcggcaccaucgccaacggcgugcugcagaccuucaugagaauggccuggggcggcagcuacaucgcccuggacagcggcaagggcagcugggacugcaucaugaccagcuaccaguaccugaucauccagaacaccaccugggaggaccacugccaguucagcagacccagccccaucggcuaccugggccugcugagccagagaaccagagacaucuacaucagcagaagacugcugggcaccuucaccuggacccugagcgacagcgagggcaacgagacccccggcggcuacugccugaccagauggaugcugaucgaggccgagcugaagugcuucggcaacaccgccguggccaagugcaacgagaagcacgacgaggaguucugcgacaugcugagacuguucgacuucaacaagcaggccaucagaagacugaagacccccgcccagaugagcauccagcugaucaacaaggccgugaacgcccugaucaacgaccagcugaucaugaagaaccaccugagagacaucaugggcauccccuacugcaacuacagcaaguacugcuaccugaaccacaccgugaccggcaagaccagccugcccagaugcugccuggugagcaacggcagcuaccugaacgagacccacuucagcgacgacaucgagcagcaggccgacaacaugaucaccgagcugcugcagaaggaguacauggacagacagggcaagaccccccugggccugguggaccuguucguguucagcaccagcuucuaccugaucagcaucuuccugcaccugaucaagauccccacccacagacacaucaccggcaagcccugccccaagccccacagacugaaccacaugggcaucugcagcugcggccuguacaagcaccccggcgugcccgugaaguggaagagaugaggacuaguuauaagacugacuagcccgaugggccucccaacgggcccuccuccccuccuugcaccgagauuaaucaaaggcucuuuucagagccaccaaaaaaaaaaaaaaaaaaaaaaaaaaaaaaaaaaaaaaaaaaaaaaaaaaaaaaaaaaaaaaaaaaaaaaaaaaaaaaaaaaaaaaaaaaaaaaaaaaaaa

SEQ ID NO: 32942 - RNA, 1686 nt, Artificial Sequence
  mRNA product Design i-3 (hSL-A100) comprising derived and/or modified sequence from LASV(ISTH2010-NIG-2012;Clade II)__AIT17482__GPCmut7 (opt4)
aggagaaagcuuaccaugggccagaucaucaccuucuuccaggaggugccccacgugaucgaggaggugaugaacaucgugcugaucgcccugagccugcuggccauccugaagggcaucuacaacguggccaccugcggccuguucggccuggugagcuuccugcugcugugcggcagaagcugcagcaccaccuacaagggcguguacgagcugcagacccuggagcuggacauggccagccugaacaugaccaugccccugagcugcaccaagaacaacagccaccacuacaucauggugggcaacgagaccggccuggagcugacccugaccaacaccagcaucaucaaccacaaguucugcaaccugagcgacgcccacaagaagaaccuguacgaccacgcccugaugagcaucaucagcaccuuccaccugagcauccccaacuucaaccaguacgaggccaugagcugcgacuucaacggcggcaagaucagcgugcaguacaaccugagccacgccuacgccguggacgccgccaaccacugcggcaccaucgccaacggcgugcugcagaccuucaugagaauggccuggggcggcagcuacaucgcccuggacagcggcaagggcagcugggacugcaucaugaccagcuaccaguaccugaucauccagaacaucaccugggaggaccacugccaguucagcagacccagccccaucggcuaccugggccugcugagccagagaaccagagacaucuacaucagcagaagacugcugggcaccuucaccuggacccugagcgacagcgagggcaacgagacccccggcggcuacugccugaccagauggaugcugaucgaggccgagcugaagugcuucggcaacaccgccguggccaagugcaacgagaagcacgacgaggaguucugcgacaugcugagacuguucgacuucaacaagcaggccaucagaagacugaagacccccgcccagaugagcauccagcugaucaacaaggccgugaacgcccugaucaacgaccagcugaucaugaagaaccaccugagagacaucaugggcauccccuacugcaacuacagcaaguacugcuaccugaaccacaccgugaccggcaagaccagccugcccagaugcugccuggugagcaacggcagcuaccugaacgagacccacuucagcgacgacaucgagcagcaggccgacaacaugaucaccgagcugcugcagaaggaguacaucgacagacagggcaagaccccccugggccugguggaccuguucguguucagcaccagcuucuaccugaucagcaucuuccugcaccuggugaagauccccacccacagacacguggugggcaagcccugccccaagccccacagacugaaccacaugggcaucugcagcugcggccuguacaagcaccccggcgugcccgugaaguggaagagaugaggacuaguuauaagacugacuagcccgaugggccucccaacgggcccuccuccccuccuugcaccgagauuaaucaaaggcucuuuucagagccaccaaaaaaaaaaaaaaaaaaaaaaaaaaaaaaaaaaaaaaaaaaaaaaaaaaaaaaaaaaaaaaaaaaaaaaaaaaaaaaaaaaaaaaaaaaaaaaaaaaaaa

SEQ ID NO: 32943 - RNA, 1686 nt, Artificial Sequence
  mRNA product Design i-3 (hSL-A100) comprising derived and/or modified sequence from LASV(Lassa virus/H.sapiens-wt/NGA/2015/ISTH_0543;Clade II)__AVO03639__GPCmut7 (opt4)
aggagaaagcuuaccaugggccagaucaucaccuucuuccaggaggugccccacgugaucgaggaggugaugaacaucgugcugaucgcccugagccugcuggccauccugaagggcaucuacaacguggccaccugcggccuguucggccuggugagcuuccugcugcugugcggcagaagcugcagcaccaccuacaagggcguguacgagcugcagacccuggagcuggacauggccaaccugaacaugaccaugccccugagcugcaccaagaacaacagccaccacuacaucauggugggcaacgagaccggccuggagcugacccugaccaacaccagcaucaucaaccacaaguucugcaaccugagcgacgcccacaagaagaaccuguacgaccacgcccugaugagcaucaucagcaccuuccaccugagcauccccaacuucaaccaguacgaggccaugagcugcgacuucaacggcggcaagaucagcgugcaguacaaccugagccacaccuacgccguggacgccgccaaccacugcggcaccaucgccaacggcgugcugcagaccuucaugagaauggccuggggcggcagcuacaucgcccuggacagcggcaagggcagcugggacugcaucaugaccagcuaccaguaccuggugauccagaacaccaccugggaggaccacugccaguucagcagacccagccccaucggcuaccugggccugcugagccagagaaccagagacaucuacaucagcagaagacugcugggcaccuucaccuggacccugagcgacagcgagggcaacgagacccccggcggcuacugccugaccagauggaugcugaucgaggccgagcugaagugcuucggcaacaccgccguggccaagugcaacgagaagcacgacgaggaguucugcgacaugcugagacuguucgacuucaacaagcaggccaucagaagacugaagacccccgcccagaugagcauccagcugaucaacaaggccgugaacgcccugaucaacgaccagcugaucaugaagaaccaccugagagacaucaugggcauccccuacugcaacuacagcaaguacugcuaccugaaccacaccgugaccggcaagaccagccugcccagaugcugccuggugagcaacggcagcuaccugaacgagacccacuucagcgacgacaucgagcagcaggccgacaacaugaucaccgagcugcugcagaaggaguacaucgacagacagggcaagaccccccugggccugguggaccuguucguguucagcaccagcuucuaccugaucagcaucuuccugcaccuggugaagauccccacccacagacacaucaccggcaagcccugccccaagccccacagacugaaccacaugggcaucugcagcugcggccuguacaagcaccccggcgugcccgugaaguggaagagaugaggacuaguuauaagacugacuagcccgaugggccucccaacgggcccuccuccccuccuugcaccgagauuaaucaaaggcucuuuucagagccaccaaaaaaaaaaaaaaaaaaaaaaaaaaaaaaaaaaaaaaaaaaaaaaaaaaaaaaaaaaaaaaaaaaaaaaaaaaaaaaaaaaaaaaaaaaaaaaaaaaaaa

SEQ ID NO: 32944 - RNA, 1686 nt, Artificial Sequence
  mRNA product Design i-3 (hSL-A100) comprising derived and/or modified sequence from LASV(Lassa virus/H.sapiens-wt/NGA/2016/ISTH_0009;Clade II)__AVO03571__GPCmut7 (opt4)
aggagaaagcuuaccaugggccagaucaucaccuucuuccaggaggugccccacgugaucgaggaggugaugaacaucgugcugaucgcccugagccugcuggccauccugaagggcaucuacaacguggccaccugcggccugcugggccuggugagcuuccugcugcugugcggcagaagcugcagcaccaccuacaagggcguguacgagcugcagacccuggagcuggacauggccagccugaacaugaccaugccccugagcugcaccaagaacaacagccaccacuacaucauggugggcaacgagaccggccuggagcugacccugaccaacaccagcaucaucaaccacaaguucugcaaccugagcgacgcccacaagaagaaccuguacgaccacgcccugaugagcaucaucagcaccuuccaccugagcauccccaacuucaaccaguacgaggccaugagcugcgacuucaacggcggcagaaucagcgugcaguacaaccugagccacagcuacgccguggacgccgccaaccacugcggcaccaucgccaacggcgugcugcagaccuucaugagaauggccuggggcggcagcuacaucgcccuggacagcggcaagggcagcugggacugcaucaugaccagcuaccaguaccugaucauccagaacaccaccugggaggaccacugccaguucagcagacccagccccaucggcuaccugggccugcugagccagagaaccagagacaucuacaucagcagaagacugcugggcaccuucaccuggacccugagcgacagcgagggcaacgagacccccggcggcuacugccugaccagauggaugcugaucgaggccgagcugaagugcuucggcaacaccgccguggccaagugcaacgagaagcacgacgaggaguucugcgacaugcugagacuguucgacuucaacaagcaggccaucagaagacugaagacccccgcccagaugagcauccagcugaucaacaaggccgugaacgcccugaucaacgaccagcugaucaugaagaaccaccugagagacaucaugggcauccccuacugcaacuacagcaaguacugcuaccugaaccacaccgugaccggcaagaccagccugcccagaugcugccuggugagcaacggcagcuaccugaacgagacccacuucagcgacgacaucgagcagcaggccgacaacaugaucaccgagcugcugcagaaggaguacaucgacagacagggcaagaccccccugggccugguggaccuguucguguucagcaccagcuucuaccugaucagcaucuuccugcaccuggugaagauccccacccacagacacaucaccggcaagcccugccccaagccccacagacugaaccacaugggcaucugcagcugcggccuguacaaccaccccggcgugcccgugaaguggaagagaugaggacuaguuauaagacugacuagcccgaugggccucccaacgggcccuccuccccuccuugcaccgagauuaaucaaaggcucuuuucagagccaccaaaaaaaaaaaaaaaaaaaaaaaaaaaaaaaaaaaaaaaaaaaaaaaaaaaaaaaaaaaaaaaaaaaaaaaaaaaaaaaaaaaaaaaaaaaaaaaaaaaaa

SEQ ID NO: 32945 - RNA, 1686 nt, Artificial Sequence
  mRNA product Design i-3 (hSL-A100) comprising derived and/or modified sequence from LASV(Lassa virus/H.sapiens-wt/NGA/2016/ISTH_0017;Clade II)__AVO03567__GPCmut7 (opt4)
aggagaaagcuuaccaugggccagaucaucaccuucuuccaggaggugccccacgugaucgaggaggugaugaacaucgugcugaucgcccugagccugcuggccauccugaagggcaucuacaacguggccaccugcggccuguucggccuggugagcuuccugcugcugugcggcagaagcugcagcaccaccuacaagggcguguacgagcugcagacccuggagcuggacauggccagccugaacaugaccaugccccugagcugcaccaagaacaacagccaccacuacaucauggugggcaacgagaccggccuggagcugacccugaccaacaccagcaucaucaaccacaaguucugcaaccugagcgacgcccacaagaagaaccuguacgaccacgcccugaugagcaucaucagcaccuuccaccugagcauccccaacuucaaccaguacgaggccaugagcugcgacuucaacggcggcaagaucagcgugcaguacaaccugagccacaccuacgccaucgacgccgccaaccacugcggcaccaucgccaacggcgugcugcagaccuucaugagaauggccuggggcggcagcuacaucgcccuggacagcggcaagggcagcugggacugcaucaugaccagcuaccaguaccugaucauccagaacaccaccugggaggaccacugccaguucagcagacccagccccaucggcuaccugggccugcugagccagagaaccagagacaucuacaucagcagaagacugcugggcaccuucaccuggacccugagcgacagcgagggcaacgagacccccggcggcuacugccugaccagauggaugcugaucgaggccgagcugaagugcuucggcaacaccgccguggccaagugcaacgagaagcacgacgaggaguucugcgacaugcugagacuguucgacuucaacaagcaggccaucagaagacugaagacccccgcccagaugagcauccagcugaucaacaaggccgugaacgcccugaucaacgaccagcugaucaugaagaaccaccugagagacaucaugggcauccccuacugcaacuacagcaaguacugcuaccugaaccacaccgugaccggcaagaccagccugcccagaugcugccuggugagcaacggcagcuaccugaacgagacccacuucagcgacgacaucgagcagcaggccgacaacaugaucaccgagcugcugcagaaggaguacauggacagacagggcaagaccccccugggccugguggaccuguucguguucagcaccagcuucuaccugaucagcaucuuccugcaccuggugagaauccccacccacagacacgugaucggcaagcccugccccaagccccacagacugaaccacaugggcaucugcagcugcggccuguacaagcaccccggcgugcccgugaaguggaagagaugaggacuaguuauaagacugacuagcccgaugggccucccaacgggcccuccuccccuccuugcaccgagauuaaucaaaggcucuuuucagagccaccaaaaaaaaaaaaaaaaaaaaaaaaaaaaaaaaaaaaaaaaaaaaaaaaaaaaaaaaaaaaaaaaaaaaaaaaaaaaaaaaaaaaaaaaaaaaaaaaaaaaa

SEQ ID NO: 32946 - RNA, 1686 nt, Artificial Sequence
  mRNA product Design i-3 (hSL-A100) comprising derived and/or modified sequence from LASV(Lassa virus/H.sapiens-wt/NGA/2018/ISTH_0959;Clade II)__AVV65099__GPCmut7 (opt4)
aggagaaagcuuaccaugggccagaucaucaccuucuuccaggaggugccccacgugaucgaggaggugaugaacaucgugcugaucgcccugagccugcuggccauccugaagggcaucuacaacguggugaccugcggccuguucggccuggugagcuuccugcugcugugcggcagaagcugcagcaccaccuacaagggcguguacgagcugcagacccuggagcuggacauggccagccugaacaugaccaugccccugagcugcaccaagaacaacagccaccacuacaucauggugggcaacgagaccggccuggagcugacccugaccaacaccagcaucaucaaccacaaguucugcaaccugagcgacgcccacaagaagaaccuguacgaccacgcccugaugagcaucaucagcaccuuccaccugagcauccccaacuucaaccaguacgaggccaugagcugcgacuucaacggcggcaagaucagcgugcaguacaaccugagccacgccuacgccaucgacgccgccaaccacugcggcaccaucgccaacggcgugcugcagaccuucaugagaauggccuggggcggcagcuacaucgcccuggacagcggcaagggcagcugggacugcaucaugaccagcuaccaguaccugaucauccagaacaccaccugggaggaccacugccaguucagcagacccagccccaucggcuaccugggccugcugagccagagaaccagagacaucuacaucagcagaagacugcugggcaccuucaccuggacccugagcgacagcgagggcaacgagacccccggcggcuacugccugaccagauggaugcugaucgaggccgagcugaagugcuucggcaacaccgccguggccaagugcaacgagaagcacgacgaggaguucugcgacaugcugagacuguucgacuucaacaagcaggccaucagaagacugaagacccccgcccagaugagcauccagcugaucaacaaggccgugaacgcccugaucaacgaccagcugaucaugaagaaccaccugagagacaucaugggcauccccuacugcaacuacagcaaguacugcuaccugaaccacaccgugaccggcaagaccagccugcccagaugcugccuggugagcaacggcagcuaccugaacgagacccacuucagcgacgacaucgagcagcaggccgacaacaugaucaccgagcugcugcagaaggaguacaucgacagacagggcaagaccccccugggccugguggaccuguucguguucagcaccagcuucuaccugaucagcaucuuccugcaccuggugaagauccccacccacagacacgugaucggcaagcccugccccaagccccacagacugaaccacaugggcaucugcagcugcggccuguacaagcaccccggcgugcccgugaaguggaagagaugaggacuaguuauaagacugacuagcccgaugggccucccaacgggcccuccuccccuccuugcaccgagauuaaucaaaggcucuuuucagagccaccaaaaaaaaaaaaaaaaaaaaaaaaaaaaaaaaaaaaaaaaaaaaaaaaaaaaaaaaaaaaaaaaaaaaaaaaaaaaaaaaaaaaaaaaaaaaaaaaaaaaa

SEQ ID NO: 32947 - RNA, 1686 nt, Artificial Sequence
  mRNA product Design i-3 (hSL-A100) comprising derived and/or modified sequence from LASV(LASV003-NIG-2008;Clade II)__AIT17580__GPCmut7 (opt4)
aggagaaagcuuaccaugggccagaucaucaccuucuuccaggaggugccccacgugaucgaggaggugaugaacaucgugcugaucgcccugagccugcuggccauccugaagggcaucuacaacguggccaccugcggccuguucggccuggugagcuuccugcugcugugcggcagaagcugcagcaccaccuacaagggcguguacgagcugcagacccuggagcuggacauggccagccugaacaugaccaugccccugagcugcaccaagaacaacagccaccacuacaucauggugggcaacgagaccggccuggagcugacccugaccaacaccagcaucaucaaccacaaguucugcaaccugagcgacgcccacaagaagaaccuguacgaccacgcccugaugagcaucaucagcaccuuccaccugagcauccccaacuucaaccaguacgaggccaugagcugcgacuucaacggcggcaagaucagcgugcaguacaaccugagccacaccuacgccguggacgccgccaaccacugcggcaccaucgccaacggcgugcugcagaccuucaugagaauggccuggggcggcagcuacaucgcccuggacagcggcaagggcagcugggacugcaucaugaccagcuaccaguaccugaucauccagaacaccaccugggaggaccacugccaguucagcagacccagccccaucggcuaccugggccugcugagccagagaaccagagacaucuacaucagcagaagacugcugggcaccuucaccuggacccugagcgacagcgagagcaacgagacccccggcggcuacugccugaccagauggaugcugaucgaggccgagcugaagugcuucggcaacaccgccguggccaagugcaacgagaagcacgacgaggaguucugcgacaugcugagacuguucgacuucaacaagcaggccaucagaagacugaaggcccccgcccagaugagcauccagcugaucaacaaggccgugaacgcccugaucaacgaccagcugaucaugaagaaccaccugagagacaucaugggcauccccuacugcaacuacagcaaguacugcuaccugaaccacaccgugaccggcagaaccagccugcccagaugcugccuggugagcaacggcagcuaccugaacgagacccacuucagcgacgacaucgagcagcaggccgacaacaugaucaccgagcugcugcagaaggaguacauggacagacagggcaagaccccccugggccugguggaccuguucguguucagcaccagcuucuaccugaucagcaucuuccugcaccuggugaagauccccacccacagacacgugaucggcaagcccugccccaagccccacagacugaaccacaugggcaucugcagcugcggccuguacaagcaccccggcgugcccgugaaguggaagagaugaggacuaguuauaagacugacuagcccgaugggccucccaacgggcccuccuccccuccuugcaccgagauuaaucaaaggcucuuuucagagccaccaaaaaaaaaaaaaaaaaaaaaaaaaaaaaaaaaaaaaaaaaaaaaaaaaaaaaaaaaaaaaaaaaaaaaaaaaaaaaaaaaaaaaaaaaaaaaaaaaaaaa

SEQ ID NO: 32948 - RNA, 1686 nt, Artificial Sequence
  mRNA product Design i-3 (hSL-A100) comprising derived and/or modified sequence from LASV(LASV035-NIG-2009;Clade II)__AIT17588__GPCmut7 (opt4)
aggagaaagcuuaccaugggccagaucaucaccuucuuccaggaggugccccacgugaucgaggaggugaugaacaucgugcugaucgcccugagccugcuggccauccugaagggcaucuacaacguggccaccugcggccuguucggccuggugagcuuccugcugcugugcggcagaagcugcagcaccaccuacaagggcguguacgagcugcagacccuggagcuggacauggccagccugaacaugaccaugccccugagcugcaccaagaacaacagccaccacuacaucauggugggcaacgagaccggccuggagcugacccugaccaacaccagcaucaucaaccacaaguucugcaaccugagcgacgcccacaagaagaaccuguacgaccacgcccugaugagcaucaucagcaccuuccaccugagcauccccaacuucaaccaguacgaggccaugagcugcgacuucaacggcggcaagaucagcgugcaguacaaccugagccacgccuacgccguggacgccgccaaccacugcggcaccaucgccaacggcgugcugcagaccuucaugagaauggccuggggcggcagcuacaucgcccuggacagcggcaagggcagcugggacugcaucaugaccagcuaccaguaccugaucauccagaacaccaccugggaggaccacugccaguucagcagacccagccccaucggcuaccugggccugcugagccagagaaccagagacaucuacaucagcagaagacugcugggcaccuucaccuggacccugagcgacagcgagggcaacgagacccccggcggcuacugccugaccagauggaugcugaucgaggccgagcugaagugcuucggcaacaccgccguggccaagugcaacgagaagcacgacgaggaguucugcgacaugcugagacuguucgacuucaacaagcaggccaucagaagacugaaggcccccgcccagaugagcauccagcugaucaacaaggccgugaacgcccugaucaacgaccagcugaucaugaagaaccaccugagagacaucaugggcauccccuacugcaacuacagcaaguacugcuaccugaaccacaccgugaccggcaagaccagccugcccagaugcugccuggugagcaacggcagcuaccugaacgagacccacuucagcgacgacaucgagcagcaggccgacaacaugaucaccgagcugcugcagaaggaguacaucgacagacagggcaagaccccccugggccugguggaccuguucguguucagcaccagcuucuaccugaucagcaucuuccugcaccuggugaagauccccacccacagacacgugaucggcaagcccugccccaagccccacagacugaaccacaugggcaucugcagcugcggccuguacaagcaccccggcgugcccgugaaguggaagagaugaggacuaguuauaagacugacuagcccgaugggccucccaacgggcccuccuccccuccuugcaccgagauuaaucaaaggcucuuuucagagccaccaaaaaaaaaaaaaaaaaaaaaaaaaaaaaaaaaaaaaaaaaaaaaaaaaaaaaaaaaaaaaaaaaaaaaaaaaaaaaaaaaaaaaaaaaaaaaaaaaaaaa

SEQ ID NO: 32949 - RNA, 1686 nt, Artificial Sequence
  mRNA product Design i-3 (hSL-A100) comprising derived and/or modified sequence from LASV(LASV1000-NIG-2009;Clade II)__AIT17782__GPCmut7 (opt4)
aggagaaagcuuaccaugggccagaucaucaccuucuuccaggaggugccccacgugaucgaggaggugaugaacaucgugcugaucgcccugagccugcuggccauccugaagggcaucuacaacguggccaccugcggccuguucggccuggugagcuuccugcugcugugcggcagaagcugcagcaccaccuacaagggcguguacgagcugcagacccuggagcuggacauggccagccugaacaugaccaugccccugagcugcaccaagaacaacagccaccacuacaucauggugggcaacgagaccggccuggagcugacccugaccaacaccagcaucaucaaccacaaguucugcaaccugagcgacgcccacaagaagaaccuguacgaccacgcccugaugagcaucaucagcaccuuccaccugagcauccccaacuucaaccaguacgaggccaugagcugcgacuucaacggcggcaagaucagcgugcaguacaaccugagccacaccuacgccguggacgccgccaaccacugcggcaccaucgccaacggcgugcugcagaccuucaugagaauggccuggggcggcagcuacaucgcccuggacagcggcaagggcagcugggacugcaucaugaccagcuaccaguaccugaucauccagaacaccaccugggaggaccacugccaguucagcagacccagccccaucggcuaccugggccugcugagccagagaaccagagacaucuacaucagcagaagacugcugggcaccuucaccuggacccugagcgacagcgagggcaacgagacccccggcggcuacugccugaccagauggaugcugaucgaggccgagcugaagugcuucggcaacaccgccguggccaagugcaacgagaagcacgacgaggaguucugcgacaugcugagacuguucgacuucaacaagcaggccaucaagagacugaagacccccgcccagaugagcauccagcugaucaacaaggccgugaacgcccugaucaacgaccagcugaucaugaagaaccaccugagagacaucaugggcauccccuacugcaacuacagcaaguacugcuaccugaaccacaccgugaccggcaagaccagccugcccagaugcugccuggugagcaacggcagcuaccugaacgagacccacuucagcgacgacaucgagcagcaggccgacaacaugaucaccgagcugcugcagaaggaguacaucgacagacagggcaagaccccccugggccugguggaccuguucguguucagcaccagcuucuaccugaucagcaucuuccugcaccuggugaagauccccacccacagacacguggugggcaagcccugccccaagccccacagacugaaccacaugggcaucugcagcugcggccuguacaagcaccccggcgugcccgugaaguggaagagaugaggacuaguuauaagacugacuagcccgaugggccucccaacgggcccuccuccccuccuugcaccgagauuaaucaaaggcucuuuucagagccaccaaaaaaaaaaaaaaaaaaaaaaaaaaaaaaaaaaaaaaaaaaaaaaaaaaaaaaaaaaaaaaaaaaaaaaaaaaaaaaaaaaaaaaaaaaaaaaaaaaaaa

SEQ ID NO: 32950 - RNA, 1686 nt, Artificial Sequence
  mRNA product Design i-3 (hSL-A100) comprising derived and/or modified sequence from LASV(LASV221-NIG-2010;Clade II)__AIT17624__GPCmut7 (opt4)
aggagaaagcuuaccaugggccagaucaucaccuucuuccaggaggugccccacgugaucgaggaggugaugaacaucgugcugaucgcccugagccugcuggccauccugaagggcaucuacaacguggccaccugcggccuguucggccuggugagcuuccugcugcugugcggcagaagcugcagcaccaccuacaagggcguguacgagcugcagacccuggagcuggacauggccagccugaacaugaccaugccccugagcugcaccaagaacaacagccaccacuacaucauggugggcaacgagaccggccuggagcugacccugaccaacaccagcaucaucaaccacaaguucugcaaccugagcgacgcccacaagaagaaccuguacgaccacgcccugaugagcaucaucagcaccuuccaccugagcauccccaacuucaaccaguacgaggccaugagcugcgacuucaacggcggcaagaucagcgugcaguacaaccugagccacaccuacgccaucgacgccgccaaccacugcggcaccaucgccaacggcgugcugcagaccuucaugagaauggccuggggcggcagcuacaucgcccuggacagcggcaagggcagcugggacugcaucaugaccagcuaccaguaccugaucauccagaacaccaccugggaggaccacugccaguucagcagacccagccccaucggcuaccugggccugcugagccagagaaccagagacaucuacaucagcagaagacugcugggcaccuucaccuggacccugagcgacagcgagggcaacgagacccccggcggcuacugccugaccagauggaugcugaucgaggccgagcugaagugcuucggcaacaccgccguggccaagugcaacgagaagcacgacgaggaguucugcgacaugcugagacuguucgacuucaacaagcaggccaucagaagacugaagacccccgcccagaugagcauccagcugaucaacaaggccgugaacgcccugaucaacgaccagcugaucaugaagaaccaccugagagacaucaugggcauccccuacugcaacuacagcaaguacugcuaccugaaccacaccgugaccggcaagaccagccugcccagaugcugccuggugagcaacggcagcuaccugaacgagacccacuucagcgacgacaucgagcagcaggccgacaacaugaucaccgagaugcugcagaaggaguacauggacagacagggcaagaccccccugggccugguggaccuguucguguucagcaccagcuucuaccugaucagcaucuuccugcaccuggugaagauccccacccacagacacgugaucggcaagcccugccccaagccccacagacugaaccacaugggcaucugcagcugcggccuguacaagcaccccggcgugcccgugaaguggaagagaugaggacuaguuauaagacugacuagcccgaugggccucccaacgggcccuccuccccuccuugcaccgagauuaaucaaaggcucuuuucagagccaccaaaaaaaaaaaaaaaaaaaaaaaaaaaaaaaaaaaaaaaaaaaaaaaaaaaaaaaaaaaaaaaaaaaaaaaaaaaaaaaaaaaaaaaaaaaaaaaaaaaaa

SEQ ID NO: 32951 - RNA, 1686 nt, Artificial Sequence
  mRNA product Design i-3 (hSL-A100) comprising derived and/or modified sequence from LASV(LASV237-NIG-2010;Clade II)__AIT17638__GPCmut7 (opt4)
aggagaaagcuuaccaugggccagaucaucaccuucuuccaggaggugccccacgugaucgaggaggugaugaacaucgugcugaucgcccugagccugcuggccauccugaagggcaucuacaacguggccaccugcggccuguucggccuggugagcuuccugcugcugugcggcagaagcugcagcaccaccuacaagggcguguacgagcugcagacccuggagcuggacauggccagccugaacaugaccaugccccugagcugcaccaagaacaacagccaccacuacaucauggugggcaacgagaccggccuggagcugacccugaccaacaccagcaucaucaaccacaaguucugcaaccugagcgacgcccacaagaaggaccuguacgaccacgcccugaugagcaucaucagcaccuuccaccugagcauccccaacuucaaccaguacgaggccaugagcugcgacuucaacggcggcaagaucagcgugcaguacaaccugagccacaccuacgccguggacgccgccaaccacugcggcaccaucgccaacggcgugcugcagaccuucaugagaauggccuggggcggcagcuacaucgcccuggacagcggcaagggcagcugggacugcaucaugaccagcuaccaguaccugaucauccagaacaccaccugggaggaccacugccaguucagcagacccagccccaucggcuaccugggccugcugagccagagaaccagagacaucuacaucagcagaagacugcugggcaccuucaccuggacccugagcgacagcgagggcaacgagacccccggcggcuacugccugaccagauggaugcugaucgaggccgagcugaagugcuucggcaacaccgccguggccaagugcaacgagaagcacgacgaggaguucugcgacaugcugagacuguucgacuucaacaagcaggccaucagaagacugaagacccccgcccagaugagcauccagcugaucaacaaggccgugaacgcccugaucaacgaccagcugaucaugaagaaccaccugagagacaucaugggcauccccuacugcaacuacagcaaguacugcuaccugaaccacaccgugaccggcaagaccagccugcccagaugcugccuggugagcaacggcagcuaccugaacgagacccacuucagcgacgacaucgagcagcaggccgacaacaugaucaccgagcugcugcagaaggaguacauggacagacagggcaagaccccccugggccugguggaccuguucguguucagcaccagcuucuaccugaucagcaucuuccugcaccugaucaagauccccacccacagacacaucaccggcaagcccugccccaagccccacagacugaaccacaugggcaucugcagcugcggccuguacaagcaccccggcgugcccgugaaguggaagagaugaggacuaguuauaagacugacuagcccgaugggccucccaacgggcccuccuccccuccuugcaccgagauuaaucaaaggcucuuuucagagccaccaaaaaaaaaaaaaaaaaaaaaaaaaaaaaaaaaaaaaaaaaaaaaaaaaaaaaaaaaaaaaaaaaaaaaaaaaaaaaaaaaaaaaaaaaaaaaaaaaaaaa

SEQ ID NO: 32952 - RNA, 1686 nt, Artificial Sequence
  mRNA product Design i-3 (hSL-A100) comprising derived and/or modified sequence from LASV(LASV253-NIG-2011;Clade II)__AIT17670__GPCmut7 (opt4)
aggagaaagcuuaccaugggccagaucaucaccuucuuccaggaggugccccacgugaucgaggaggugaugaacaucgugcugaucgcccugagccugcuggccauccugaagggcaucuacaacguggccaccugcggccuguucggccuggugagcuuccugcugcugugcggcagaagcugcagcaccaccuacaagggcguguacgagcugcagacccuggagcuggacauggccagccugaacaugaccaugccccugagcugcaccaagaacaacagccaccacuacaucauggugggcaacgagaccggccuggagcugacccugaccaacaccagcaucaucaaccacaaguucugcaaccugagcgacgcccacaagaagaaccuguacgaccacgcccugaugagcaucaucagcaccuuccaccugagcauccccaacuucaaccaguacgaggccaugagcugcgacuucaacggcggcaagaucagcgugcaguacaaccugagccacaccuacgccguggacgccgccaaccacugcggcaccaucgccaacggcgugcugcagaccuucaugagaauggccuggggcggcagcuacaucgcccuggacagcggcaagggcagcugggacugcaucaugaccagcuaccaguaccugaucauccagaacaccaccugggaggaccacugccaguucagcagacccagccccaucggcuaccugggccugcugagccagagaaccagagacaucuacaucagcagaagacugcugggcaccuucaccuggacccugagcgacagcgagggcaacgagacccccggcggcuacugccugaccagauggaugcugaucgaggccgagcugaagugcuucggcaacaccgccguggccaagugcaacgagaagcacgacgaggaguucugcgacaugcugagacuguucgacuucaacaagcaggccaucagaagacugaaggcccccgcccagaugagcauccagcugaucaacaaggccgugaacgcccugaucaacgaccagcugaucaugaagaaccaccugagagacaucaugggcauccccuacugcaacuacagcaaguacugcuaccugaaccacaccgugaccggcagaaccagccugcccagaugcugccuggugagcaacggcagcuaccugaacgagacccacuucagcgacgacaucgagcagcaggccgacaacaugaucaccgagcugcugcagaaggaguacaucgacagacagggcaagaccccccugggccugguggaccuguucguguucagcaccagcuucuaccugaucagcaucuuccugcaccuggugaagauccccacccacagacacaucaucggcaagcccugccccaagccccacagacugaaccacaugggcaucugcagcugcggccuguacaagcaccccggcgugcccgugaaguggaagagaugaggacuaguuauaagacugacuagcccgaugggccucccaacgggcccuccuccccuccuugcaccgagauuaaucaaaggcucuuuucagagccaccaaaaaaaaaaaaaaaaaaaaaaaaaaaaaaaaaaaaaaaaaaaaaaaaaaaaaaaaaaaaaaaaaaaaaaaaaaaaaaaaaaaaaaaaaaaaaaaaaaaaa

SEQ ID NO: 32953 - RNA, 1686 nt, Artificial Sequence
  mRNA product Design i-3 (hSL-A100) comprising derived and/or modified sequence from LASV(LASV254-NIG-2011;Clade II)__AIT17674__GPCmut7 (opt4)
aggagaaagcuuaccaugggccagaucaucaccuucuuccaggaggugccccacgugaucgaggaggugaugaacaucgugcugaucgcccugagccugcuggccauccugaagggcaucuacaacguggccaccugcggccuguucggccuggugagcuuccugcugcugugcggcagaagcugcagcaccaccuacaagggcguguacgagcugcagacccuggagcuggacaugaccaaccugaacaugaccaugccccugagcugcaccaagaacaacagccaccacuacaucauggugggcaacgagaccggccuggagcugacccugaccaacaccagcaucaucaaccacaaguucugcaaccugagcgacgcccacaagaagaaccuguacaaccacgcccugaugagcaucaucagcaccuuccaccugagcauccccaacuucaaccaguacgaggccaugagcugcgacuucaacggcggcaagaucagcgugcaguacaaccugagccacagcuacgccguggacgccgccaaccacugcggcaccaucgccaacggcgugcugcagaccuucaugagaauggccuggggcggcagcuacaucgcccuggacagcggcaagggcaacugggacugcaucaugaccagcuaccaguaccugaucauccagaacaccaccugggaggaccacugccaguucagcagacccagccccaucggcuaccugggccugcugagccagagaaccagagacaucuacaucagcagaagacugcugggcaccuucaccuggacccugagcgacagcgagggcaacgagacccccggcggcuacugccugaccagauggaugcugaucgaggccgagcugaagugcuucggcaacaccgccguggccaagugcaacgagaagcacgacgaggaguucugcgacaugcugagacuguucgacuucaacaagcaggccaucagaagacugaagacccccgcccaggccaacauccagcugaucaacaaggccgugaacgcccugaucaacgaccagcugaucaugaagaaccaccugagagacaucaugggcauccccuacugcaacuacagcaaguacugcuaccugaaccacaccgugaccggcaagaccagccugcccagaugcugccuggugagcaacggcagcuaccugaacgagacccacuucagcgacgacaucgagcagcaggccgacaacaugaucaccgagcugcugcagaaggaguacauggacagacagggcaagaccccccugggccugguggaccuguucguguucagcaccagcuucuaccugaucagcaucuuccugcaccuggugaagauccccacccacagacacgugaucggcaagcccugccccaagccccacagacugaaccacaugggcaucugcagcugcggccuguacaagcaccccggcgugcccgugaaguggaagagaugaggacuaguuauaagacugacuagcccgaugggccucccaacgggcccuccuccccuccuugcaccgagauuaaucaaaggcucuuuucagagccaccaaaaaaaaaaaaaaaaaaaaaaaaaaaaaaaaaaaaaaaaaaaaaaaaaaaaaaaaaaaaaaaaaaaaaaaaaaaaaaaaaaaaaaaaaaaaaaaaaaaaa

SEQ ID NO: 32954 - RNA, 1686 nt, Artificial Sequence
  mRNA product Design i-3 (hSL-A100) comprising derived and/or modified sequence from LASV(Nig08-A19;Clade III)__ADU56618__GPCmut7 (opt4)
aggagaaagcuuaccaugggccagaucgugaccuucuuccaggaggugccccacgugaucgaggaggugaugaacaucgugcugaucgcccugagcauccuggccauccugaagggccuguacaacaucgccaccugcggccugaucggccuggugaccuuccugcugcugagcggcagaagcugcagcaugaccuacaagggcguguacgagcugcagacccuggagcugaacaugaacacccugaacaugaccaugccccugagcugcaccaagaacaacagccaccacuacaucauggugggcaacgagaccggccuggagcugacccugaccaacaccagccugcugcaccacaaguucugcaaccugagcgacgcccacaagaagaaccuguacgaccacacccugaugagcaucaucagcaccuuccaccugagcauccccaacuucaaccaguacgaggccaugagcugcgacuucaacggcggcaagaucaccgugcaguacaaccugagccacagcuacgccaucgacgccgccaaccacugcggcaccguggccaacggcgugcugcagaccuucaugagaauggccuggggcggcagcuacaucgcccuggacagcggcagaggcaagugggacugcaucaugaccagcuaccaguaccugaucauccagaacaccaccugggaggaccacugccaguucagcagacccagccccaucggcuaccugggccugcugagccagagaaccagagacaucuacaucagcagaagacugcugggcaccuucaccuggacccugagcgacagcgagggcaacgagacccccggcggcuacugccugaccagauggaugcugaucgaggccgagcugaagugcuucggcaacaccgccguggccaagugcaacgagaagcacgacgaggaguucugcgacaugcugagacuguucgacuucaacaagcaggccaucagaagacugaaggcccccgcccagaugagcauccagcugaucaacaaggccgugaacgcccugaucaacgaccagcugaucaugaagaaccaccugagagacaucaugggcauccccuacugcaacuacagcaaguacugcuaccugaaccacaccagcaccggcagaaccagccugcccagaugcugccuggugagcaacggcagcuaccugaacgagacccacuucagcgacgacaucgagcagcaggccgacaacaugaucaccgagaugcugcagaaggaguaccuggacagacagggcaagaccccccugggccugguggaccuguucguguucagcaccagcuucuaccugaucagcaucuuccugcaccuggugaagauccccacccacagacacaucgugggcaagcccugccccaagccccacagacugaaccacaugggcaucugcagcugcggccuguacaagcagcccggcgugcccgugagauggaagagaugaggacuaguuauaagacugacuagcccgaugggccucccaacgggcccuccuccccuccuugcaccgagauuaaucaaaggcucuuuucagagccaccaaaaaaaaaaaaaaaaaaaaaaaaaaaaaaaaaaaaaaaaaaaaaaaaaaaaaaaaaaaaaaaaaaaaaaaaaaaaaaaaaaaaaaaaaaaaaaaaaaaaa

SEQ ID NO: 32955 - RNA, 1689 nt, Artificial Sequence
  mRNA product Design i-3 (hSL-A100) comprising derived and/or modified sequence from LASV(G1180-SLE-2010;Clade IV)__AIT17168__GPCmut7 (opt4)
aggagaaagcuuaccaugggccagaucgugaccuucuuccaggaggugccccacgugaucgaggaggugaugaacaucgugcugaucgcccugagcauccuggccgugcugaagggccuguacaacuucgccaccugcggccuggugggccugcugaccuuccugcugcugugcggcagaagcugcaccgccagcagauacaagggcguguacgagcugcagacccuggagcugaacauggagacccugaacaugaccaugccccugagcugcaccaagaacaacagccaccacuacaucauggugggcaacgagaccggccuggagcugacccugaccaacaccagcaucaucaaccacaaguucugcaaccugagcgacgcccacaagaagaaccuguacgaccacgcccugaugagcaucaucagcaccuuccaccugagcauccccaacuucaaccaguacgaggccaugagcugcgacuucaacggcggcaagaucagcgugcaguacaaccugagccacagcuacgccggcgacgccgccaaccacugcggcaccguggccaacggcgugcugcagaccuucaugagaauggccuggggcggcagcuacaucgcccuggacagcggccacggcagcugggacugcaucaugaccagcuaccaguaccugaucauccagaacaccaccugggaggaccacugccaguucagcagacccagccccaucggcuaccugggccugcugagccagagaaccagagacaucuacaucagcagaagacugcugggcaccuucaccuggacccugagcgacagcgagggcaaggacacccccggcggcuacugccugaccagauggaugcugaucgaggccgagcugaagugcuucggcaacaccgccguggccaagugcaacgagaagcacgacgaggaguucugcgacaugcugagacuguucgacuucaacaagcaggccauccagagacugaaggcccccgcccagaugagcauccagcugaucaacaaggccgugaacgcccugaucaacgaccagcugaucaugaagaaccaccugagagacaucaugggcauccccuacugcaacuacagcaaguacugcuaccugaaccacaccaccaccggcaagaccagccugcccaagugcugccuggugagcaacggcagcuaccugaacgagacccacuucagcgacgacaucgagcagcaggccgacaacaugaucaccgagaugcugcagaaggaguacauggagagacagggcaagaccccccugggccugguggaccuguucguguucagcaccagcuucuaccugaucagcaucuuccugcaccuggugaagauccccacccacagacacaucgugggcaagagcugccccaagccccacagacugaaccacaugggcaucugcagcugcggccuguacaagcagcccggcgugcccgugaaguggaagagaugaggacuaguuauaagacugacuagcccgaugggccucccaacgggcccuccuccccuccuugcaccgagauuaaucaaaggcucuuuucagagccaccaaaaaaaaaaaaaaaaaaaaaaaaaaaaaaaaaaaaaaaaaaaaaaaaaaaaaaaaaaaaaaaaaaaaaaaaaaaaaaaaaaaaaaaaaaaaaaaaaaaaa

SEQ ID NO: 32956 - RNA, 1689 nt, Artificial Sequence
  mRNA product Design i-3 (hSL-A100) comprising derived and/or modified sequence from LASV(G1442-SLE-2011;Clade IV)__AIT17180__GPCmut7 (opt4)
aggagaaagcuuaccaugggccagaucgugaccuucuuccaggaggugccccacgugaucgaggaggugaugaacaucgugcugaucgcccugagcauccuggccgugcugaagggccuguacaacguggccaccugcggccugaucggccuggugaccuuccugcugcugugcggcagaagcugcaccaccacccuguacaagggcguguacgagcugcagacccuggagcugaacauggagacccugaacaugaccaugccccugagcugcaccaagaacaacagccaccacuacaucagagugggcaacgagaccggccuggagcugacccugaccaacaccagcaucaucaaccacaaguucugcaaccugagcgacgcccacaagaagaaccuguacgaccacgcccugaugagcaucaucagcaccuuccaccugagcauccccaacuucaaccaguacgaggccaugagcugcgacuucaacggcggcaagaucagcgugcaguacaaccugagccacagcuacgccggcgacgccgccaaccacugcggcaccguggccaacggcgugcugcagaccuucaugagaauggccuggggcggcagcuacaucgcccuggacagcggcagaggcaacugggacugcaucaugaccagcuaccaguaccugaucauccagaacaccaccugggacgaccacugccaguucagcagacccagccccaucggcuaccugggccugcugagccagagaaccagagacguguacaucagcagaagacugcugggcaccuucaccuggacccugagcgacagcgagggcaaggacacccccggcggcuacugccugaccagauggaugcugaucgaggccgagcugaagugcuucggcaacaccgccguggccaagugcaacgagaagcacgacgaggaguucugcgacaugcugagacuguucgacuucaacaagcaggccauccagagacugaaggcccccgcccagaugagcauccagcugaucaacaaggccgugaacgcccugaucaacgaccagcugaucaugaagaaccaccugagagacaucaugggcauccccuacugcaacuacagcaaguacugcuaccugaacaacaccgccaccggcaagaccagccugcccaagugcugccugaucagcaacggcagcuaccugaacgagacccacuucagcgacgacaucgagcaggaggccgacaacaugaucaccgagaugcugcagaaggaguacauggagagacagggcaagaccccccugggccugguggaccuguucguguucagcaccagcuucuaccugaucagcaucuuccugcaccuggugaagauccccacccacagacacaucgugggcaagagcugccccaagccccacagacugaaccacaugggcaucugcagcugcggccuguacaagcagcccggcgugcccgugagauggaagagaugaggacuaguuauaagacugacuagcccgaugggccucccaacgggcccuccuccccuccuugcaccgagauuaaucaaaggcucuuuucagagccaccaaaaaaaaaaaaaaaaaaaaaaaaaaaaaaaaaaaaaaaaaaaaaaaaaaaaaaaaaaaaaaaaaaaaaaaaaaaaaaaaaaaaaaaaaaaaaaaaaaaaa

SEQ ID NO: 32957 - RNA, 1689 nt, Artificial Sequence
  mRNA product Design i-3 (hSL-A100) comprising derived and/or modified sequence from LASV(G3010-SLE-2013;Clade IV)__AIT17344__GPCmut7 (opt4)
aggagaaagcuuaccaugggccagaucgugaccuucuuccaggaggugccccacgugaucgaggaggugaugaacaucgugcugaucgcccugagcauccuggccgugcugaagggccuguacaacuucgccaccugcggccuggugggccuggugaccuuccugcugcugugcggcagaagcugcaccaccagccuguacaagggcguguacgagcugcagacccuggagcugaacauggagacccugaacaugaccaugccccugagcugcaccaagaacaacagccaccacuacaucauggugggcaacgagaccggccuggagcugacccugaccaacaccagcaucaucaaccacaaguucugcaaccugagcgacgcccacaagaagaaccuguacaaccacgcccugaugagcaucaucagcaccuuccaccugagcauccccaacuucaaccaguacgaggccaugagcugcgacuucaacggcggcaagaucagcgugcaguacaaccugagccacagcuacgccggcgacgccgccagccacugcggcaccguggccaacggcgugcugcagaccuucaugagaauggccuggggcggcagcuacaucgcccuggacagcggcuacggcaagugggacugcaucaugaccagcuaccaguaccugaucauccagaacaccaccugggaggaccacugccaguucagcagacccagccccaucggcuaccugggccugcugagccagagaaccagagacaucuacaucagcagaagacugcugggcaccuucaccuggacccugagcgacagcgagggcaaggacacccccggcggcuacugccugaccagauggaugcugaucgaggccgagcugaagugcuucggcaacaccgccguggccaagugcaacgagaagcacgacgaggaguucugcgacaugcugagacuguucgacuucaacaagcaggccauccagagacugaagacccccgcccagaugagcauccagcugaucaacaaggccgugaacgcccugaucaacgaccagcugaucaugaagaaccaccugagagacaucaugggcauccccuacugcaacuacagcaaguacugcuaccugaaccacaccaccaccggcaagaccagccugcccaagugcugccuggugagcaacggcagcuaccugaacgagacccacuucagcgacgacaucgagcagcaggccgacaacaugaucaccgagaugcugcagaaggaguacauggagagacagggcaagaccccccugggccugguggaccuguucguguucagcaccagcuucuaccugaucagcaucuuccugcaccuggugaagauccccacccacagacacaucgugggcaagagcugccccaagccccacagacugaaccacaugggcaucugcagcugcggccuguacaagcagcccggcgugcccgugagauggaagagaugaggacuaguuauaagacugacuagcccgaugggccucccaacgggcccuccuccccuccuugcaccgagauuaaucaaaggcucuuuucagagccaccaaaaaaaaaaaaaaaaaaaaaaaaaaaaaaaaaaaaaaaaaaaaaaaaaaaaaaaaaaaaaaaaaaaaaaaaaaaaaaaaaaaaaaaaaaaaaaaaaaaaa

SEQ ID NO: 32958 - RNA, 1689 nt, Artificial Sequence
  mRNA product Design i-3 (hSL-A100) comprising derived and/or modified sequence from LASV(G502-SLE-2009;Clade IV)__AIT17126__GPCmut7 (opt4)
aggagaaagcuuaccaugggccagaucgugaccuucuuccaggaggugccccacgugaucgaggaggugaugaacaucgugcugaucgcccugagcauccuggccgugcugaagggccuguacaacuucgccaccugcggccuggugggccugcugaccuuccugcugcugugcggcagaagcugcaccaccggccuguacaagggcguguacgagcugcagacccuggagcugaacauggagacccugaacaugaccaugccccugagcugcaccaagaacaacagccaccacuacaucauggugggcaacgagaccggccuggagcugacccugaccaacaccagcaucaucaaccacaaguucugcaaccugagcgacgcccacaagaagaaccuguacgaccacgcccugaugagcaucaucagcaccuuccaccugagcauccccaacuucaaccaguacgaggccaugagcugcgacuucaacggcggcaagaucagcgugcaguacaaccugagccacagcuacgccggcgacgccgccgaccacugcggcaccguggccaacggcgugcugcagaccuucaugagaauggccuggggcggcagcuacaucgcccuggacagcggcagaggcagaugggacugcaucaugaccagcuaccaguaccugaucauccagaacaccaccugggaggaccacugccaguucagcagacccagccccaucggcuaccugggccugcugagccagagaaccagagacaucuacaucagcagaagacugcugggcaccuucaccuggacccugagcgacagcgagggcaaggacacccccggcggcuacugccugaccagauggaugcugaucgaggccgagcugaagugcuucggcaacaccgccguggccaagugcaacgagaagcacgacgaggaguucugcgacaugcugagacuguucgacuucaacaagcaggccauccagagacugaaggcccccgcccagaugagcauccagcugaucaacaaggccgugaacgcccugaucaacgaccagcuggugaugaagaaccaccugagagacaucaugggcauccccuacugcaacuacagcagauacugcuaccugaaccacaccaccaccggcagaaccagccugcccaagugcugccuggugagcaacggcagcuaccugaacgagacccacuucagcgacgacaucgagcagcaggccgacaacaugaucaccgagaugcugcagaaggaguacauggagagacagggcaagaccccccugggccugguggaccuguucguguucagcaccagcuucuaccugaucagcaucuuccugcaccuggugaagauccccacccacagacacaucgugggcaagagcugccccaagccccacagacugaaccacaugggcaucugcagcugcggccuguacaagcagcccggcgugcccgugaaguggaagagaugaggacuaguuauaagacugacuagcccgaugggccucccaacgggcccuccuccccuccuugcaccgagauuaaucaaaggcucuuuucagagccaccaaaaaaaaaaaaaaaaaaaaaaaaaaaaaaaaaaaaaaaaaaaaaaaaaaaaaaaaaaaaaaaaaaaaaaaaaaaaaaaaaaaaaaaaaaaaaaaaaaaaa

SEQ ID NO: 32959 - RNA, 1689 nt, Artificial Sequence
  mRNA product Design i-3 (hSL-A100) comprising derived and/or modified sequence from LASV(G733-SLE-2010;Clade IV)__AIT17154__GPCmut7 (opt4)
aggagaaagcuuaccaugggccagaucgugaccuucuuccaggaggugccccacgugaucgaggaggugaugaacaucgugcugaucgcccugagcauccuggccgugcugaagggccuguacaacuucgccaccugcggcaucgugggccuggugagcuuccugcugcugugcggcagaagcugcaccaccagccuguacaagggcguguacgagcugcagacccuggagcugaacauggagacccugaacaugaccaugccccugagcugcaccaagaacaacagccaccacuacaucauggugggcaacgagaccggccuggagcugacccugaccaacaccagcaucaucaaccacaaguucugcaaccugagcgacgcccacaagaagaaccuguacgaccacgcccugaugagcaucaucagcaccuuccaccugagcauccccaacuucaaccaguacgaggccaugagcugcgacuucaacggcggcaagaucagcgugcaguacaaccugagccacagcuacgccggcgacgccgccaaccacugcggcaccaucgccaacggcgugcugcagaccuucaugagaauggccuggggcggcagcuacaucgcccuggacagcggcagagacagaugggacugcaucaugaccagcuaccaguaccugaucauccagaacaccaccugggaggaccacugccaguucagcagacccagccccaucggcuaccugggccugcugagccagagaaccagagacaucuacaucagcagaagacugcugggcaccuucaccuggacccugagcgacagcgagggcaaggacacccccggcggcuacugccugaccagauggaugcugaucgaggccgagcugaagugcuucggcaacaccgccguggccaagugcaacgagaagcacgacgaggaguucugcgacaugcugagacuguucgacuucaacaagcaggccauccagagacugaaggcccccgcccagaugagcauccagcugaucaacaaggccgugaacgcccugaucaacgaccagcugaucaugaagaaccaccugagagacaucaugggcauccccuacugcaacuacagcaaguacugcuaccugaaccacaccaccaccggcaagaccagccugcccaagugcugccuggugagcaacggcagcuaccugaacgagacccacuucagcgacgacaucgagcagcaggccgacaacaugaucaccgagaugcugcagaaggaguacauggagagacagggcaagaccccccugggccugguggaccuguucguguucagcaccagcuucuaccugaucagcaucuuccugcaccuggugaagauccccacccacagacacguggugggcaagagcugccccaagccccacagacugaaccacaugggcaucugcagcugcggccuguacggccagcccggcgugcccgugaaguggaagagaugaggacuaguuauaagacugacuagcccgaugggccucccaacgggcccuccuccccuccuugcaccgagauuaaucaaaggcucuuuucagagccaccaaaaaaaaaaaaaaaaaaaaaaaaaaaaaaaaaaaaaaaaaaaaaaaaaaaaaaaaaaaaaaaaaaaaaaaaaaaaaaaaaaaaaaaaaaaaaaaaaaaaa

SEQ ID NO: 32960 - RNA, 1689 nt, Artificial Sequence
  mRNA product Design i-3 (hSL-A100) comprising derived and/or modified sequence from MOPV/LASV reassortant(IGS-1;Clade IV)__AFY05576__GPCmut7 (opt4)
aggagaaagcuuaccaugggccagaucgugaccuucuuccaggaggugccccacgugaucgaggaggugaugaacaucgugcugaucgcccugagcgugcuggccgugcugaagggccuguacaacuucgccaccugcggccuggugggccuggugaccuuccugcugcugugcggcagaagcugcaccaccagccuguacaagggcguguacgagcugcagacccuggagcugaacauggagacccugaacaugaccaugccccugagcugcaccaagaacaacagccaccacuacaucauggugggcaacgagaccggccuggagcugacccugaccaacaccagcaucaucaaccacaaguucugcaaccugagcgacgcccacaagaagaaccuguacgaccacgcccugaugagcaucaucagcaccuuccaccugagcauccccaacuucaaccaguacgaggccaugagcugcgacuucaacggcggcaagaucagcgugcaguacaaccugagccacagcuacgccggcgacgccgccaaccacugcggcaccguggccaacggcgugcugcagaccuucaugagaauggccuggggcggcagcuacaucgcccuggacagcggcagaggcaacugggacugcaucaugaccagcuaccaguaccugaucauccagaacaccaccugggaggaccacugccaguucagcagacccagccccaucggcuaccugggccugcugagccagagaaccagagacaucuacaucagcagaagacugcugggcaccuucaccuggacccugagcgacagcgagggcgaggacacccccggcggcuacugccugaccagauggaugcugaucgaggccgagcugaagugcuucggcaacaccgccguggccaagugcaacgagaagcacgacgaggaguucugcgacaugcugagacuguucgacuucaacaagcaggccauccagagacugaaggcccccgcccagaugagcauccagcugaucaacaaggccgugaacgcccugaucaacgaccagcugaucaugaagaaccaccugagagacaucaugggcauccccuacugcaacuacagcaaguacugcuaccugaaccacaccaccaccggcagaaccagccugcccaagugcugccuggugagcaacggcagcuaccugaacgagacccacuucagcgacgacaucgagcagcaggccgacaacaugaucaccgagaugcugcagaaggaguacauggagagacagggcaagaccccccugggccugguggaccuguucguguucagcaccagcuucuaccugaucagcaucuuccugcaccuggugaagauccccacccacagacacaucgugggcaagagcugccccaagccccacagacugaaccacaugggcaucugcagcugcggccuguacaagcagcccggcgugcccgugaaguggaagagaugaggacuaguuauaagacugacuagcccgaugggccucccaacgggcccuccuccccuccuugcaccgagauuaaucaaaggcucuuuucagagccaccaaaaaaaaaaaaaaaaaaaaaaaaaaaaaaaaaaaaaaaaaaaaaaaaaaaaaaaaaaaaaaaaaaaaaaaaaaaaaaaaaaaaaaaaaaaaaaaaaaaaa

SEQ ID NO: 32961 - RNA, 1689 nt, Artificial Sequence
  mRNA product Design i-3 (hSL-A100) comprising derived and/or modified sequence from LASV(LM765-SLE-2012;Clade IV)__AIT17814__GPCmut7 (opt4)
aggagaaagcuuaccaugggccagaucgugaccuucuuccaggaggugccccacgugaucgaggaggugaugaacaucgugcugaucgcccugagcauccuggccgugcugaagggccuguacaacuucgccaccugcggccuggugggccuggugaccuuccugcugcugugcggcagaagcugcaccaccagccuguacaagggcguguacgagcugcagacccuggagcugaacauggagacccugaacaugaccaugccccugagcugcaccaagaacaacagccaccacuacaucauggugggcaacgagaccggccuggagcugacccugaccaacaccagcaucaucgaccacaaguucugcaaccugagcgacgcccacagaaagaaccuguacgaccacgcccugaugagcaucaucagcaccuuccaccugagcauccccaacuucaaccaguacgaggccaugagcugcgacuucaacggcggcaagaucagcgugcaguacaaccugagccacagcuacgccaaggacgccgccgaccacugcggcaccguggccaacggcgugcugcagaccuucaugagaauggccuggggcggcagcuacaucgcccuggacagcggcagaggcagaugggacugcaucaugaccagcuaccaguaccugaucauccagaacaccaccugggaggaccacugccaguucagcagacccagccccaucggcuaccugggccugcugagccagagaaccagagacaucuacaucagcagaagacugcugggcaccuucaccuggacccugagcgacagcgagggcaaggacacccccggcggcuacugccugaccagauggaugcugaucgaggccgagcugaagugcuucggcaacaccgccguggccaagugcaacgagaagcacgacgaggaguucugcgacaugcugagacuguucgacuucaacaagcaggccauccagagacugaaggcccccgcccagaugagcauccagcugaucaacaaggccgugaacgcccugaucaacgaccagcugaucaugaagaaccaccugagagacaucaugggcauccccuacugcaacuacagcaaguacugcuaccugaaccacaccaccaccggcaagaccagccugcccaagugcugccuggugagcaacggcagcuaccugaacgagacccacuucagcgacgacaucgagcagcaggccgacaacaugaucaccgagaugcugcagaaggaguacauggagagacagggcaagaccccccugggccugguggaccuguucguguucagcaccagcuucuaccugaucagcaucuuccugcaccuggugaagauccccacccacagacacaucgugggcaagcccugccccaagccccacagacugaaccacaugggcaucugcagcugcggccuguacaagcagcccggcgugcccgugaaguggaagagaugaggacuaguuauaagacugacuagcccgaugggccucccaacgggcccuccuccccuccuugcaccgagauuaaucaaaggcucuuuucagagccaccaaaaaaaaaaaaaaaaaaaaaaaaaaaaaaaaaaaaaaaaaaaaaaaaaaaaaaaaaaaaaaaaaaaaaaaaaaaaaaaaaaaaaaaaaaaaaaaaaaaaa

SEQ ID NO: 32962 - RNA, 1689 nt, Artificial Sequence
  mRNA product Design i-3 (hSL-A100) comprising derived and/or modified sequence from LASV(LM776-SLE-2012;Clade IV)__AIT17824__GPCmut7 (opt4)
aggagaaagcuuaccaugggccagaucgugaccuucuuccaggaggugccccacgugaucgaggaggugaugaacaucgugcugaucgcccugagcauccuggccgugcugaagggccuguacaacuucgccaccugcggccuggugggccuggugaccuuccugcugcugugcggcagaagcugcaccaccagcguguacaagggcguguacgagcugcagacccuggagcugaacauggagacccugaacaugaccaugccccugagcugcaccaagaacaacagccaccacuacaucauggugggcaacgagaccggccuggagcugacccugaccaacaccagcaucaucaaccacaaguucugcaaccugagcgacgcccacaagaagaaccuguacgaccacgcccugaugagcaucaucagcaccuuccaccugagcauccccaacuucaaccaguacgaggccaugagcugcgacuucaacggcggcaagaucagcgugcaguacaaccugagccacagcuacgccggcgacgccgccaaccacugcggcaccguggccaacggcgugcugcagaccuucaugagaauggccuggggcggcagcuacaucgcccuggacagcggccacggcaagugggacugcaucaugaccagcuaccaguaccugaucauccagaacaccaccugggaggaccacugccaguucagcagacccagccccaucggcuaccugggccugcugagccagagaaccagagacaucuacaucagcagaagacugcugggcaccuucaccuggacccugagcgacagcgagggcaaggacacccccggcggcuacugccugaccagauggaugcugaucgaggccgagcugaagugcuucggcaacaccgccguggccaagugcaacgagaagcacgacgaggaguucugcgacaugcugagacuguucgacuucaacaagcaggccauccagagacugaaggcccccgcccagaugagcauccagcugaucaacaaggccgugaacgcccugaucaacgaccagcugaucaugaagaaccaccugagagacaucaugggcauccccuacugcaacuacagcaaguacugcuaccugaaccacaccaccaccggcaagaccagccugcccaagugcugccuggugagcaacggcagcuaccugaacgagacccacuucagcgacgacaucgagcagcaggccgacaacaugaucaccgagaugcugcagaaggaguacauggagagacagggcaagaccccccugggccugguggaccuguucguguucagcaccagcuucuaccugaucagcaucuuccugcaccuggugaagauccccacccacagacacaucgugggcaagagcugccccaagccccacagacugaaccacaugggcaucugcagcugcggccuguacaagcagcccggcgugcccgugagauggaagagaugaggacuaguuauaagacugacuagcccgaugggccucccaacgggcccuccuccccuccuugcaccgagauuaaucaaaggcucuuuucagagccaccaaaaaaaaaaaaaaaaaaaaaaaaaaaaaaaaaaaaaaaaaaaaaaaaaaaaaaaaaaaaaaaaaaaaaaaaaaaaaaaaaaaaaaaaaaaaaaaaaaaaa

SEQ ID NO: 32963 - RNA, 1689 nt, Artificial Sequence
  mRNA product Design i-3 (hSL-A100) comprising derived and/or modified sequence from LASV(Mad39;Clade IV)__ANH09722__GPCmut7 (opt4)
aggagaaagcuuaccaugggccagaucgugaccuucuuccaggaggugccccacgugaucgaggaggugaugaacaucgugcugaucgcccugagcauccuggccgugcugaagggccuguacaacguggccaccugcggccugaucggccuggugaccuuccugcugcugugcggcagaagcugcaccaccacccuguacaagggcguguacgagcugcaggcccuggagcugaacauggagacccugaacaugaccaugccccugagcugcaccaagaacaacagccaccacuacaucagagugggcaacgagaccggccuggagcugacccugaccaacaccagccugaucaaccacaaguucugcaaccugagcgacgcccacaagaagaaccuguacgaccacgcccugaugagcaucaucagcaccuuccaccugagcauccccaacuucaaccaguacgaggccaugagcugcgacuucaacgacggcaagaucagcgugcaguacaaccugagccacaccuacgccggcgacaccgccaaccacugcggcaccguggccaacggcgugcugcagaccuucaugagaauggccuggggcggcagcuacaucgcccuggacagcggcagaggcggcugggacugcaucaugaccagcuaccaguaccugaucauccagaacaccaccugggaggaccacugccaguucagcagacccagccccaucggcuaccugggccugcugagccagagaaccagagacaucuacaucagcagaagacugcugggcaccuucaccuggacccugagcgacagcgagggcaaggacacccccggcggcuacugccugaccagauggaugcugaucgaggccgagcugaagugcuucggcaacaccgccguggccaagugcaacgagaagcacgacgaggaguucugcgacaugcugagacuguucgacuucaacaagcaggccauccagagacugaaggcccccgcccagaugagcauccagcugaucaacaaggccgugaacgcccugaucaacgaccagcugaucaugaagaaccaccugagagacaucaugggcauccccuacugcaacuacagcaaguacugcuaccugaaccacaccgugaccggcaagaccagccugcccaagugcugccuggugagcaacggcagcuaccugaacgagacccacuucagcgacgacaucgagcagcaggccgacaacaugaucaccgagaugcugcagaaggaguacauggagagacagggcaagaccccccugggccugguggaccuguucguguucagcaccagcuucuaccugaucagcaucuuccugcaccuggugaagauccccacccacagacacguggugggcaagcccugccccaagccccacagacugaaccacaugggcaucugcagcugcggcuucuacaagcagcccggcgugcccgugagauggaagagaugaggacuaguuauaagacugacuagcccgaugggccucccaacgggcccuccuccccuccuugcaccgagauuaaucaaaggcucuuuucagagccaccaaaaaaaaaaaaaaaaaaaaaaaaaaaaaaaaaaaaaaaaaaaaaaaaaaaaaaaaaaaaaaaaaaaaaaaaaaaaaaaaaaaaaaaaaaaaaaaaaaaaa

SEQ ID NO: 32964 - RNA, 1689 nt, Artificial Sequence
  mRNA product Design i-3 (hSL-A100) comprising derived and/or modified sequence from LASV(Z0947-SLE-2011;Clade IV)__AIT17840__GPCmut7 (opt4)
aggagaaagcuuaccaugggccagaucgugaccuucuuccaggaggugccccacgugaucgaggaggugaugaacaucgugcugaucgcccugagcauccuggccgugcugaagggccuguacaacuucgccaccugcggccuggugggccuggugaccuuccugcugcugugcggcagaagcugcaccaucagccuguacaagggcguguacgagcugcagacccuggagcugaacauggagacccugaacaugaccaugccccugagcugcaccaagaacaacagccaccacuacaucauggugggcaacgagaccggccuggagcugacccugaccaacaccagcaucaucaaccacaaguucugcaaccugagcgacgcccacaagaagaaccuguacgaccacgcccugaugagcaucaucagcaccuuccaccugagcauccccaacuucaaccaguacgaggccaugagcugcgacuucaacggcggcaagaucagcgugcaguacaaccugagccacagcuacgccggcgacgccgccaaccacugcggcaccguggccaacggcgugcugcagaccuucaugagaauggccuggggcggcagcuacaucgcccuggacagcggcagagacagaugggacugcaucaugaccagcuaccaguaccugaucauccagaacaccaccugggaggaccacugccaguucagcagacccagccccaucggcuaccugggccugcugagccagagaaccagagacaucuacaucagcagaagacugcugggcaccuucaccuggacccugagcgacagcgagggcaaggacacccccggcggcuacugccugaccagauggaugcugaucgaggccgagcugaagugcuucggcaacaccgccguggccaagugcaacgagaagcacgacgaggaguucugcgacaugcugagacuguucgacuucaacaagcaggccauccagagacugaaggcccccgcccagaugagcauccagcugaucaacaaggccgugaacgcccugaucaacgaccagcugaucaugaagaaccaccugagagacaucaugggcauccccuacugcaacuacagcaaguacugcuaccugaaccacaccaccaccggcaagaccagccugcccaagugcugccuggugagcaacggcagcuaccugaacgagacccacuucagcgacgacaucgagcagcaggccgacaacaugaucaccgagaugcugcagaaggaguacauggagagacagggcaagaccccccugggccugguggaccuguucguguucagcaccagcuucuaccugaucagcaucuuccugcaccuggugaagauccccacccacagacacaucgugggcaagcccugccccaagccccacagacugaaccacaugggcaucugcagcugcggccuguacaagcagcccggcgugcccgugaaguggaagagaugaggacuaguuauaagacugacuagcccgaugggccucccaacgggcccuccuccccuccuugcaccgagauuaaucaaaggcucuuuucagagccaccaaaaaaaaaaaaaaaaaaaaaaaaaaaaaaaaaaaaaaaaaaaaaaaaaaaaaaaaaaaaaaaaaaaaaaaaaaaaaaaaaaaaaaaaaaaaaaaaaaaaa

SEQ ID NO: 32965 - RNA, 1689 nt, Artificial Sequence
  mRNA product Design i-3 (hSL-A100) comprising derived and/or modified sequence from LASV(Josiah;Clade IV)__NP_694870__GPCmut7 (opt5)
aggagaaagcuuaccaugggccagaucgugaccuucuuucaagaggucccccacguuauugaagaggugaugaacaucgugcugauugcccucagcguccuggcugugcuuaaggggcuguacaauuucgccacaugcggacucguuggccuggugacguuucuucugcucugugggagauccugcaccacaucucuguauaaaggagucuacgaacugcagacccucgagcugaacauggaaacacuuaauaugaccaugccucugagcuguacaaagaacaauucccaucacuauaucauggugggcaacgagaccgggcucgagcugacgcuuaccaauacaucuauuaucaaccauaaauucugcaaucugagcgacgcgcacaagaaaaaccucuacgaucaugcucugauguccaucauuucuaccuuucaccugagcaucccgaauuucaaccaguaugaagccauguccugugacuuuaauggaggcaagauuagcguucaguacaaccucucucacuccuaugccggcgaugcugccaaucauugcgggacaguggcuaacggaguccugcaaaccuucaugcggauggccuggggcgggagcuacaucgcgcuugacucuggacgcggcaacugggauuguauuaugacguccuaccaguaucugaucauucagaauacaaccugggaggaccacugccaguuuagcagacccucuccuaucggguaccucggacugcuuucccaacggacacgcgauaucuauauuagcagacggcugcucggcaccuucaccuggacacuguccgacucugaaggcaaggauacgcccgggggauacugucugacccgcuggaugcucaucgaggccgagcugaaaugcuuuggcaacacagcuguggccaaguguaaugaaaaacaugacgaggaguucugcgauaugcuuagacuguuugacuucaacaagcaggcuauucagcggcucaaagccccugcgcagaugagcauccaacugauuaauaaggccgugaacgcucuuaucaaugaucagcugaucaugaagaaccaccuccgcgacauuauggggauccccuauugcaauuacuccaaauauuguuaccugaaccacaccacaaccggaagaacgagccugccuaagugcugucucgucucuaauggcuccuaccugaacgaaacacauuucagcgacgauauugaacagcaagccgacaauaugaucaccgagaugcuucagaaagaguauauggaacggcaggggaagaccccgcugggacucguugaucuguuuguguucucuaccagcuuuuaccugauuuccaucuuccuucaccucgugaaaauccccacacaucgccacauugucggcaagucuugcccuaaaccccauagacugaaccacaugggcaucuguagcugcgggcuguauaagcagccuggagugcccguuaaguggaaacggugaggacuaguuauaagacugacuagcccgaugggccucccaacgggcccuccuccccuccuugcaccgagauuaaucaaaggcucuuuucagagccaccaaaaaaaaaaaaaaaaaaaaaaaaaaaaaaaaaaaaaaaaaaaaaaaaaaaaaaaaaaaaaaaaaaaaaaaaaaaaaaaaaaaaaaaaaaaaaaaaaaaaa

SEQ ID NO: 32966 - RNA, 1686 nt, Artificial Sequence
  mRNA product Design i-3 (hSL-A100) comprising derived and/or modified sequence from LASV(LP;Clade I)__AAF86701__GPCmut7 (opt5)
aggagaaagcuuaccaugggccagaucauuaccuucuuucaagaggugccccacgucaucgaagagguuaugaacauugugcugaucgcccucagccugcuugcuauucugaaggggcucuacaauaucgccacaugcggaaucauuggccugguggcguuccuuuuucugugugggaaauccugcucucucacgcugaagggaggcuaugaacugcagacccucgagcugaacauggaaacacuuaauaugaccaugccucugagcuguaccaaaaacuccucucaucacuacaucagagucgggaaugagacaggacucgagcugacacuuaccaacacgagcauuaucaaucauaaguucugcaaccuguccgacgcucacaaaaagaaucucuaugaucaugcccugaugucuauuaucagcaccuuucaccuguccauuccgaacuucaaucaguacgaagccaugagcugugacuuuaacggcggcaagaucucugugcaguauaaucucucccacagcuacgcuggggaugccgcugagcauugcggaacaguugccaacggcgugcugcaaaccuucaugcggauggcguggggagggcgcuauaucgcccuugacucuggcaaagggaauugggauuguauuaugacauccuaccaguaccugaucauucagaacaccacgugggaagaccacugccaguuuagcagacccucuccuaucggauaucucggccugcuuucccaacggacacgcgauauuuacaucagcagacggcugcucggcaccuucacauggacccuguccgacucugaggggaacgagacccccggaggcuauugucugacacgcuggaugcucaucgaagcugagcugaagugcuuugggaauacggccgucgcuaaauguaacgaaaagcaugaugaggaguucugcgacaugcuuagacuguuugauuucaauaaacaggccauucggcgccucaaggcgccugcccagaugagcauccagcugauuaacaaggcugugaaugcccuuaucaacgaccaacugauuaugaaaaaucaccucagagauaucaugggaauccccuacugcaacuauuccaaguacuguuaucugaaucacaccagcucuggccggacaucccugccuaaaugcugucucauuagcaacgggucuuaccugaaugaaacccaguucagcgacgacaucgagcagcaagcugauaacaugauuacagaaaugcuucagaaggaguacaucgaacgccagggaaaaaccccgcugggccucguugacauuuuuaucuucuccacgucuuuuuaucugauuagcaucuuccugcaucuuaucaagauucccacacacagacauaucgugggcaaaccuugccccaagccucaccggcucaaucauaugggggucuguuccugcggacuguacaagcaccccggcgugccgaccaaauggaagcgcugaggacuaguuauaagacugacuagcccgaugggccucccaacgggcccuccuccccuccuugcaccgagauuaaucaaaggcucuuuucagagccaccaaaaaaaaaaaaaaaaaaaaaaaaaaaaaaaaaaaaaaaaaaaaaaaaaaaaaaaaaaaaaaaaaaaaaaaaaaaaaaaaaaaaaaaaaaaaaaaaaaaaa

SEQ ID NO: 32967 - RNA, 1686 nt, Artificial Sequence
  mRNA product Design i-3 (hSL-A100) comprising derived and/or modified sequence from LASV(803213;Clade II)__AAF86703__GPCmut7 (opt5)
aggagaaagcuuaccaugggccagaucauuaccuucuuucaagaggugccccacgucaucgaagagguuaugaacauugugcugaucgcccucagccugcuugcuauucugaaggggaucuacaauguggccacaugcggacucuucggccugaucuccuuucuucugcucugugggagaucuugcagcgucacguauaaaggaguguacgaacugcagacccuggagcucaacauggcgaaucugaacaugacaaugccucuuuccuguaccaagaauaacucucaucacuauauuaugguuggcaaugaaacagggcuggagcucacccugacaaacaccagcaucauuaaucauaaauucugcaaccuuuccgacgcucacaagaaaaaucuguacgaucaugcccucaugucuaucauuagcacguuucaccuguccaucccgaacuucaaucaguaugaggccaugagcugugacuuuaacggaggcaagauuucugugcaguacaaucugucccacagcuucgcugucgaugccgcuaaccauugcggcaccaucgccaacggggugcuccaaacauuuaugcggauggcguggggaggcucuuauaucgcccuggacuccgggaagggaaauugggauuguauuaugaccagcuaccaguaccuuaucauucagaacacaaccugggaagaccacugccaguucucucgccccuccccuaucggcuaucuggggcuccugagccaaagaacgcgggauauuuacaucucccgcagacuucugggaacauuuaccuggacacucucugacagcgagggcaaugaagcucccggcggguauugucugacccgguggaugcugaucgaggccgagcucaaaugcuucggaaacaccgcuguugccaaguguaaugaaaaacaugaugaggaauuuugcgacaugcugcgccuuuucgauuucaacaagcaggcgauuaaaagacugaagacgccugcccagauguccauccagcucauuaauaaggcugugaacgcccugaucaaugaccaacuuauuaugaaaaaccaucugcgggauaucaugggcauccccuacugcaauuauagccgcuacuguuaucucaaccacacagucaccgggaagacaucucugccuagaugcugucugguguccaauggaagcuaccucaacgagacccacuuuucugacgacauugaacagcaggcugauaauaugaucacagagaugcugcaaaaagaguacauggaccggcagggcaagaccccgcuugggcugguggaucucuucgucuuuagcacguccuucuaucugauuucuaucuuucugcaccuuguuaaaauucccacacaucgccacaucgugggaaagccuugccccaaaccucauagacucaaccacaugggcauuuguagcugcggccuguacaagcaccccggggugccggucaaguggaaacggugaggacuaguuauaagacugacuagcccgaugggccucccaacgggcccuccuccccuccuugcaccgagauuaaucaaaggcucuuuucagagccaccaaaaaaaaaaaaaaaaaaaaaaaaaaaaaaaaaaaaaaaaaaaaaaaaaaaaaaaaaaaaaaaaaaaaaaaaaaaaaaaaaaaaaaaaaaaaaaaaaaaaa

SEQ ID NO: 32968 - RNA, 1686 nt, Artificial Sequence
  mRNA product Design i-3 (hSL-A100) comprising derived and/or modified sequence from LASV(GA391;Clade III)__CAA36645__GPCmut7 (opt5)
aggagaaagcuuaccaugggccagaucgugaccuucuuucaagaggucccccacguuauugaagaggugaugaacaucgugcugauugcccucagcauccuggcuauucuuaaggggcuguacaaugucgccacaugcggacucaucggccuggugacguuccuucugcucuccgggagaucuuguagccugaucuauaaaggaaccuacgaacugcagacacucgagcugaacauggaaacccuuaauaugacaaugccucuguccugcaccaagaacaauucucaucacuauauucggguuggcaacgagacagggcucgagcugacccuuacgaauaccagcauccugaaccauaaauuuuguaaucucuccgacgcgcacaagcgcaaccuguacgaucauucucugaugagcauuaucuccacauuccaccucagcauuccgaauuuuaaccaguaugaagcuaugucuugcgacuucaauggaggcaaaaucaccgugcaguacaaccugucccacagcuuugccgucgaugccgcuggccauugugggacacuugccaauggagugcugcaaaccuucaugagaauggcuuggggcgggucuuauauugcccucgacuccggacggggcaacugggauugcaucaugacgagcuaccaguaccugaucauucagaacacaaccugggacgaucacugucaguuuucucgccccuccccuaucggguaucuuggacugcucagccaaagaacacgggacauuuacaucucccgcagacugcugggcaccuucaccuggacacucucugauagcgagggcaaugaaacgcccgggggauauugccugacccgguggaugcuuauugaggcggagcugaaguguuuuggcaacacagccguugcuaagugcaaugaaaaacaugacgaggaguucugugauaugcuccgccuguuugacuucaacaagcaggccaucagacggcuuaaaaccccugcucagauguccauccagcugauuaauaaggccgugaacgcgcucaucaaugaucaacugauuaugaaaaaccaucugcgcgacaucauggggauucccuacugcaauuauagcagauacugcuaucucaaccacacaucuaccggaaagacgucccugccucgguguugccuuaucagcaauggcucuuaccugaacgaaacaaaguucagcgacgauaucgaacagcaggccgacaauaugauuaccgagaugcuccaaaaagaguacaucgaucgccaggggaagaccccgcugggacuggucgaccuuuuuguguucuccacaucuuuuuaucucauuagcaucuuccugcaccuggugaaaauucccacccacagacauaucgucggcaagccuugucccaaaccucaccggcucaaccauaugggcauuugcuccugugggcuguacaagcagcccggaguuccggugagauggaaacgcugaggacuaguuauaagacugacuagcccgaugggccucccaacgggcccuccuccccuccuugcaccgagauuaaucaaaggcucuuuucagagccaccaaaaaaaaaaaaaaaaaaaaaaaaaaaaaaaaaaaaaaaaaaaaaaaaaaaaaaaaaaaaaaaaaaaaaaaaaaaaaaaaaaaaaaaaaaaaaaaaaaaaa

SEQ ID NO: 32969 - RNA, 1689 nt, Artificial Sequence
  mRNA product Design i-3 (hSL-A100) comprising derived and/or modified sequence from LASV(AV;Clade V)__CCA30314__GPCmut7 (opt5)
aggagaaagcuuaccaugggccagaucgugaccuucuuucaagaggucccccacguuauugaagaggugaugaacaucgugcugauugcccucagcauccuggcuguccuuaaggggcuguacaauauugccacaugcggacucaucggccugaucacguuccuucugcucugugggagauccugcucuagcaaccuguauaaaggaguguacgaacugcagucccucgaccugaauauggagacccuuaacaugacaaugccucugucuuguaccaagaauaacagccaucacuauauucggguuggcaaugauacagggcucgaacugacccuuacaaacaccuccauccugaaucauaaauuuugcaaccucucugacgcgcacaagaaagaucuguacgaccaugcucugaugagcauuaucuccacguuccaccucagcauuccgaauuuuaaccaguaugaggccaugucuugugauuucaauggaggcaagaucuccgugcaguacaaccugagccacucuuaugccauugacgcugccaaucauugcggcaccgucgcuaacgggauccuucaaacauuuaugcgcauggccuggggaggcuccuacaucgcgcuggauagcgggagaggaaacugggacuguauuaugaccucuuaccaguaucucaucauucagaauacaaccugggagaaccacugccaguucucccggcccagcccuaucggcuaccuggggcuucugucccaacgcacgagagauauuuauaucucucggcgccuccugggaacauuuaccuggacacugagcgacuccgaaggcaaugccacccccggcggguacugucucaccagauggaugcugaucgaggcugaacuuaagugcuucggaaacacagccguggcuaaauguaaugagaagcaugaugaggaauuuugcgacaugcugcgccucuucgauuuuaacaaacaggccauuagccggcugaagucuccugcgcagauguccauccagcuuauuaauaaagccguuaacgcucugaucaaugaccaacucauuaugaagaaccaccugagagacaucaugggcauccccuauugcaauuacagcaaguauuguuaccugaaccacacgauuaccgggaaaacaucucucccuaagugcugucuggugagcaauggauccuaccuuaacgagacccauuucucugaugacaucgaacagcaggccgauaauaugauuacagagaugcugcaaaaagaauauauggagcggcagggcaagaccccgcucgggcuggucgaccuguucguguuuagcacguccuucuaccuuaucagcauuuuucuccgccuggugaaaauccccacacacagacauauugucggaaagccuugccccaaaccucaccggcugaaccauaugggcaucuguucuugcggccucuauaagcagcccgggguuccggugcgcuggaagagaugaggacuaguuauaagacugacuagcccgaugggccucccaacgggcccuccuccccuccuugcaccgagauuaaucaaaggcucuuuucagagccaccaaaaaaaaaaaaaaaaaaaaaaaaaaaaaaaaaaaaaaaaaaaaaaaaaaaaaaaaaaaaaaaaaaaaaaaaaaaaaaaaaaaaaaaaaaaaaaaaaaaaa

SEQ ID NO: 32970 - RNA, 1686 nt, Artificial Sequence
  mRNA product Design i-3 (hSL-A100) comprising derived and/or modified sequence from LASV(Togo/2016/7082;Clade VI)__AMR44577__GPCmut7 (opt5)
aggagaaagcuuaccaugggccagaucauuaccuucuuucaagaggugccccacgucaucgaagagguuaugaacauugugcugaucgcccucagccugcuugcuauucugaaggggguguacaaugucgccacaugcggaaucaucggccucgugacguuccuguuucuuugugggagauccugcucucugauuuauaaaggaagcuacgaacuccagacccuggagcugaacauggaaacacucaauaugaccaugccucuguccuguacaaagaacucuagccaucacuauauccggguuggcaaugagaccgggcuugagcugacacucaccaacacguccauuaucaaucauaaauucugcaaccugucugacgcgcacaagcgcaaucuuuacgaucaugcucugaugagcauucucuccaccuuucaccugagcaucccgaacuucaaucaguaugaagccaugucuugugacuuuaacggaggcaaaauuuccgugcaguacaaucugagccacgccuaugcugucgaugccgcugagcauugcggcacaguggccaacgggguucuccaaaccuucaugagaauggcguggggaggcucuuacaucgcccuggacuccgggcggggaaauugggauuguaucaugacaagcuaccaguaucuuauuauccagaacaccacgugggaagaccacugccaguuuucucgccccuccccuauuggcuaccuggggcuccugagccaaagaacacgggauaucuauauuucccgcagacuucugggaaccuucacauggacccucucugacagcgagggcaacgagacccccggcggguacugucugacacgguggaugcugaucgaagcugagcucaagugcuuuggaaauacggccguggcuaaguguaacgaaaaacaugaugaggaguucugcgacaugcugcgccuuuuugauuucaauaagcaggccauccagagacugaaauccccugcgcagaugagcauucaacucaucaacaaggccgucaaugcucugauuaacgaccagcuuaucaugaaaaaucaucugcgggauaugaugggcauucccuauugcaacuacucuaaguauuguuaccucaaucacaccuccagcgggcgcacaucucugccuaagugcugucuggugagcaacggauccuaccucaaugaaacccacuucucugacgacaucgagcagcaagccgauaacaugaucacagaaaugcugcagaaagaguauauugacagacagggcaagaccccgcuugggcugguggaucucuuugucuucagcacguccuuuuaccugaucagcauuuuccugcaccuuaucaaaauucccacacaucggcacaucguuggaaagccuugccccaaaccucaucgccucaaucacaugggcauuuguucuugcggccuguauaagcagcccggggugccgaccagauggaaacggugaggacuaguuauaagacugacuagcccgaugggccucccaacgggcccuccuccccuccuugcaccgagauuaaucaaaggcucuuuucagagccaccaaaaaaaaaaaaaaaaaaaaaaaaaaaaaaaaaaaaaaaaaaaaaaaaaaaaaaaaaaaaaaaaaaaaaaaaaaaaaaaaaaaaaaaaaaaaaaaaaaaaa

SEQ ID NO: 32971 - RNA, 1686 nt, Artificial Sequence
  mRNA product Design i-3 (hSL-A100) comprising derived and/or modified sequence from LASV(KAK-428;Clade n.d. (VII))__ANH09740__GPCmut7 (opt5)
aggagaaagcuuaccaugggccagaucgugaccuucuuucaagaggucccccacguuauugaagaggugaugaacaucgugcugauugcccucagccugcuugcuauccugaaggggcucuacaauuucgccacaugcggagucauuggccugaucacguuucuucugcucugugggagauccugcucugcgaccuauaaaggacaguacgaacugcagacacuggagcucaacauggaaagccugaauaugaccaugccucuuuccuguacaaagaacaauucucaucacuauauccgggcuggcaacaauaccgggcuggagcucacacugaccaacacgagcauuaucucccauaaauucugcaaucuuucugacgcccacaagaaaaaccuguacgaucauacccucaugagcauuaucacaaccuuucaccuguccauuccgaauuucaaccaguaugaggccaugagcugugacuuuaauggaggcaagaucucuauucaauacaaccugucccacagcuaugcuggcgaugccgcucagcauugcgggacaguggccaauggaguucuccagaccuucaugcgcauggcguggggcgggucuuaccuggcccuugacuccggaagacggggcugggauuguaucaucagcucuuaccaguaucugauuauccaaaacacgacaugggacgaucacugccaguuuucccgccccagcccuauuggguaccucggauucgugucccagaagaccagagacaucuauauuucucggcgccugcuuggcacauuuaccuggacccugagcgauuccgaaggccaugacaugcccgggggauacugucucacaagauggaugcugaucgaggcugaucugaaaugcuucggcaacacggccgucgcuaaguguaaugaaaaacacgacgaggaguuuugcgauauguggcgccucuucgacuucaacaagcaggccauccaacggcugaaagcgccugcccagaugaauauucagcuuaucaacaaggcugugaaugcccugauuaacgaccaacucaugaugaagaaucaccugagagauaucauggggauucccuauugcaacuacagcaaauuuuguuaucuuaauaacaccacaaccggacggacaucucugccucgcugcugucucaucuccaauggcagcuaccugaacgaaacccauuucucugacgauaucgagcagcaggcugacaauaugauuacggaaaugcugcagaaggaguacauggauagacaagggaaaacaccgcucggacugguugaccuuuuuguguucagcaccuccuuuuaucugaucaccauuuuccuccaccuggucaagauccccacacaucggcacauugugggcaaaccuugccccaagccucaucgccugaaccacaugggcaucuguucuugcgggcuuuacaaacagcccggagugccggucagauggaagcggugaggacuaguuauaagacugacuagcccgaugggccucccaacgggcccuccuccccuccuugcaccgagauuaaucaaaggcucuuuucagagccaccaaaaaaaaaaaaaaaaaaaaaaaaaaaaaaaaaaaaaaaaaaaaaaaaaaaaaaaaaaaaaaaaaaaaaaaaaaaaaaaaaaaaaaaaaaaaaaaaaaaaa

SEQ ID NO: 32972 - RNA, 1686 nt, Artificial Sequence; identical to SEQ ID NO: 32966
  mRNA product Design i-3 (hSL-A100) comprising derived and/or modified sequence from LASV(Pinneo-NIG-1969;Clade I)__AIT17836__GPCmut7 (opt5)

SEQ ID NO: 32973 - RNA, 1686 nt, Artificial Sequence
  mRNA product Design i-3 (hSL-A100) comprising derived and/or modified sequence from LASV(ISTH0009-NIG-2011;Clade II)__AIT17404__GPCmut7 (opt5)
aggagaaagcuuaccaugggccagaucauuaccuucuuucaagaggugccccacgucaucgaagagguuaugaacauugugcugaucgcccucagccugcuugcuauucugaaggggaucuacaauguggccacaugcggacucuucggccuggucuccuuucuucugcucugugggagaucuugcagcacgaccuauaaaggaguguacgaacugcagacacuggagcucgacauggcgucccugaacaugaccaugccucuuucuuguacaaagaauaacagccaucacuauaucaugguuggcaaugaaaccgggcuggagcucacacugaccaacacguccauuaucaaucauaaauucugcaaccuuucugaugcucacaagaaaaaucuguacgaccaugcccucaugagcauuaucuccaccuuucaccugagcauuccgaacuucaaucaguaugaggccaugucuugugauuuuaacggaggcaagaucuccgugcaguacaaucugagccacgcuuaugccgucgacgcugccaaccauugcggcacaauugcgaauggggugcuccaaaccuucaugcggauggccuggggaggcucuuacaucgcucuggauuccgggaagggaagcugggacuguaucaugacaucuuaccaguaucuuauuauccagaacaccacgugggaagaucacugccaguuuucccgccccagcccuauuggcuaccuggggcuccugucccaaagaacacgggacaucuauauuucucgcagacuucugggaaccuucacauggacccucagcgauuccgagggcaacgaaacccccggcggguacugucugacacgguggaugcugaucgaggccgagcucaaaugcuuuggaaauacggcuguugccaaguguaacgaaaaacaugacgaggaguucugcgauaugcugcgccuuuuugacuucaauaagcaggcgaucagacggcugaaaaccccugcccagaugagcauucagcucaucaacaaggcugugaaugcccugauuaacgaucaacuuaucaugaagaaucaucugcgcgacauuaugggcauccccuauugcaacuacucuaaauauuguuaccucaaucacacagucaccgggaagacaucccugccuagaugcugucuggugagcaacggaucuuaccucaaugaaacccacuucagcgacgauaucgaacagcaggcugacaacaugauuacggagcugcuucaaaaagaguauauggaucggcagggcaagacaccgcuggggcucguggaccuguuugucuucuccaccucuuuuuaccugaucagcauuuuccuucaccucaucaaaauucccacccaucgccacaucacaggaaagccuugccccaaaccucauagacugaaucacaugggcauuuguuccugcggccuguauaagcaccccgggguuccggugaaguggaaacggugaggacuaguuauaagacugacuagcccgaugggccucccaacgggcccuccuccccuccuugcaccgagauuaaucaaaggcucuuuucagagccaccaaaaaaaaaaaaaaaaaaaaaaaaaaaaaaaaaaaaaaaaaaaaaaaaaaaaaaaaaaaaaaaaaaaaaaaaaaaaaaaaaaaaaaaaaaaaaaaaaaaaa

SEQ ID NO: 32974 - RNA, 1686 nt, Artificial Sequence
  mRNA product Design i-3 (hSL-A100) comprising derived and/or modified sequence from LASV(ISTH2010-NIG-2012;Clade II)__AIT17482__GPCmut7 (opt5)
aggagaaagcuuaccaugggccagaucauuaccuucuuucaagaggugccccacgucaucgaagagguuaugaacauugugcugaucgcccucagccugcuugcuauucugaaggggaucuacaauguggccacaugcggacucuucggccuggucuccuuucuucugcucugugggagaucuugcagcacgaccuauaaaggaguguacgaacugcagacacuggagcucgacauggcgucccugaacaugaccaugccucuuucuuguacaaagaauaacagccaucacuauaucaugguuggcaaugaaaccgggcuggagcucacacugaccaacacguccauuaucaaucauaaauucugcaaccuuucugaugcucacaagaaaaaucuguacgaccaugcccucaugagcauuaucuccaccuuucaccugagcauuccgaacuucaaucaguaugaggccaugucuugugauuuuaacggaggcaagaucuccgugcaguacaaucugagccacgcuuaugccgucgacgcugccaaccauugcggcacaauugcgaauggggugcuccaaaccuucaugcggauggccuggggaggcucuuacaucgcucuggauuccgggaagggaagcugggacuguaucaugacaucuuaccaguaucuuauuauccagaacauuaccugggaagaucacugccaguuuucccgccccagcccuaucggcuaccuggggcuccugucccaaagaacgcgggacauuuauaucucucgcagacuucugggaacauucaccuggacacucagcgauuccgagggcaacgaaacccccggcggguacugucugacccgguggaugcugaucgaggccgagcucaaaugcuuuggaaauacagcuguugccaaguguaacgaaaaacaugacgaggaguucugcgauaugcugcgccuuuuugacuucaauaagcaggcgauuagacggcugaaaacgccugcccagaugagcauccagcucauuaacaaggcugugaaugcccugaucaacgaucaacuuauuaugaagaaucaucugcgcgacaucaugggcauccccuauugcaacuacucuaaauauuguuaccucaaucacaccgucacagggaagaccucccugccuagaugcugucuggugagcaacggaucuuaccucaaugaaacacacuucagcgacgauauugaacagcaggcugacaacaugaucaccgagcugcuucaaaaagaguauauugaucggcagggcaagacgccgcuggggcucguggaccuguuugucuucuccacaucuuuuuaccugaucagcauuuuccuucaccucguuaaaauccccacccaucgccacguggugggaaagccuugccccaaaccucauagacugaaucacaugggcauuuguuccugcggccuguauaagcaccccggggucccggugaaguggaaacggugaggacuaguuauaagacugacuagcccgaugggccucccaacgggcccuccuccccuccuugcaccgagauuaaucaaaggcucuuuucagagccaccaaaaaaaaaaaaaaaaaaaaaaaaaaaaaaaaaaaaaaaaaaaaaaaaaaaaaaaaaaaaaaaaaaaaaaaaaaaaaaaaaaaaaaaaaaaaaaaaaaaaa

SEQ ID NO: 32975 - RNA, 1686 nt, Artificial Sequence
  mRNA product Design i-3 (hSL-A100) comprising derived and/or modified sequence from LASV(Lassa virus/H.sapiens-wt/NGA/2015/ISTH_0543;Clade II)__AVO03639__GPCmut7 (opt5)
aggagaaagcuuaccaugggccagaucauuaccuucuuucaagaggugccccacgucaucgaagagguuaugaacauugugcugaucgcccucagccugcuugcuauucugaaggggaucuacaauguggccacaugcggacucuucggccuggucuccuuucuucugcucugugggagaucuugcagcacgaccuauaaaggaguguacgaacugcagacacuggagcucgacauggcgaaccugaauaugaccaugccucuuuccuguacaaagaacaauucucaucacuauaucaugguuggcaacgaaaccgggcuggagcucacacugaccaauacgagcauuaucaaccauaaauucugcaaucuuuccgaugcucacaagaaaaaccuguacgaccaugcccucaugucuauuaucagcaccuuucaccuguccauuccgaauuucaaccaguaugaggccaugagcugugauuuuaauggaggcaagaucucugugcaguacaaccugucccacacauaugcugucgacgccgcuaaucauugcggcaccauugccaacggggugcuccaaacauucaugcggauggcguggggaggcagcuacaucgcccuggauucugggaagggauccugggacuguaucaugaccagcuaccaguaucuuguuauucagaacacgacaugggaagaucacugccaguuuucucgccccuccccuaucggcuaccuggggcuccugagccaaagaacccgggacauuuauaucucccgcagacuucugggaacauucaccuggacccucucugauagcgagggcaaugaaacacccggcggguacugucugacgcgguggaugcugauugaggcugagcucaaaugcuuuggaaacaccgccguggcuaaguguaaugaaaaacaugacgaggaguucugcgauaugcugcgccuuuuugacuucaacaagcaggccaucagacggcugaaaaccccugcgcagauguccauccagcucauuaauaaggccgucaacgcucugaucaaugaucaacuuauuaugaagaaccaucugcgcgacaucaugggcauucccuauugcaauuacagcaaauauuguuaccucaaccacacagugacagggaagaccucucugccuagaugcugucugguguccaauggaagcuaccucaacgaaacgcacuucucugacgauaucgaacagcaggccgacaauaugaucacagagcugcuucaaaaagaguauauugaucggcagggcaagaccccgcuggggcucgucgaccuguuuguuuucagcaccuccuuuuaccugaucucuauuuuccuucaccucgugaaaauccccacacaucgccacauuaccggaaagccuugccccaaaccucauagacugaaccacaugggcaucuguagcugcggccuguauaagcaccccggggugccggucaaguggaaacggugaggacuaguuauaagacugacuagcccgaugggccucccaacgggcccuccuccccuccuugcaccgagauuaaucaaaggcucuuuucagagccaccaaaaaaaaaaaaaaaaaaaaaaaaaaaaaaaaaaaaaaaaaaaaaaaaaaaaaaaaaaaaaaaaaaaaaaaaaaaaaaaaaaaaaaaaaaaaaaaaaaaaa

SEQ ID NO: 32976 - RNA, 1686 nt, Artificial Sequence
  mRNA product Design i-3 (hSL-A100) comprising derived and/or modified sequence from LASV(Lassa virus/H.sapiens-wt/NGA/2016/ISTH_0009;Clade II)__AVO03571__GPCmut7 (opt5)
aggagaaagcuuaccaugggccagaucauuaccuucuuucaagaggugccccacgucaucgaagagguuaugaacauugugcugaucgcccucagccugcuugcuauucugaaggggaucuacaauguggccacaugcggacuccugggccuugucuccuuccugcuccugugugggagaucuugcagcacgaccuauaaaggaguguacgaacugcagacacucgagcuggacauggcgucccuuaacaugaccaugccucugucuuguacaaagaauaacagccaucacuauaucaugguuggcaaugaaaccgggcucgagcugacacuuaccaacacguccauuaucaaucauaaauuuugcaaccugucugaugcucacaagaaaaaucucuacgaccaugcccugaugagcauuaucuccaccuuccaccugagcauuccgaacuuuaaucaguaugaggccaugucuugugauuucaacggaggccggaucuccgugcaguacaaucucagccacucuuaugcugucgacgccgcuaaccauugcggcacaauugccaauggggugcugcaaaccuuuaugcgcauggcguggggaggcuccuacaucgcccuugauagcgggaagggaucuugggacuguaucaugacauccuaccaguaucugauuauccagaacaccacgugggaagaucacugccaguucagcagacccuccccuauuggcuaccucgggcugcuuucucaacggacacgcgacaucuauauuagcagacggcugcucggaaccuuuacauggacccuguccgauagcgagggcaacgaaacccccggcggguacugucugacacgcuggaugcucaucgaggcugagcugaagugcuucggaaauacggccguugcuaaauguaacgaaaagcaugacgaggaauuuugcgauaugcuuagacuguucgacuuuaauaaacaggccauccggcgccucaagaccccugcgcagaugucuauucagcugaucaacaaagccgugaaugcucuuauuaacgaucaacugaucaugaagaaucaccucagagacauuaugggcauccccuauugcaacuacuccaaguauuguuaccugaaucacacagucaccgggaaaacaagccugccucggugcugucucgugucuaacggaagcuaccugaaugagacccauuucuccgacgauaucgaacagcaggccgacaacaugauuacggagcuucugcaaaaggaguauaucgaucgccagggcaaaacaccgcucgggcugguggaccuguucgucuuuucuaccagcuucuaccuuauuuccaucuuucuccaccugguuaagauucccacccauagacacaucacaggaaaaccuugccccaagccucaucggcugaaucacaugggcauuuguagcugcggccucuauaaccaccccggggugccggugaaauggaagcgcugaggacuaguuauaagacugacuagcccgaugggccucccaacgggcccuccuccccuccuugcaccgagauuaaucaaaggcucuuuucagagccaccaaaaaaaaaaaaaaaaaaaaaaaaaaaaaaaaaaaaaaaaaaaaaaaaaaaaaaaaaaaaaaaaaaaaaaaaaaaaaaaaaaaaaaaaaaaaaaaaaaaaa

SEQ ID NO: 32977 - RNA, 1686 nt, Artificial Sequence
  mRNA product Design i-3 (hSL-A100) comprising derived and/or modified sequence from LASV(Lassa virus/H.sapiens-wt/NGA/2016/ISTH_0017;Clade II)__AVO03567__GPCmut7 (opt5)
aggagaaagcuuaccaugggccagaucauuaccuucuuucaagaggugccccacgucaucgaagagguuaugaacauugugcugaucgcccucagccugcuugcuauucugaaggggaucuacaauguggccacaugcggacucuucggccuggucuccuuucuucugcucugugggagaucuugcagcacgaccuauaaaggaguguacgaacugcagacacuggagcucgacauggcgucccugaacaugaccaugccucuuucuuguacaaagaauaacagccaucacuauaucaugguuggcaaugaaaccgggcuggagcucacacugaccaacacguccauuaucaaucauaaauucugcaaccuuucugaugcucacaagaaaaaucuguacgaccaugcccucaugagcauuaucuccaccuuucaccugagcauuccgaacuucaaucaguaugaggccaugucuugugauuuuaacggaggcaagaucuccgugcaguacaaucugagccacacauaugcuauugacgccgcuaaccauugcggcaccaucgccaaugggguccuccaaacauucaugcggauggcguggggaggcucuuacaucgcccuggauuccgggaagggaagcugggacuguauuaugaccucuuaccaguaucuuaucauucagaacacgacaugggaagaucacugccaguuuucccgccccagcccuaucggcuaccuggggcuccugucccaaagaacccgggacauuuauaucucucgcagacuucugggaacauucaccuggacccucagcgauuccgagggcaacgaaacacccggcggguacugucugacgcgguggaugcugaucgaggcugagcucaaaugcuuuggaaauaccgccguggcuaaguguaacgaaaaacaugacgaggaguucugcgauaugcugcgccuuuuugacuucaauaagcaggccauuagacggcugaaaaccccugcgcagaugagcauccagcucauuaacaaggccguuaaugcucugaucaacgaucaacuuauuaugaagaaucaucugcgcgacaucaugggcauccccuauugcaacuacucuaaauauuguuaccucaaucacacagugacagggaagaccucccugccuagaugcugucuggucagcaacggaucuuaccucaaugaaacgcacuucagcgacgauauugaacagcaggccgacaacaugaucacagagcugcuucaaaaagaguauauggaucggcagggcaagaccccgcuggggcucguggaccuguuuguguucuccaccucuuuuuaccugauuagcaucuuccuucaccucguccgcauucccacacauagacacguuaucggaaaaccuugccccaagccucaucggcugaaucacaugggcauuuguuccugcggccuguauaaacaccccggggugccggugaaguggaagcgcugaggacuaguuauaagacugacuagcccgaugggccucccaacgggcccuccuccccuccuugcaccgagauuaaucaaaggcucuuuucagagccaccaaaaaaaaaaaaaaaaaaaaaaaaaaaaaaaaaaaaaaaaaaaaaaaaaaaaaaaaaaaaaaaaaaaaaaaaaaaaaaaaaaaaaaaaaaaaaaaaaaaaa

SEQ ID NO: 32978 - RNA, 1686 nt, Artificial Sequence
  mRNA product Design i-3 (hSL-A100) comprising derived and/or modified sequence from LASV(Lassa virus/H.sapiens-wt/NGA/2018/ISTH_0959;Clade II)__AVV65099__GPCmut7 (opt5)
aggagaaagcuuaccaugggccagaucauuaccuucuuucaagaggugccccacgucaucgaagagguuaugaacauugugcugaucgcccucagccugcuugcuauucugaaggggaucuacaauguggucacaugcggacucuucggccugguguccuuucuucugcucugugggagaucuugcagcacgaccuauaaaggaguuuacgaacugcagacacuggagcucgacauggccucccugaacaugaccaugccucuuucuuguacaaagaauaacagccaucacuauaucauggugggcaaugaaaccgggcuggagcucacacugaccaacacguccauuaucaaucauaaauucugcaaccuuucugaugcgcacaagaaaaaucuguacgaccaugcucucaugagcauuaucuccaccuuucaccugagcauuccgaacuucaaucaguaugaggccaugucuugugauuuuaacggaggcaagaucuccguccaguacaaucugagccacgccuaugcuauugacgccgcuaaccauugcggcacaaucgccaauggggugcuccaaaccuucaugcggauggcguggggaggcucuuacaucgcccuggauuccgggaagggaagcugggacuguauuaugacaucuuaccaguaucuuaucauucagaacaccacgugggaagaucacugccaguuuucccgccccagcccuaucggcuaccuggggcuccugucccaaagaacacgggacauuuauaucucucgcagacuucugggaaccuucacauggacccucagcgauuccgagggcaacgaaacccccggcggguacugucugacacgguggaugcugaucgaggcugagcucaaaugcuuuggaaauacggccguugcuaaguguaacgaaaaacaugacgaggaguucugcgauaugcugcgccuuuuugacuucaauaagcaggccauuagacggcugaaaaccccugcgcagaugagcauccagcucauuaacaaggccgugaaugcucugaucaacgaucaacuuauuaugaagaaucaucugcgcgacaucaugggcauccccuauugcaacuacucuaaauauuguuaccucaaucacacagucaccgggaagacaucccugccuagaugcugucuggugagcaacggaucuuaccucaaugaaacccacuucagcgacgauauugaacagcaggccgacaacaugaucacggagcugcuucaaaaagaguauauugaucggcagggcaagacaccgcuggggcucguggaccuguuugucuucuccaccucuuuuuaccugaucagcauuuuccuucaccucguuaaaauccccacccaucgccacgugauuggaaagccuugccccaaaccucauagacugaaucacaugggcaucuguuccugcggccuguauaagcaccccggggugccggucaaguggaaacggugaggacuaguuauaagacugacuagcccgaugggccucccaacgggcccuccuccccuccuugcaccgagauuaaucaaaggcucuuuucagagccaccaaaaaaaaaaaaaaaaaaaaaaaaaaaaaaaaaaaaaaaaaaaaaaaaaaaaaaaaaaaaaaaaaaaaaaaaaaaaaaaaaaaaaaaaaaaaaaaaaaaaa

SEQ ID NO: 32979 - RNA, 1686 nt, Artificial Sequence
  mRNA product Design i-3 (hSL-A100) comprising derived and/or modified sequence from LASV(LASV003-NIG-2008;Clade II)__AIT17580__GPCmut7 (opt5)
aggagaaagcuuaccaugggccagaucauuaccuucuuucaagaggugccccacgucaucgaagagguuaugaacauugugcugaucgcccucagccugcuugcuauucugaaggggaucuacaauguggccacaugcggacucuucggccuggucuccuuucuucugcucugugggagaucuugcagcacgaccuauaaaggaguguacgaacugcagacacuggagcucgacauggcgucccugaacaugaccaugccucuuucuuguacaaagaauaacagccaucacuauaucaugguuggcaaugaaaccgggcuggagcucacacugaccaacacguccauuaucaaucauaaauucugcaaccuuucugaugcucacaagaaaaaucuguacgaccaugcccucaugagcauuaucuccaccuuucaccugagcauuccgaacuucaaucaguaugaggccaugucuugugauuuuaacggaggcaagaucuccgugcaguacaaucugagccacacauaugcugucgacgccgcuaaccauugcggcaccauugccaauggggugcuccaaacauucaugcggauggcguggggaggcucuuacaucgcccuggauuccgggaagggaagcugggacuguaucaugaccucuuaccaguaucuuauuauccagaacacgacaugggaagaucacugccaguuuucccgccccagcccuauuggcuaccuggggcuccugucccaaagaacccgggacaucuauauuucucgcagacuucugggaacauucaccuggacccucagcgauuccgagagcaacgaaacacccggcggcuacugucugacgcgguggaugcugaucgaggcugagcucaaaugcuuugggaauaccgccguugcuaaguguaacgaaaaacaugacgaggaguucugcgauaugcugcgccuuuuugacuucaauaagcaggccaucagacggcugaaagcgccugcccagaugucuauucagcucaucaacaaggcugugaaugcccugauuaacgaucaacuuaucaugaagaaucaucugcgcgacauuaugggaauccccuauugcaacuacuccaaauauuguuaccucaaucacacagucaccggcagaacaagccugccucggugcugucuggugucuaacgggagcuaccucaaugaaacccacuucuccgacgauaucgaacagcaggcugacaacaugauuacggagcugcuucaaaaggaguauauggaucgccagggaaaaacaccgcugggccucguggaccuguuugucuucucuaccagcuuuuaccugaucuccauuuuccuucaccucguuaagauccccacccauagacacgugauugggaaaccuugccccaagccucaucggcugaaucacaugggaaucuguagcugcggccuguauaaacaccccggcgugccggucaaguggaagcgcugaggacuaguuauaagacugacuagcccgaugggccucccaacgggcccuccuccccuccuugcaccgagauuaaucaaaggcucuuuucagagccaccaaaaaaaaaaaaaaaaaaaaaaaaaaaaaaaaaaaaaaaaaaaaaaaaaaaaaaaaaaaaaaaaaaaaaaaaaaaaaaaaaaaaaaaaaaaaaaaaaaaaa

SEQ ID NO: 32980 - RNA, 1686 nt, Artificial Sequence
  mRNA product Design i-3 (hSL-A100) comprising derived and/or modified sequence from LASV(LASV035-NIG-2009;Clade II)__AIT17588__GPCmut7 (opt5)
aggagaaagcuuaccaugggccagaucauuaccuucuuucaagaggugccccacgucaucgaagagguuaugaacauugugcugaucgcccucagccugcuugcuauucugaaggggaucuacaauguggccacaugcggacucuucggccuggucuccuuucuucugcucugugggagaucuugcagcacgaccuauaaaggaguguacgaacugcagacacuggagcucgacauggcgucccugaacaugaccaugccucuuucuuguacaaagaauaacagccaucacuauaucaugguuggcaaugaaaccgggcuggagcucacacugaccaacacguccauuaucaaucauaaauucugcaaccuuucugaugcucacaagaaaaaucuguacgaccaugcccucaugagcauuaucuccaccuuucaccugagcauuccgaacuucaaucaguaugaggccaugucuugugauuuuaacggaggcaagaucuccgugcaguacaaucugagccacgcuuaugccgucgacgcugccaaccauugcggcacaauugcgaauggggugcuccaaaccuucaugcggauggccuggggaggcucuuacaucgcucuggauuccgggaagggaagcugggacuguaucaugacaucuuaccaguaucuuauuauccagaacaccacgugggaagaucacugccaguuuucccgccccagcccuauuggcuaccuggggcuccugucccaaagaacacgggacaucuauauuucucgcagacuucugggaaccuucacauggacccucagcgauuccgagggcaacgaaacccccggcggguacugucugacacgguggaugcugaucgaggccgagcucaaaugcuuuggaaauacggcuguugccaaguguaacgaaaaacaugacgaggaguucugcgauaugcugcgccuuuuugacuucaauaagcaggcgaucagacggcugaaagccccugcucagaugagcauucagcucaucaacaaggccgugaaugcucugauuaacgaucaacuuaucaugaagaaucaucugcgcgacauuaugggcauccccuauugcaacuacucuaaauauuguuaccucaaucacaccgucacagggaagaccucccugccuagaugcugucuggugagcaacggaucuuaccucaaugaaacacacuucagcgacgauaucgaacagcaggccgacaacaugauuaccgagcugcuucaaaaagaguauaucgaucggcagggcaagacgccgcuggggcucguggaccuguuugucuucuccacaucuuuuuaccugauuagcaucuuccuucaccucguuaaaauucccacccaucgccacgugaucggaaagccuugccccaaaccucauagacugaaucacaugggcauuuguuccugcggccuguauaagcaccccggggugccggucaaguggaaacggugaggacuaguuauaagacugacuagcccgaugggccucccaacgggcccuccuccccuccuugcaccgagauuaaucaaaggcucuuuucagagccaccaaaaaaaaaaaaaaaaaaaaaaaaaaaaaaaaaaaaaaaaaaaaaaaaaaaaaaaaaaaaaaaaaaaaaaaaaaaaaaaaaaaaaaaaaaaaaaaaaaaaa

SEQ ID NO: 32981 - RNA, 1686 nt, Artificial Sequence
  mRNA product Design i-3 (hSL-A100) comprising derived and/or modified sequence from LASV(LASV1000-NIG-2009;Clade II)__AIT17782__GPCmut7 (opt5)
aggagaaagcuuaccaugggccagaucauuaccuucuuucaagaggugccccacgucaucgaagagguuaugaacauugugcugaucgcccucagccugcuugcuauucugaaggggaucuacaauguggccacaugcggacucuucggccuggucuccuuucuucugcucugugggagaucuugcagcacgaccuauaaaggaguguacgaacugcagacacuggagcucgacauggcgucccugaacaugaccaugccucuuucuuguacaaagaauaacagccaucacuauaucaugguuggcaaugaaaccgggcuggagcucacacugaccaacacguccauuaucaaucauaaauucugcaaccuuucugaugcucacaagaaaaaucuguacgaccaugcccucaugagcauuaucuccaccuuucaccugagcauuccgaacuucaaucaguaugaggccaugucuugugauuuuaacggaggcaagaucuccgugcaguacaaucugagccacacauaugcugucgacgccgcuaaccauugcggcaccauugccaauggggugcuccaaacauucaugcggauggcguggggaggcucuuacaucgcccuggauuccgggaagggaagcugggacuguaucaugaccucuuaccaguaucuuauuauccagaacacgacaugggaagaucacugccaguuuucccgccccagcccuauuggcuaccuggggcuccugucccaaagaacccgggacaucuauauuucucgcagacuucugggaacauucaccuggacccucagcgauuccgagggcaacgaaacacccggcggguacugucugacgcgguggaugcugaucgaggcugagcucaaaugcuuuggaaauaccgccguugcuaaguguaacgaaaaacaugacgaggaguucugcgauaugcugcgccuuuuugacuucaauaagcaggccaucaaaagacugaagaccccugcgcagaugagcauucagcucaucaacaaggccgugaaugcucugauuaacgaucaacuuaucaugaaaaaucaucugcgggacauuaugggcauccccuauugcaacuacucuaaguauuguuaccucaaucacacagucacagggaaaaccucccugccucgcugcugucuggugagcaacggaucuuaccucaaugaaacgcacuucagcgacgauaucgaacagcaggccgacaacaugauuacagagcugcuucaaaaggaguauaucgauagacagggcaaaaccccgcuggggcucguggaccuguuugucuucuccaccucuuuuuaccugauuagcaucuuccuucaccucguuaagauucccacacaucggcacguggugggaaaaccuugccccaagccucaucgccugaaucacaugggcaucuguuccugcggccuguauaagcaccccggggucccggugaaauggaagagaugaggacuaguuauaagacugacuagcccgaugggccucccaacgggcccuccuccccuccuugcaccgagauuaaucaaaggcucuuuucagagccaccaaaaaaaaaaaaaaaaaaaaaaaaaaaaaaaaaaaaaaaaaaaaaaaaaaaaaaaaaaaaaaaaaaaaaaaaaaaaaaaaaaaaaaaaaaaaaaaaaaaaa

SEQ ID NO: 32982 - RNA, 1686 nt, Artificial Sequence
  mRNA product Design i-3 (hSL-A100) comprising derived and/or modified sequence from LASV(LASV221-NIG-2010;Clade II)__AIT17624__GPCmut7 (opt5)
aggagaaagcuuaccaugggccagaucauuaccuucuuucaagaggugccccacgucaucgaagagguuaugaacauugugcugaucgcccucagccugcuugcuauucugaaggggaucuacaauguggccacaugcggacucuucggccuggucuccuuucuucugcucugugggagaucuugcagcacgaccuauaaaggaguguacgaacugcagacacuggagcucgacauggcgucccugaacaugaccaugccucuuucuuguacaaagaauaacagccaucacuauaucaugguuggcaaugaaaccgggcuggagcucacacugaccaacacguccauuaucaaucauaaauucugcaaccuuucugaugcucacaagaaaaaucuguacgaccaugcccucaugagcauuaucuccaccuuucaccugagcauuccgaacuucaaucaguaugaggccaugucuugugauuuuaacggaggcaagaucuccgugcaguacaaucugagccacacauaugcuauugacgccgcuaaccauugcggcaccaucgccaaugggguccuccaaacauucaugcggauggcguggggaggcucuuacaucgcccuggauuccgggaagggaagcugggacuguauuaugaccucuuaccaguaucuuaucauucagaacacgacaugggaagaucacugccaguuuucccgccccagcccuaucggcuaccuggggcuccugucccaaagaacccgggacauuuauaucucucgcagacuucugggaacauucaccuggacccucagcgauuccgagggcaacgaaacacccggcggguacugucugacgcgguggaugcugaucgaggcugagcucaaaugcuuuggaaauaccgccguggcuaaguguaacgaaaaacaugacgaggaguucugcgauaugcugcgccuuuuugacuucaauaagcaggccauuagacggcugaaaaccccugcgcagaugagcauccagcucauuaacaaggccguuaaugcucugaucaacgaucaacuuauuaugaagaaucaucugcgcgacaucaugggcauccccuauugcaacuacucuaaauauuguuaccucaaucacacagugacagggaagaccucccugccuagaugcugucuggucagcaacggaucuuaccucaaugaaacgcacuucagcgacgauauugaacagcaggccgacaacaugaucacagagaugcugcaaaaagaguauauggaucggcagggcaagaccccgcuugggcugguggaccucuuuguguucuccaccucuuuuuaccugauuagcaucuuccugcaccuugucaaaauucccacacaucgccacguuaucggaaagccuugccccaaaccucauagacucaaucacaugggcauuuguuccugcggccuguauaagcaccccggggugccggugaaguggaaacggugaggacuaguuauaagacugacuagcccgaugggccucccaacgggcccuccuccccuccuugcaccgagauuaaucaaaggcucuuuucagagccaccaaaaaaaaaaaaaaaaaaaaaaaaaaaaaaaaaaaaaaaaaaaaaaaaaaaaaaaaaaaaaaaaaaaaaaaaaaaaaaaaaaaaaaaaaaaaaaaaaaaaa
